United States Patent Application Publication US 2010/0120627 A1 - sequence listing, part 11

SEQ ID NO: 24685 - DNA, 2159 bp, Homo sapiens
aagcatgactggctacaagggcactttcaccctccatgtcccccaggacactgagaggctggtgctcacatttgtggacaggctgcagaagtttgtcaacaccaccaaagtgctacctttcaacaagaaggggagtgccgtgttccatgaaatcaagatgcttcgtcggaaaaagcccatcactttggaagccatggagaccaacatcatccccctgggggaagtggttggtgaagaccccatggctgaactggagattccatccaggagtttctacaggcagaatggggagccctacataggaaaagtgaaggccagtgtgaccttcctggatccccggaatatttccacagccacagctgcccagactgacctgaacttcatcaatgacgaaggagacactttcccccttcggacgtatggcatgttctctgtggacttcagagatgaggtcacctcagagccacttaatgctggcaaagtgaaggtccaccttgactcgacccaggtcaagatgccagagcacatatccacagtgaaactctggtcactcaatccagacacagggctgtgggaggaggaaggtgatttcaaatttgaaaatcaaaggaggaactgcaagcagtggagtcttctcctaaattcaacccaaatgcaattggcgtccctcagccctatctcaacaagctcaactaccgtcggacggaccatgaggatccacgggttaaaaagacagctttccagattagcatggccaagccaaggcccaactcagctgaggagagcaatgggcccatctatgcctttgagaacctccgggcatgtgaagaggcaccacccagtgcagcccacttccggttctaccagattgagggggatcgatatgactacaacacagtccccttcaacgaagatgaccctatgagctggactgaagactatctggcatggtggccaaagccgatggaattcagggcctgctatatcaaggtgaagattgtggggccactggaagtgaatgtgcgatcccgcaacatggggggcactcatcggcagacagtggggaagctgtatggaatccgagatgtgaggagcactcgggacagggaccagcccaatgtctcagctgcctgtctggagttcaagtgcagtgggatgctctatgatcaggaccgtgtggaccgcaccctggtgaaggtcatcccccagggcagctgccgtcgagccagtgtgaaccccatgctgcatgagtacctggtcaaccacttgccacttgcagtcaacaacgacaccagtgagtacaccatgctggcacccttggacccactgggccacaactatggcatctacactgtcactgaccaggaccctcgcacggccaaggagatcgcgctcggccggtgctttgatggcacatccgatggctcctccagaatcatgaagagcaatgtgggagtagccctcaccttcaactgtgtagagaggcaagtaggccgccagagtgccttccagtacctccaaagcaccccagcccagtcccctgctgcaggcactgtccaaggaagagtgccctcgaggaggcagcagcgagcgagcaggggtggccagcgccagggtggagtggtggcctctctgagatttcctagagttgctcaacagcccctgatcaactaagttttgtggtacttcaccctcttctgccctcatttcatgtgacagccattgtgagactgatgcacaaactgtcacttggttaatttaagcacttctgttttcgtgaatttgcttgtttgtttcttcatgcctttacttactttgtcccatgctactgattggcacgtggcccccacaatggcacaataaagcccctttgtgaaactgttctttaaatgaaacacaagaaattggccactggtaaaactctgcagcttcaactgtacttcatttaatgccattaatgcaaatatacttcctcttctttttgcatggttttgcccacctctgcaatagtgataatctgatgctgaagatcaaataaccaatataaagcatatttcttggccttgctccacaggacataggcaagccttgatcatagttcatacatataaatggtggtgaaataaagaaataaaacacaatacttttacttgaaatgt

SEQ ID NO: 24686 - protein, 306 aa, Homo sapiens; identical to SEQ ID NO: 24674

SEQ ID NO: 24687 - DNA, 4192 bp, Homo sapiens
aggcgaaggcttggacccccagctgaggagtcctgctcaagacacggtcactggatctgagaaacttcccaggggaccgcattccagagtcagtgactctgtgaagcacccacatctacctcttgccacgttcccacgggcttgggggaaagatggtggggaccaaggcctgggtgttctccttcctggtcctggaagtcacatctgtgttggggagacagacgatgctcacccagtcagtaagaagagtccagcctgggaagaagaaccccagcatctttgccaagcctgccgacaccctggagagccctggtgagtggacaacatggttcaacatcgactacccaggcgggaagggcgactatgagcggctggacgccattcgcttctactatggggaccgtgtatgtgcccgtcccctgcggctagaggctcggaccactgactggacacctgcgggcagcactggccaggtggtccatggtagtccccgtgagggtttctggtgcctcaacagggagcagcggcctggccagaactgctctaattacaccgtacgcttcctctgcccaccaggatccctgcgccgagacacagagcgcatctggagcccatggtctccctggagcaagtgctcagctgcctgtggtcagactggggtccagactcgcacacgcatttgcttggcagagatggtgtcgctgtgcagtgaggccagcgaagagggtcagcactgcatgggccaggactgtacagcctgtgacctgacctgcccaatgggccaggtgaatgctgactgtgatgcctgcatgtgccaggacttcatgcttcatggggctgtctcccttcccggaggtgccccagcctcaggggctgctatctacctcctgaccaagacgccgaagctgctgacccagacagacagtgatgggagattccgaatccctggcttgtgccctgatggcaaaagcatcctgaagatcacaaaggtcaagtttgcccccattgtactcacaatgcccaagactagcctgaaggcagccaccatcaaggcagagtttgtgagggcagagactccatacatggtgatgaaccctgagacaaaagcacggagagctgggcagagcgtgtctctgtgctgtaaggccacagggaagcccaggccagacaagtatttttggtatcataatgacacattgctggatccttccctctacaagcatgagagcaagctggtgctgaggaaactgcagcagcaccaggctggggagtacttttgcaaggcccagagtgatgctggggctgtgaagtccaaggttgcccagctgattgtcatagcatctgatgagactccttgcaacccagttcctgagagctatcttatccggctgccccatgattgctttcagaatgccaccaactccttctactatgacgtgggacgctgccctgttaagacttgtgcagggcagcaggataatgggatcaggtgccgtgatgctgtgcagaactgctgtggcatctccaagacagaggaaagggagatccagtgcagtggctacacgctacccaccaaggtggccaaggagtgcagctgccagcggtgtacggaaactcggagcatcgtgcggggccgtgtcagtgctgctgacaatggggagcccatgcgctttggccatgtgtacatggggaacagccgtgtaagcatgactggctacaagggcactttcaccctccatgtcccccaggacactgagaggctggtgctcacatttgtggacaggctgcagaagtttgtcaacaccaccaaagtgctacctttcaacaagaaggggagtgccgtgttccatgaaatcaagatgcttcgtcggaaaaagcccatcactttggaagccatggagaccaacatcatccccctgggggaagtggttggtgaagaccccatggctgaactggagattccatccaggagtttctacaggcagaatggggagccctacataggaaaagtgaaggccagtgtgaccttcctggatccccggaatatttccacagccacagctgcccagactgacctgaacttcatcaatgacgaaggagacactttcccccttcggacgtatggcatgttctctgtggacttcagagatgaggtcacctcagagccacttaatgctggcaaagtgaaggtccaccttgactcgacccaggtcaagatgccagagcacatatccacagtgaaactctggtcactcaatccagacacagggctgtgggaggaggaaggtgatttcaaatttgaaaatcaaaggaggaacaaaagagaagacagaaccttcctggtgggcaacctggagattcgtgagaggaggctctttaacctggatgttcctgaaagcaggcggtgctttgttaaggtgagggcctaccggagtgagaggttcttgcctagtgagcagatccagggggttgtgatctccgtgattaacctggagcctagaactggcttcttgtccaaccctagggcctggggccgctttgacagtgtcatcacaggccccaacggggcctgtgtgcctgccttctgtgatgaccagtcccctgatgcctactctgcctatgtcttggcaagcctggctggggaggaactgcaagcagtggagtcttctcctaaattcaacccaaatgcaattggcgtccctcagccctatctcaacaagctcaactaccgtcggacggaccatgaggatccacgggttaaaaagacagctttccagattagcatggccaagccaaggcccaactcagctgaggagagcaatgggcccatctatgcctttgagaacctccgggcatgtgaagaggcaccacccagtgcagcccacttccggttctaccagattgagggggatcgatatgactacaacacagtccccttcaacgaagatgaccctatgagctggactgaagactatctggcatggtggccaaagccgatggaattcagggcctgctatatcaaggtgaagattgtggggccactggaagtgaatgtgcgatcccgcaacatggggggcactcatcggcagacagtggggaagctgtatggaatccgagatgtgaggagcactcgggacagggaccagcccaatgtctcagctgcctgtctggagttcaagtgcagtgggatgctctatgatcaggaccgtgtggaccgcaccctggtgaaggtcatcccccagggcagctgccgtcgagccagtgtgaaccccatgctgcatgagtacctggtcaaccacttgccacttgcagtcaacaacgacaccagtgagtacaccatgctggcacccttggacccactgggccacaactatggcatctacactgtcactgaccaggaccctcgcacggccaaggagatcgcgctcggccggtgctttgatggcacatccgatggctcctccagaatcatgaagagcaatgtgggagtagccctcaccttcaactgtgtagagaggcaagtaggccgccagagtgccttccagtacctccaaagcaccccagcccagtcccctgctgcaggcactgtccaaggaagagtgccctcgaggaggcagcagcgagcgagcaggggtggccagcgccagggtggagtggtggcctctctgagatttcctagagttgctcaacagcccctgatcaactaagttttgtggtacttcaccctcttctgccctcatttcatgtgacagccattgtgagactgatgcacaaactgtcacttggttaatttaagcacttctgttttcgtgaatttgcttgtttgtttcttcatgcctttacttactttgtcccatgctactgattggcacgtggcccccacaatggcacaataaagcccctttgtgaaactgttctttaaatgaaacacaagaaattggccactggtaaaactctgcagcttcaactgtacttcatttaatgccattaatgcaaatatacttcctcttctttttgcatggttttgcccacctctgcaatagtgataatctgatgctgaagatcaaataaccaatataaagcatatttcttggccttgctccacaggacataggcaagccttgatcatagttcatacatataaatggtggtgaaataaagaaataaaacacaatacttttacttgaaatgt

SEQ ID NO: 24688 - protein, 1184 aa, Homo sapiens
MVGTKAWVFSFLVLEVTSVLGRQTMLTQSVRRVQPGKKNPSIFAKPADTLESPGEWTTWFNIDYPGGKGDYERLDAIRFYYGDRVCARPLRLEARTTDWTPAGSTGQVVHGSPREGFWCLNREQRPGQNCSNYTVRFLCPPGSLRRDTERIWSPWSPWSKCSAACGQTGVQTRTRICLAEMVSLCSEASEEGQHCMGQDCTACDLTCPMGQVNADCDACMCQDFMLHGAVSLPGGAPASGAAIYLLTKTPKLLTQTDSDGRFRIPGLCPDGKSILKITKVKFAPIVLTMPKTSLKAATIKAEFVRAETPYMVMNPETKARRAGQSVSLCCKATGKPRPDKYFWYHNDTLLDPSLYKHESKLVLRKLQQHQAGEYFCKAQSDAGAVKSKVAQLIVIASDETPCNPVPESYLIRLPHDCFQNATNSFYYDVGRCPVKTCAGQQDNGIRCRDAVQNCCGISKTEEREIQCSGYTLPTKVAKECSCQRCTETRSIVRGRVSAADNGEPMRFGHVYMGNSRVSMTGYKGTFTLHVPQDTERLVLTFVDRLQKFVNTTKVLPFNKKGSAVFHEIKMLRRKKPITLEAMETNIIPLGEVVGEDPMAELEIPSRSFYRQNGEPYIGKVKASVTFLDPRNISTATAAQTDLNFINDEGDTFPLRTYGMFSVDFRDEVTSEPLNAGKVKVHLDSTQVKMPEHISTVKLWSLNPDTGLWEEEGDFKFENQRRNKREDRTFLVGNLEIRERRLFNLDVPESRRCFVKVRAYRSERFLPSEQIQGVVISVINLEPRTGFLSNPRAWGRFDSVITGPNGACVPAFCDDQSPDAYSAYVLASLAGEELQAVESSPKFNPNAIGVPQPYLNKLNYRRTDHEDPRVKKTAFQISMAKPRPNSAEESNGPIYAFENLRACEEAPPSAAHFRFYQIEGDRYDYNTVPFNEDDPMSWTEDYLAWWPKPMEFRACYIKVKIVGPLEVNVRSRNMGGTHRQTVGKLYGIRDVRSTRDRDQPNVSAACLEFKCSGMLYDQDRVDRTLVKVIPQGSCRRASVNPMLHEYLVNHLPLAVNNDTSEYTMLAPLDPLGHNYGIYTVTDQDPRTAKEIALGRCFDGTSDGSSRIMKSNVGVALTFNCVERQVGRQSAFQYLQSTPAQSPAAGTVQGRVPSRRQQRASRGGQRQGGVVASLRFPRVAQQPLIN

SEQ ID NO: 24689 - DNA, 2705 bp, Homo sapiens
actggactgctggagaggcgaaggcttggacccccagctgaggagtcctgctcaagacacggtcactggatctgagaaacttcccaggggaccgcattccagagtcagtgactctgtgaagcacccacatctacctcttgccacgttcccacgggcttgggggaaagatggtggggaccaaggcctgggtgttctccttcctggtcctggaagtcacatctgtgttggggagacagacgatgctcacccagtcagtaagaagagtccagcctgggaagaagaaccccagcatctttgccaagcctgccgacaccctggagagccctggtgagtggacaacatggttcaacatcgactacccaggcgggaagggcgactatgagcggctggacgccattcgcttctactatggggaccgtgtatgtgcccgtcccctgcggctagaggctcggaccactgactggacacctgcgggcagcactggccaggtggtccatggtagtccccgtgagggtttctggtgcctcaacaggtgtgaccttcctggatccccggaatatttccacagccacagctgcccagactgacctgaacttcatcaatgacgaaggagacactttcccccttcggacgtatggcatgttctctgtggacttcagagatgaggtcacctcagagccacttaatgctggcaaagtgaaggtccaccttgactcgacccaggtcaagatgccagagcacatatccacagtgaaactctggtcactcaatccagacacagggctgtgggaggaggaaggtgatttcaaatttgaaaatcaaaggaggaacaaaagagaagacagaaccttcctggtgggcaacctggagattcgtgagaggaggctctttaacctggatgttcctgaaagcaggcggtgctttgttaaggtgagggcctaccggagtgagaggttcttgcctagtgagcagatccagggggttgtgatctccgtgattaacctggagcctagaactggcttcttgtccaaccctagggcctggggccgctttgacagtgtcatcacaggccccaacggggcctgtgtgcctgccttctgtgatgaccagtcccctgatgcctactctgcctatgtcttggcaagcctggctggggaggaactgcaagcagtggagtcttctcctaaattcaacccaaatgcaattggcgtccctcagccctatctcaacaagctcaactaccgtcggacggaccatgaggatccacgggttaaaaagacagctttccagattagcatggccaagccaaggcccaactcagctgaggagagcaatgggcccatctatgcctttgagaacctccgggcatgtgaagaggcaccacccagtgcagcccacttccggttctaccagattgagggggatcgatatgactacaacacagtccccttcaacgaagatgaccctatgagctggactgaagactatctggcatggtggccaaagccgatggaattcagggcctgctatatcaaggtgaagattgtggggccactggaagtgaatgtgcgatcccgcaacatggggggcactcatcggcagacagtggggaagctgtatggaatccgagatgtgaggagcactcgggacagggaccagcccaatgtctcagctgcctgtctggagttcaagtgcagtgggatgctctatgatcaggaccgtgtggaccgcaccctggtgaaggtcatcccccagggcagctgccgtcgagccagtgtgaaccccatgctgcatgagtacctggtcaaccacttgccacttgcagtcaacaacgacaccagtgagtacaccatgctggcacccttggacccactgggccacaactatggcatctacactgtcactgaccaggaccctcgcacggccaaggagatcgcgctcggccggtgctttgatggcacatccgatggctcctccagaatcatgaagagcaatgtgggagtagccctcaccttcaactgtgtagagaggcaagtaggccgccagagtgccttccagtacctccaaagcaccccagcccagtcccctgctgcaggcactgtccaaggaagagtgccctcgaggaggcagcagcgagcgagcaggggtggccagcgccagggtggagtggtggcctctctgagatttcctagagttgctcaacagcccctgatcaactaagttttgtggtacttcaccctcttctgccctcatttcatgtgacagccattgtgagactgatgcacaaactgtcacttggttaatttaagcacttctgttttcgtgaatttgcttgtttgtttcttcatgcctttacttactttgtcccatgctactgattggcacgtggcccccacaatggcacaataaagcccctttgtgaaactgttctttaaatgaaacacaagaaattggccactggtaaaactctgcagcttcaactgtacttcatttaatgccattaatgcaaatatacttcctcttctttttgcatggttttgcccacctctgcaatagtgataatctgatgctgaagatcaaataaccaatataaagcatatttcttggccttgctccacaggacataggcaagccttgatcatagttcatacatataaatggtggtgaaataaagaaataaaacacaatacttttacttgaaatgt

SEQ ID NO: 24690 - protein, 574 aa, Homo sapiens; identical to SEQ ID NO: 24676

SEQ ID NO: 24691 - DNA, 1376 bp, Homo sapiens
tcctggtgggcaacctggagattcgtgagaggaggctctttaacctggatgttcctgaaagcaggcggtgctttgttaaggtgagggcctaccggagtgagaggttcttgcctagtgagcagatccagggggttgtgatctccgtgattaacctggagcctagaactggcttcttgtccaaccctagggcctggggccgctttgacagtgtcatcacaggccccaacggggcctgtgtgcctgccttctgtgatgaccagtcccctgatgcctactctgcctatgtcttggcaagcctggctggggaggaactgcaagcagtggagtcttctcctaaattcaacccaaatgcaattggcgtccctcagccctatctcaacaagctcaactaccgtcggacggaccatgaggatccacgggttaaaaagacagctttccagattagcatggccaagccaaggcccaactcagctgaggagagcaatgggcccatctatgcctttgagaacctccgggcatgtgaagaggcaccacccagtgcagcccacttccggttctaccagattgagggggatcgatatgactacaacacagtccccttcaacgaagatgaccctatgagctggactgaagactatctggcatggtggccaaagccgatggaattcagggcctgctatatcaaggtgaagattgtggggccactggaagtgaatgtgcgatcccgcaacatggggggcactcatcggcagacagtggggaagctgtatggaatccgagatgtgaggagcactcgggacagggaccagcccaatcgagcgagcaggggtggccagcgccagggtggagtggtggcctctctgagatttcctagagttgctcaacagcccctgatcaactaagttttgtggtacttcaccctcttctgccctcatttcatgtgacagccattgtgagactgatgcacaaactgtcacttggttaatttaagcacttctgttttcgtgaatttgcttgtttgtttcttcatgcctttacttactttgtcccatgctactgattggcacgtggcccccacaatggcacaataaagcccctttgtgaaactgttctttaaatgaaacacaagaaattggccactggtaaaactctgcagcttcaactgtacttcatttaatgccattaatgcaaatatacttcctcttctttttgcatggttttgcccacctctgcaatagtgataatctgatgctgaagatcaaataaccaatataaagcatatttcttggccttgctccacaggacataggcaagccttgatcatagttcatacatataaatggtggtgaaataaagaaataaaacacaatactttt

SEQ ID NO: 24692 - protein, 151 aa, Homo sapiens; identical to SEQ ID NO: 24672

SEQ ID NO: 24693 - DNA, 1875 bp, Homo sapiens
aagcatgactggctacaagggcactttcaccctccatgtcccccaggacactgagaggctggtgctcacatttgtggacaggctgcagaagtttgtcaacaccaccaaagtgctacctttcaacaagaaggggagtgccgtgttccatgaaatcaagatgcttcgtcggaaaaagcccatcactttggaagccatggagaccaacatcatccccctgggggaagtggttggtgaagaccccatggctgaactggagattccatccaggagtttctacaggcagaatggggagccctacataggaaaagtgaaggccagtgtgaccttcctggatccccggaatatttccacagccacagctgcccagactgacctgaacttcatcaatgacgaaggagacactttcccccttcggacgtatggcatgttctctgtggacttcagagatgaggtcacctcagagccacttaatgctggcaaagtgaaggtccaccttgactcgacccaggtcaagatgccagagcacatatccacagtgaaactctggtcactcaatccagacacagggctgtgggaggaggaaggtgatttcaaatttgaaaatcaaaggaggaactgcaagcagtggagtcttctcctaaattcaacccaaatgcaattggcgtccctcagccctatctcaacaagctcaactaccgtcggacggaccatgaggatccacgggttaaaaagacagctttccagattagcatggccaagccaaggcccaactcagctgaggagagcaatgggcccatctatgcctttgagaacctccgggcatgtgaagaggcaccacccagtgcagcccacttccggttctaccagattgagggggatcgatatgactacaacacagtccccttcaacgaagatgaccctatgagctggactgaagactatctggcatggtggccaaagccgatggaattcagggcctgctatatcaaggtgaagattgtggggccactggaagtgaatgtgcgatcccgcaacatggggggcactcatcggcagacagtggggaagctgtatggaatccgagatgtgaggagcactcgggacagggaccagcccaatgtctcagctgcctgtctggagttcaagtgcagtgggatgctctatgatcaggaccgtgtggaccgcaccctggtgaaggtcatcccccagggcagctgccgtcgagccagtgtgaaccccatgctgcatgagtacctggtcaaccacttgccacttgcagtcaacaacgacaccagtgagtacaccatgctggcacccttggacccactgggccacaactatggcatctacactgtcactgaccaggaccctcgcacggccaaggagatcgcgctcggccggtgctttgatggcacatccgatggctcctccagaatcatgaagagcaatgtgggagtagccctcaccttcaactgtgtagagaggcaagtaggccgccagagtgccttccagtacctccaaagcaccccagcccagtcccctgctgcaggcactgtccaaggaagagtgccctcgaggaggcagcagcgagcgagcaggggtggccagcgccagggtggagtggtggcctctctgagatttcctagagttgctcaacagcccctgatcaactaagttttgtggtacttcaccctcttctgccctcatttcatgtgacagccattgtgagactgatgcacaaactgtcacttggttaatttaagcacttctgttttcgtgaatttgcttgtttgtttcttcatgcctttacttactttgtcccatgctactgattggcacgtggcccccacaatggcacaataaagcccctttgtg

SEQ ID NO: 24694 - protein, 306 aa, Homo sapiens; identical to SEQ ID NO: 24674

SEQ ID NO: 24695 - DNA, 2421 bp, Homo sapiens
actggactgctggagaggcgaaggcttggacccccagctgaggagtcctgctcaagacacggtcactggatctgagaaacttcccaggggaccgcattccagagtcagtgactctgtgaagcacccacatctacctcttgccacgttcccacgggcttgggggaaagatggtggggaccaaggcctgggtgttctccttcctggtcctggaagtcacatctgtgttggggagacagacgatgctcacccagtcagtaagaagagtccagcctgggaagaagaaccccagcatctttgccaagcctgccgacaccctggagagccctggtgagtggacaacatggttcaacatcgactacccaggcgggaagggcgactatgagcggctggacgccattcgcttctactatggggaccgtgtatgtgcccgtcccctgcggctagaggctcggaccactgactggacacctgcgggcagcactggccaggtggtccatggtagtccccgtgagggtttctggtgcctcaacaggtgtgaccttcctggatccccggaatatttccacagccacagctgcccagactgacctgaacttcatcaatgacgaaggagacactttcccccttcggacgtatggcatgttctctgtggacttcagagatgaggtcacctcagagccacttaatgctggcaaagtgaaggtccaccttgactcgacccaggtcaagatgccagagcacatatccacagtgaaactctggtcactcaatccagacacagggctgtgggaggaggaaggtgatttcaaatttgaaaatcaaaggaggaacaaaagagaagacagaaccttcctggtgggcaacctggagattcgtgagaggaggctctttaacctggatgttcctgaaagcaggcggtgctttgttaaggtgagggcctaccggagtgagaggttcttgcctagtgagcagatccagggggttgtgatctccgtgattaacctggagcctagaactggcttcttgtccaaccctagggcctggggccgctttgacagtgtcatcacaggccccaacggggcctgtgtgcctgccttctgtgatgaccagtcccctgatgcctactctgcctatgtcttggcaagcctggctggggaggaactgcaagcagtggagtcttctcctaaattcaacccaaatgcaattggcgtccctcagccctatctcaacaagctcaactaccgtcggacggaccatgaggatccacgggttaaaaagacagctttccagattagcatggccaagccaaggcccaactcagctgaggagagcaatgggcccatctatgcctttgagaacctccgggcatgtgaagaggcaccacccagtgcagcccacttccggttctaccagattgagggggatcgatatgactacaacacagtccccttcaacgaagatgaccctatgagctggactgaagactatctggcatggtggccaaagccgatggaattcagggcctgctatatcaaggtgaagattgtggggccactggaagtgaatgtgcgatcccgcaacatggggggcactcatcggcagacagtggggaagctgtatggaatccgagatgtgaggagcactcgggacagggaccagcccaatgtctcagctgcctgtctggagttcaagtgcagtgggatgctctatgatcaggaccgtgtggaccgcaccctggtgaaggtcatcccccagggcagctgccgtcgagccagtgtgaaccccatgctgcatgagtacctggtcaaccacttgccacttgcagtcaacaacgacaccagtgagtacaccatgctggcacccttggacccactgggccacaactatggcatctacactgtcactgaccaggaccctcgcacggccaaggagatcgcgctcggccggtgctttgatggcacatccgatggctcctccagaatcatgaagagcaatgtgggagtagccctcaccttcaactgtgtagagaggcaagtaggccgccagagtgccttccagtacctccaaagcaccccagcccagtcccctgctgcaggcactgtccaaggaagagtgccctcgaggaggcagcagcgagcgagcaggggtggccagcgccagggtggagtggtggcctctctgagatttcctagagttgctcaacagcccctgatcaactaagttttgtggtacttcaccctcttctgccctcatttcatgtgacagccattgtgagactgatgcacaaactgtcacttggttaatttaagcacttctgttttcgtgaatttgcttgtttgtttcttcatgcctttacttactttgtcccatgctactgattggcacgtggcccccacaatggcacaataaagcccctttgtg

SEQ ID NO: 24696 - protein, 574 aa, Homo sapiens; identical to SEQ ID NO: 24676

SEQ ID NO: 24697 - DNA, 2728 bp, Homo sapiens
gcggcgcagcagcctcgcccgtcgcggagagtgggctctgcccgccgtcccccgggggctgcttcccgccccaggcctccgcggaggacacgtgtcagcacgttcccgcggttgtcattccattgtcatagcccttcccctaggccgggaacccctcccccccaccagccccagttcctttatccctgggcccaacctccccgccgacccgcggtccaggcctcggtctctctcttcggcggcgagccgcggcccagaccccggcagaggacacttgtcggcacgttctcacccctgtcatctcagccccctgcctagctccaccccaggcttgggaacccggcccctgacggcccattgtccgcgggcccagcccccgcgctgaacgcacgctcgcccttgcccctaaccagcgcgtctaccccggcaacgcgcagtgacctgggatgcagccctcaggctgggcggccgccagggaggcggcgggccgcgacatgctggccgccgacctccggtgcagcctcttcgcctcggccctgcagagctacaagcgcgactcggtgctgcggcccttccccgcgtcctacgcccgcggcgactgtaaggactttgaagccctgcttgcagatgccagcaagttacctaacctgaaagaacttctccagtcctccggagacaaccacaaacgggcctgggacctggtgagctggattttatcctcaaaggtcctgacaatccacagtgcagggaaggcagagtttgaaaagatccaaaagctgactggggctcctcacacgcctgttcctgcaccggacttcctgtttgaaattgagtactttgacccagccaacgccaaattttatgagaccaaaggagaacgagacctaatctatgcatttcatggtagccgcctagaaaacttccattccattatccacaatggcctgcactgccatctgaacaagacatccttgttcggagaggggacctacctcaccagtgacttgagcctggccctcatatacagcccccatggccatgggtggcagcacagcctcctcggccccatccttagctgtgtggccgtgtgtgaggtcattgaccatccggacgtcaagtgccaaaccaagaagaaggattccaaggagatagatcgcagacgagcgagaatcaaacatagtgaagggggagacatccctcccaagtacttcgtggtcaccaataaccagctgctgcgagtgaagtacctcctggtgtattcacagaagccacccaagagggcttcgagccagctctcctggttttccagccattggtttaccgtcatgatatccctgtatctgctgctgctgctcatagtgagtgtcatcaactcctctgctttccaacacttttggaatcgtgcgaaaagataatctttctgggcctggtgtgggggctacctcaactatgtgccttatggtaacttgttctgtacctcctatgcctcatgtccagccaggttgagcctaggggccagttgggggaccacaggacaattttcatatggcctaaatgtatccattgcctttgatgatgttcccagccatactccagtcaacggggactactagtccctcactcttaggttttaggggagtccttccatctgctccttcttaaactgtcctagggagttggcttttcagccagggccaaaggaaaaagccctgctgcatttaaaaacaaagtgtccaagctgtcagtggtgtgtttacaatctctcctggcagaggttggccctttctctaatgccttctggaaggcggaaaatgtgggaactataaatcactaggcggttgccttgttttgacttgagacacccaagaggaacagtcatgtttctcataaaaatcagtgggatcatttttgaattccatcagcctttgtatgtgagtgcaaaacattttaacagttttctcaaatcaacaaacagccttctcctatagctgtacttgcccccctccccaaaaaaccatggatgagaaagaaaggagtcaggggcctgataaaaaatacagacttaatgagcaactcaagatgagaaaactgctctttttccaaaaattaccaactgctgattacagctgaaatggaaccaaatgtttgttttctgatttttttttaatagctgtttaacaaattagtctttgctgagtaaaaggggaaatttctaaacctagtgcactgtttggccagtgtccacagcctcttttctggctgtgttttagagaaagggatttgagctataggctcgcctcctgttctcattctcacaaagctgccttgactgtggcctgcaaccacgagtgccatgctttcaggtcttctgtggcctactggccttcaagacagaggcctgccccagtgtgccacagatccatgtggatggagcctccttcagaggggtcacaggtctttgagactcagcctgggctttaatgtgtaggaaaagccttctggccacccagagagccggagccctgcttgctgtattctctgctcccttcttcctgctgggttttagccataatagggcccggtacgatttgggagtgacatttctgtaaagaagaggaaaaatcatttttctataatttgtaaagttgtgaaagagccactaccacagtttttacattgattattggaacatttcagaataaataaagatattttcttaatgatttaa

SEQ ID NO: 24698 - protein, 322 aa, Homo sapiens
MQPSGWAAAREAAGRDMLAADLRCSLFASALQSYKRDSVLRPFPASYARGDCKDFEALLADASKLPNLKELLQSSGDNHKRAWDLVSWILSSKVLTIHSAGKAEFEKIQKLTGAPHTPVPAPDFLFEIEYFDPANAKFYETKGERDLIYAFHGSRLENFHSIIHNGLHCHLNKTSLFGEGTYLTSDLSLALIYSPHGHGWQHSLLGPILSCVAVCEVIDHPDVKCQTKKKDSKEIDRRRARIKHSEGGDIPPKYFVVTNNQLLRVKYLLVYSQKPPKRASSQLSWFSSHWFTVMISLYLLLLLIVSVINSSAFQHFWNRAKR

SEQ ID NO: 24699 - DNA, 2383 bp, Homo sapiens
gcggcgcagcagcctcgcccgtcgcggagagtgggctctgcccgccgtcccccgggggctgcttcccgccccaggcctccgcggaggacacgtgtcagcacgttcccgcggttgtcattccattgtcatagcccttcccctaggccgggaacccctcccccccaccagccccagttcctttatccctgggcccaacctccccgccgacccgcggtccaggcctcggtctctctcttcggcggcgagccgcggcccagaccccggcagaggacacttgtcggcacgttctcacccctgtcatctcagccccctgcctagctccaccccaggcttgggaacccggcccctgacggcccattgtccgcgggcccagcccccgcgctgaacgcacgctcgcccttgcccctaaccagcgcgtctaccccggcaacgcgcagtgacctgggatgcagccctcaggctgggcggccgccagggaggcggcgggccgcgacatgctggccgccgacctccggtgcagcctcttcgcctcggccctgcagagctacaagcgcgactcggtgctgcggcccttccccgcgtcctacgcccgcggcgactgtaaggactttgaagccctgacatccttgttcggagaggggacctacctcaccagtgacttgagcctggccctcatatacagcccccatggccatgggtggcagcacagcctcctcggccccatccttagctgtgtggccgtgtgtgaggtcattgaccatccggacgtcaagtgccaaaccaagaagaaggattccaaggagatagatcgcagacgagcgagaatcaaacatagtgaagggggagacatccctcccaagtacttcgtggtcaccaataaccagctgctgcgagtgaagtacctcctggtgtattcacagaagccacccaagagggcttcgagccagctctcctggttttccagccattggtttaccgtcatgatatccctgtatctgctgctgctgctcatagtgagtgtcatcaactcctctgctttccaacacttttggaatcgtgcgaaaagataatctttctgggcctggtgtgggggctacctcaactatgtgccttatggtaacttgttctgtacctcctatgcctcatgtccagccaggttgagcctaggggccagttgggggaccacaggacaattttcatatggcctaaatgtatccattgcctttgatgatgttcccagccatactccagtcaacggggactactagtccctcactcttaggttttaggggagtccttccatctgctccttcttaaactgtcctagggagttggcttttcagccagggccaaaggaaaaagccctgctgcatttaaaaacaaagtgtccaagctgtcagtggtgtgtttacaatctctcctggcagaggttggccctttctctaatgccttctggaaggcggaaaatgtgggaactataaatcactaggcggttgccttgttttgacttgagacacccaagaggaacagtcatgtttctcataaaaatcagtgggatcatttttgaattccatcagcctttgtatgtgagtgcaaaacattttaacagttttctcaaatcaacaaacagccttctcctatagctgtacttgcccccctccccaaaaaaccatggatgagaaagaaaggagtcaggggcctgataaaaaatacagacttaatgagcaactcaagatgagaaaactgctctttttccaaaaattaccaactgctgattacagctgaaatggaaccaaatgtttgttttctgatttttttttaatagctgtttaacaaattagtctttgctgagtaaaaggggaaatttctaaacctagtgcactgtttggccagtgtccacagcctcttttctggctgtgttttagagaaagggatttgagctataggctcgcctcctgttctcattctcacaaagctgccttgactgtggcctgcaaccacgagtgccatgctttcaggtcttctgtggcctactggccttcaagacagaggcctgccccagtgtgccacagatccatgtggatggagcctccttcagaggggtcacaggtctttgagactcagcctgggctttaatgtgtaggaaaagccttctggccacccagagagccggagccctgcttgctgtattctctgctcccttcttcctgctgggttttagccataatagggcccggtacgatttgggagtgacatttctgtaaagaagaggaaaaatcatttttctataatttgtaaagttgtgaaagagccactaccacagtttttacattgattattggaacatttcagaataaataaagatattttcttaatgatttaa

SEQ ID NO: 24700 - protein, 207 aa, Homo sapiens
MQPSGWAAAREAAGRDMLAADLRCSLFASALQSYKRDSVLRPFPASYARGDCKDFEALTSLFGEGTYLTSDLSLALIYSPHGHGWQHSLLGPILSCVAVCEVIDHPDVKCQTKKKDSKEIDRRRARIKHSEGGDIPPKYFVVTNNQLLRVKYLLVYSQKPPKRASSQLSWFSSHWFTVMISLYLLLLLIVSVINSSAFQHFWNRAKR

SEQ ID NO: 24701 - DNA, 390 bp, Homo sapiens
atgagcaaggagttcgaagaacggaggaatggctacagtaaccttccagcagtcaagaagatgaccttcagccagtacccctatagcaacctctgcaagggcttgggggccttgctctcagaacagggctttcatcttacgaacaagttcctgacctacttccccgggaggagcactgaggatggccgcaagcgaggaggcctgggctacagccagctgggtgacgaccacgtgaaggagactggcttccacttcaccatcacgaaccagggcgcctcggttgcgggcccggcttcagcctcaagttctggcaaggtcagagccgactccaagtcatggggaggattcagcccggaccacggggcagctgctacggctgagctgccttga

SEQ ID NO: 24702 - protein, 129 aa, Homo sapiens [sequence omitted]

SEQ ID NO: 24703 - DNA, 347 bp, Homo sapiens
aagtgatgatgttgccgtccccgggcagcctatagtgctggatttagttaattagctgaagaagatagaatttgtggtgttttcctagaaaactagagctgtgtccgcgtggacttggggaagggtagtcccttcccttctcccaaatgatgtgtggatgcccagggctccacaaagctccaaggcagtgccccctctgttcccaaagcagcttctctcgggagcctccctctcccttgggaagggtgcggctggggcaggagggggctggggggccacctggccttacttgggttttgtcacactctgctcattttgactgaataaaagtcctgttgccaaagtga

SEQ ID NO: 24704 - protein, 58 aa, Homo sapiens
MMCGCPGLHKAPRQCPLCSQSSFSREPPSPLGRVRLGQEGAGGPPGLTWVLSHSAHFD

SEQ ID NO: 24705 - DNA, 3197 bp, Homo sapiens
atttccctcttcccgactcctctagtcccttcatcagtccaggctccccacagtgccccatcttccctcttcttttcccagtctttctctcctgccttctctacccgcatctctcccagccattgcctaaacctcggcagtcctttcaggttggtggcacacagctgggcactaagccatgtcggacttccacgtgcatccccaggccaccgtgggtgaggagggtggtgtggcccgcttccagtgccaaatccatgggcttcccaaacccctgatcacttgggagaagaacagagtcccaattgacacggacaatgagaggtacacattgctgcccaagggggtcctgcagatcacaggacttcgagctgaggacggtggcatcttccactgtgtggcctcaaacatcgccagtatccggatcagccacggggccaggctcactgtgtcaggctcgggctctggggcctacaaggagccagccatcctcgtggggcctgagaacctcaccctgacagtgcaccagaccgcggtgcttgagtgtgtcgccacgggcaacccgcgccccattgtgtcctggagccgcctggatggtcgccctatcggggtggagggcatccaggtgctgggcacaggaaacctcatcatctcagacgtgacggtccagcactctggcgtctacgtctgtgcagccaacagacctggcacccgggtgaggagaacggcacagggccggctggtggtgcaagccccagctgagtttgtgcagcatccccagtccatctccaggccagctgggaccacagccatgttcacctgccaagcccagggtgagccaccgcctcatgtcacgtggctgaaaaatggacaggtgctggggccaggaggccacgtcaggctcaagaataacaacagcacactgaccatttctggaatcggtcctgaggatgaagccatttatcagtgtgtggccgagaacagtgcgggctcatcacaggccagtgccaggctgaccgtactgtgggctgaggggctccccgggcctccccgcaatgtgcgggcagtctctgtgtcttccactgaggtgcgtgtgtcctggagtgagccgctggccaacaccaaggagatcatcggctacgtcctgcacatcaggaaggctgctgacccaccggagctggagtatcaggaggcagtcagcaagagcacctttcagcacctggtcagcgacctggagccctccacagcctacagtttctacatcaaggcctacacaccaaggggggccagctcagcctctgtgcccaccctagctagcaccctgggtgaagcccctgccccacccccactgtcagtgcgagtcctgggcagctcctccttgcagctgctgtgggagccttggccccggctggcccagcacgagggcggcttcaagctgttttaccgcccagcaagcaagacctccttcaccggccccatcctgctgcctggaaccgtctcctcctacaacctcagccagctcgaccccactgcagtgtatgaggtgaagctgctcgcctacaaccagcatggagatggcaatgccacagtccgctttgtgtctttgaggggagcatctgagaggacagccttgagcccaccatgtgactgccggaaggaggaggccgccaaccagacgtccaccacaggcatcgtcatcggcatccacatcggggtcacttgcatcatcttctgtgtcctcttcctcctgttcggccaaaggggcagggtcctcctgtgtaaagattgtggatatgaaggagctggagcagctgttccccccggccagcgcagcagggcagccggaccccagacccacacaggatcctgcagcccccgctccgtgtgaggagacccagctctccgtgctgccacttcaggggtgcggcctgatggaggggaagacgacggaggcgaagaccacagaggccacggctccctgcgccggcctggcggctgccccaccacccccagatggaggccctggcctcctcagtgaaggccaggcttccaggcctgcagcggcccgggttacccagccagctcactcggaacagtagccagtgtctggcaggctccagagggtggacggagcggggcccattctcaggtcaaaagcaagatttctactgtcatgtgggatttggatggtcctgggggctccccagcatttctatcctgactgcctcttgggttgtcaaaacccaaggcagccttgacagggaccccccggccctaacacccatcaggagttggagcagttcctgcaggagcctgttccttccctgggctgacgcccccttgcctctgcctggtacccacatgacttggaactgaactaacatttttctttaaaaagcaaaacttaaaaaaaaaaaaaaagaggagagagatagaggaaggtgaattagactccaaaagatgaccctgctgtagctgggccctgacactgtcaccctccaccgactttgttttctcaggatggatttttgctgttttggctctcagcacctacctcagccggaatgaatgtcctggggggcagtggggcggtggcctcagcccccttaccccacagagcccgaatgcactcctacctcaagtccccttgctggggaccccctctcccttcccacactgttgtccagagtaaaaaaaaaaaaaaaaaaaaaagcacttccccgtttccaggtgtgaaagaaaaaaaaaagcacttccccatttccagatgtgaaagaaaatgtctacctcaaggctcgctggctctgtgggctgtgttgtcactggacctgcctccccgcccctcctgcccacagcccacctacctctcctgcagaggagaggccagaggttgggccaccaaggggaactcttgtggcctacagaaatagaaatggattgggcagagaaaaaatgtgaaagcagccaaaaatgagaggaaatttgttccttgaagtataaattgtccaaacgagccacctcccagcacaccgcctgtccccgtcttgtctgtccactcccattttgagccagcccatccttgatggggatgcccatgaggaacctgggcttgggagggtggcatcagctggccgcctgcctcctgtcctgcaggcccggcccctggaatgtaccatgtgtgggatgggtgtgtgggaggg

SEQ ID NO: 24706 - protein, 568 aa, Homo sapiens
MSDFHVHPQATVGEEGGVARFQCQIHGLPKPLITWEKNRVPIDTDNERYTLLPKGVLQITGLRAEDGGIFHCVASNIASIRISHGARLTVSGSGSGAYKEPAILVGPENLTLTVHQTAVLECVATGNPRPIVSWSRLDGRPIGVEGIQVLGTGNLIISDVTVQHSGVYVCAANRPGTRVRRTAQGRLVVQAPAEFVQHPQSISRPAGTTAMFTCQAQGEPPPHVTWLKNGQVLGPGGHVRLKNNNSTLTISGIGPEDEAIYQCVAENSAGSSQASARLTVLWAEGLPGPPRNVRAVSVSSTEVRVSWSEPLANTKEIIGYVLHIRKAADPPELEYQEAVSKSTFQHLVSDLEPSTAYSFYIKAYTPRGASSASVPTLASTLGEAPAPPPLSVRVLGSSSLQLLWEPWPRLAQHEGGFKLFYRPASKTSFTGPILLPGTVSSYNLSQLDPTAVYEVKLLAYNQHGDGNATVRFVSLRGASERTALSPPCDCRKEEAANQTSTTGIVIGIHIGVTCIIFCVLFLLFGQRGRVLLCKDCGYEGAGAAVPPGQRSRAAGPQTHTGSCSPRSV

SEQ ID NO: 24707 - DNA, 3798 bp, Homo sapiens
agcggtgcgagtgtggagcgcgcaccccgggcgaggctgacagatcgcccgggtgggtgcaagatggcgcaagcggcgctccccctgcgccccccgcgctgctgagcaggcatgcggccccagtcccccaccgcctgggctcggccccggccggagccccagccccggccccggcgccggccccgcgggacgctgtgagccgcgagaggcccgggagccgcgcgtcgccgagccgagctgaccgagagccccatggctgtgcagcgcgccgcgtctccgcgccgcccgcccgccccgctctggccccggctcctgctgccgctgctgttgctgctgctgcccgcgccgagcgagggtcttggccactctgctgaactggcatttgctgtggagccaagtgatgatgttgccgtccccgggcagcctatagtgctggactgcagggtggaggggacccctccagtgcgaatcacctggaggaagaatggggtagagctgccagagagtacccactccaccttgctggccaatgggtccttgatgatccgtcacttcaggctggagccgggaggcagcccttcggatgaaggtgactatgagtgtgtggcccagaaccgctttgggctggtggtcagccggaaggctcgcatccaagctgcaaccatgtcggacttccacgtgcatccccaggccaccgtgggtgaggagggtggtgtggcccgcttccagtgccaaatccatgggcttcccaaacccctgatcacttgggagaagaacagagtcccaattgacacggacaatgagaggtacacattgctgcccaagggggtcctgcagatcacaggacttcgagctgaggacggtggcatcttccactgtgtggcctcaaacatcgccagtatccggatcagccacggggccaggctcactgtgtcaggctcgggctctggggcctacaaggagccagccatcctcgtggggcctgagaacctcaccctgacagtgcaccagaccgcggtgcttgagtgtgtcgccacgggcaacccgcgccccattgtgtcctggagccgcctggatggtcgccctatcggggtggagggcatccaggtgctgggcacaggaaacctcatcatctcagacgtgacggtccagcactctggcgtctacgtctgtgcagccaacagacctggcacccgggtgaggagaacggcacagggccggctggtggtgcaagccccagctgagtttgtgcagcatccccagtccatctccaggccagctgggaccacagccatgttcacctgccaagcccagggtgagccaccgcctcatgtcacgtggctgaaaaatggacaggtgctggggccaggaggccacgtcaggctcaagaataacaacagcacactgaccatttctggaatcggtcctgaggatgaagccatttatcagtgtgtggccgagaacagtgcgggctcatcacaggccagtgccaggctgaccgtactgtgggctgaggggctccccgggcctccccgcaatgtgcgggcagtctctgtgtcttccactgaggtgcgtgtgtcctggagtgagccgctggccaacaccaaggagatcatcggctacgtcctgcacatcaggaaggctgctgacccaccggagctggagtatcaggaggcagtcagcaagagcacctttcagcacctggtcagcgacctggagccctccacagcctacagtttctacatcaaggcctacacaccaaggggggccagctcagcctctgtgcccaccctagctagcaccctgggtgaagcccctgccccacccccactgtcagtgcgagtcctgggcagctcctccttgcagctgctgtgggagccttggccccggctggcccagcacgagggcggcttcaagctgttttaccgcccagcaagcaagacctccttcaccggccccatcctgctgcctggaaccgtctcctcctacaacctcagccagctcgaccccactgcagtgtatgaggtgaagctgctcgcctacaaccagcatggagatggcaatgccacagtccgctttgtgtctttgaggggagcatctgagaggacagccttgagcccaccatgtgactgccggaaggaggaggccgccaaccagacgtccaccacaggcatcgtcatcggcatccacatcggggtcacttgcatcatcttctgtgtcctcttcctcctgttcggccaaaggggcagggtcctcctgtgtaaagatgtggaaaaccagctgtcccctccacagggtccccggagccagagggaccctggcattctagccctaaatggggcgagacggggacagcggggccagctgggccgagacgagaaacgtgtggatatgaaggagctggagcagctgttccccccggccagcgcagcagggcagccggaccccagacccacacaggatcctgcagcccccgctccgtgtgaggagacccagctctccgtgctgccacttcaggggtgcggcctgatggaggggaagacgacggaggcgaagaccacagaggccacggctccctgcgccggcctggcggctgccccaccacccccagatggaggccctggcctcctcagtgaaggccaggcttccaggcctgcagcggcccgggttacccagccagctcactcggaacagtagccagtgtctggcaggctccagagggtggacggagcggggcccattctcaggtcaaaagcaagatttctactgtcatgtgggatttggatggtcctgggggctccccagcatttctatcctgactgcctcttgggttgtcaaaacccaaggcagccttgacagggaccccccggccctaacacccatcaggagttggagcagttcctgcaggagcctgttccttccctgggctgacgcccccttgcctctgcctggtacccacatgacttggaactgaactaacatttttctttaaaaagcaaaacttaaaaaaaaaaaaaaagaggagagagatagaggaaggtgaattagactccaaaagatgaccctgctgtagctgggccctgacactgtcaccctccaccgactttgttttctcaggatggatttttgctgttttggctctcagcacctacctcagccggaatgaatgtcctggggggcagtggggcggtggcctcagcccccttaccccacagagcccgaatgcactcctacctcaagtccccttgctggggaccccctctcccttcccacactgttgtccagagtaaaaaaaaaaaaaaaaaaaaaagcacttccccgtttccaggtgtgaaagaaaaaaaaaagcacttccccatttccagatgtgaaagaaaatgtctacctcaaggctcgctggctctgtgggctgtgttgtcactggacctgcctccccgcccctcctgcccacagcccacctacctctcctgcagaggagaggccagaggttgggccaccaaggggaactcttgtggcctacagaaatagaaatggattgggcagagaaaaaatgtgaaagcagccaaaaatgagaggaaatttgttccttgaagtataaattgtccaaacgagccacctcccagcacaccgcctgtccccgtcttgtctgtccactcccattttgagccagcccatccttgatggggatgcccatgaggaacctgggcttgggagggtggcatcagctggccgcctgcctcctgtcctgcaggcccggcccctggaatgtaccatgtgtgggatgggtgtgtgggaggg

SEQ ID NO: 24708 - protein, 814 aa, Homo sapiens
MAVQRAASPRRPPAPLWPRLLLPLLLLLLPAPSEGLGHSAELAFAVEPSDDVAVPGQPIVLDCRVEGTPPVRITWRKNGVELPESTHSTLLANGSLMIRHFRLEPGGSPSDEGDYECVAQNRFGLVVSRKARIQAATMSDFHVHPQATVGEEGGVARFQCQIHGLPKPLITWEKNRVPIDTDNERYTLLPKGVLQITGLRAEDGGIFHCVASNIASIRISHGARLTVSGSGSGAYKEPAILVGPENLTLTVHQTAVLECVATGNPRPIVSWSRLDGRPIGVEGIQVLGTGNLIISDVTVQHSGVYVCAANRPGTRVRRTAQGRLVVQAPAEFVQHPQSISRPAGTTAMFTCQAQGEPPPHVTWLKNGQVLGPGGHVRLKNNNSTLTISGIGPEDEAIYQCVAENSAGSSQASARLTVLWAEGLPGPPRNVRAVSVSSTEVRVSWSEPLANTKEIIGYVLHIRKAADPPELEYQEAVSKSTFQHLVSDLEPSTAYSFYIKAYTPRGASSASVPTLASTLGEAPAPPPLSVRVLGSSSLQLLWEPWPRLAQHEGGFKLFYRPASKTSFTGPILLPGTVSSYNLSQLDPTAVYEVKLLAYNQHGDGNATVRFVSLRGASERTALSPPCDCRKEEAANQTSTTGIVIGIHIGVTCIIFCVLFLLFGQRGRVLLCKDVENQLSPPQGPRSQRDPGILALNGARRGQRGQLGRDEKRVDMKELEQLFPPASAAGQPDPRPTQDPAAPAPCEETQLSVLPLQGCGLMEGKTTEAKTTEATAPCAGLAAAPPPPDGGPGLLSEGQASRPAAARVTQPAHSEQ

SEQ ID NO: 24709 - DNA, 3430 bp, Homo sapiens
acaacgcgtggctatgcgagcatggctctacctcctcttcggagccggctgcggacgctagggcctctctccctcctccacggaatggttggctgtcagggaagcacatgggcctccatatcccggcggaataggtcagcttggttctcacgaaggaaagggcctcccagcaggtgacccagggtagccagaacacccagctccctcctcatccctggagctggggagacctctgagacccagacatccccgtgtggggagaagaggccagtcggcttggctgtggccaagtgggactgggaccaggataagatctcctgggctcaaccaagcgggctgagctgggctggttcctgggcaggctgtgagctgccccaggcaggcccccggccggctctgacccgggccctgctgccccctgctggaactgggcagacgctgttgctgcaggctctggtgtacgacgccataaagggcaatgggaggaagaagtcacccccagcctgcaggaaccaggtggaggctgaagtcattgtccactctgactttagtgcatctaacgggaaccctgacctccatctccaagacctggagcctgaggaccccctgcctccagaggctcctgatctcatctcgggtgttggggatccagggcagggggcagcctggctggacagggagttgggagggtgtgagctggcagcccccgggccagacagacttacctgcttgccagaggcagccagtgcttcctgctcctacccggacctccagccaggcgaggtgctagaggagacccctggagatagctgccagctcaaatccccctgccctctaggagccagcccaggcctgcccagatccccggtctcctcctctgcctagctcttcccagaggatgtggtttggggcaggcaggtatggatcacataggatgcgatacctgtggccgtgtatgtccacatgtgtgcctgtagatacatcatcaagccctttggagcttcctaagttgctttggctgaggggagaggaaaacatggattattcactccccccatactctttgtgatacacatgtgacatgtgaaagacatacgagacatagctacatgtgatgtgcacatgtgtgaagtgcatgtatgcgtactggttgttgagctgggaaaccgtggcccaggcagtggtcactacagcctgattggtcctccaggtcagaacggtgccccacagtggtcagtccccagccctgtgggcccccacctccatcgcccagccttttattacacactctgagagtgtctccaatgcctgtctgacaaagacagtcccagcccattctcctgtctggctgggttgggtgcaagcaggctctgaatgcctggcatttcagctgcatcacctcccagctccttattgcccaaatagagagggtggccctggctcccctccgagcaactctgcatttaattttgtaatctgggaagtgcctggttttgaaaatccgctttctctcactcttcccctccttccttgcccctggctgctctagtgttctgtctcccagtcacctcgctctcccagcaccagtgcccttctcctgctcccagatactctttcctttcctctctcctgttttccttcctctgctatctctcacacctctcccagactatgtcatcttgttctcctgcctgggttcaaactctgcatccttctctaacaacgtgactacctcatgtctgcttcaaggcccccgtgcccttcctgtatccgcggctgccgcgcactcgcctgccatcctcctgcctcctcttcactcagtgcttctgcttgccctgccccaggcagcccacccacgcccagtgcgggtgtggagaagatcttctggcttccctgcatcttgcctttgggattgggatccaagggttctccatggatggatccaagtcatagaggggaatgtttgagacagggaagggggctgtgatccagaggctcagaataaaaagatgccctcccttctatgcaggggggcaagtttactggatggagatgatttgggcctctcttccagaagaagctaaaggaagagaaggggagtgagagttcagggaggcccttcccaccctgtgaggcttgacttgatctggattggggatgacaggaatctcaccctctggggtgctggcaaggaggtctttgcacaggaaaaggggtagctcatttcagtttgttttttctttaaattgaatcctcaagtcattttctgttcacctgccgcacagggacaagcttgacttctattttctgtgtagtgaaaacaatgtcatttatttggtttttcacctcagccctctcataggagcatagaatgttagggtctttactccctaatgatgtctgattggcacatcaagagttaactctgccttctgggccaaattcgaaataaccagtccatttttccttttttttttttttttttttaaatggtggaatgtctctcagcacagttgcggcttcctcaaaccctgaaagcatctgtgtttattatactcgggtgtcactcactgttgatgtctgcacctacgtttccacctcctccccctccttcagccagcctatgataacactaaagattattaatgttggttttgtatctcgttaaagacagaattgtcacttgtagtatttctgtagcattcagcgctgctgtggctaacaccactgtgtatgtttcatcattgctctgaaggtcaaaagcctcattttattttgctggtttgattttttttttttaaagaagaaaaaaaaactgccctgaattaaatggctgttttaacagtaggctcttagcattataccacatagtcatttttcatgttcttgtttaacaggcactgaggttctggtttaaattaaatagctgcaaatgagacaatttataacccattaggttgggtggaaaattgtttctcaaaagcaaataagtaataaatctggtatctgcctataactcacagttgataagaaagtggccatttctcactagcactatatatgatttgggctctgggtaatttggaagtgttaggtttgtgtctttgtagcagtatttttattagaaaagaatctattggccttttacagggtattaatccctttgtcacctaccattgatgccttaagttttctgagtctcaattaaaaatcttccttttcttgatgcatgacaagtgtaatcagtacttgctcatttatttgtctgtatttagtttatgctgtactatttaattatccttccagcgttttttttttctccttacaaatatgatactctttagtgttaagctaaggcattgattcatgtatctgtccttataatgaattaataaactattttccagaaatgtggaattctcttttggaa

SEQ ID NO: 24710 - protein, 103 aa, Homo sapiens
MGGRSHPQPAGTRWRLKSLSTLTLVHLTGTLTSISKTWSLRTPCLQRLLISSRVLGIQGRGQPGWTGSWEGVSWQPPGQTDLPACQRQPVLPAPTRTSSQARC

SEQ ID NO: 24711 - DNA, 5567 bp, Homo sapiens
agcaatatttaggggaggctgaggaggcctggggacagttttgggagagaaagagaatggtcgttgtggggctggggtaaatggggagaagaaagggtaggtctgcgctgagccggagtagtttggaaagggtgaatcagggagaggttaaagtgattggaaggggagcgagggagggcggtggggggcaggcttggggtactggggggggggcagagaccttagttgcgggatcccgcgctcagcgtcgcccctcgcgcccctagcggctcccgccatcactcaggcgcccgaggcgctgtcgcggacgcgggcgagcacagcgcgcttcgtgtgccgcgcgtcgggggagccgcggccagcgctgcgctggctgcacaacggggcgccgctgcggcccaacgggcgcgtcaaggtccagggcggcggtggcagcctggtcatcacacagatcggcctgcaggacgccggctactaccagtgcgtggctgagaacagcgcgggaatggcgtgcgctgccgcgtcgctggccgtggtggtgcgcgaggggctgcccagcgcccccacgcgggtcactgctacgccactgagcagctccgctgtgttggtggcctgggagcggcccgagatgcacagcgagcagatcatcggcttctctctccactaccagaaggcacggggcatggacaatgtggaataccagtttgcagtgaacaacgacaccacagaactacaggttcgggacctggaacccaacacagattatgagttctacgtggtggcctactcccagctgggagccagccgcacctccaccccagcactggtgcacacactggatgatgtccccagtgcagcaccccagctctccctgtccagccccaacccttcggacatcagggtggcgtggctgcccctgccccccagcctgagcaatgggcaggtggtgaagtacaagatagaatacggtttgggaaaggaagatcagattttctctactgaggtgcgaggaaatgagacacagcttatgctgaactcgcttcagccaaacaaggtgtatcgagtacggatttcggctggtacagcagccggcttcggggccccctcccagtggatgcatcacaggacgcccagtatgcacaaccagagccatgtcccttttgcccctgcagagttgaaggtgcaggcaaagatggagtccctggtcgtgtcatggcagccaccccctcaccccacccagatctctggctacaaactatattggcgggaggtgggggctgaggaggaggccaatggcgatcgcctgccagggggccgtggagaccaggcttgggatgtggggcctgtccggctcaagaagaaagtgaagcagtatgagctgacccagctagtccctggccggctgtacgaggtgaagctcgtggctttcaacaaacatgaggatggctatgcagcagtgtggaagggcaagacggagaaggcgccggcaccagacatgcctatccagaggggaccacccctgcctccagcccacgtccatgcggaatcaaacagctccacatccatctggcttcggtggaaaaagccagatttcaccacagtcaagattgtcaactacactgtgcgcttcagcccctgggggctcaggaatgcctccctggtcacctattacaccagttctggagaagacatcctcattggcggcttgaagccattcaccaaatacgagtttgcagtgcagtctcacggcgtggacatggatgggcctttcggctctgtggtggagcgctccaccctgcctgaccggccctccacacccccatccgacctgcgactgagccccctgacaccgtccacggttcggctgcactggtgcccccccacagagcccaacggggagatcgtggagtatctgatcctgtacagcagcaaccacacgcagcctgagcaccagtggaccttgctcaccacgcagggaaacatcttcagtgctgaggtccatggcctggagagcgacactcggtacttcttcaagatgggggcgcgcacagaggtgggacctgggcctttctcccgcctgcaggatgtgatcacgctccaggagaagctgtcagactcgctggacatgcactcagtcacgggcatcatcgtgggtgtctgcctgggcctcctctgcctcctggcctgcatgtgtgctggcctgcgccgcagcccccacagggaatccctcccaggcctgtcctccaccgccacccccgggaatcccgcgctgtactccagagctcggcttggcccccccagccccccagctgcccatgaattggagtcccttgtgcacccccatccccaggactggtccccgccaccctcagacgtggaggacagggctgaagtgcacagccttatgggtggcggtgtttctgaaggccggagtcactccaaaagaaagatctcctgggctcaaccaagcgggctgagctgggctggttcctgggcaggctgtgagctgccccaggcaggcccccggccggctctgacccgggccctgctgccccctgctggaactgggcagacgctgttgctgcaggctctggtgtacgacgccataaagggcaatgggaggaagaagtcacccccagcctgcaggaaccaggtggaggctgaagtcattgtccactctgactttagtgcatctaacgggaaccctgacctccatctccaagacctggagcctgaggaccccctgcctccagaggctcctgatctcatctcgggtgttggggatccagggcagggggcagcctggctggacagggagttgggagggtgtgagctggcagcccccgggccagacagacttacctgcttgccagaggcagccagtgcttcctgctcctacccggacctccagccaggcgaggtgctagaggagacccctggagatagctgccagctcaaatccccctgccctctaggagccagcccaggcctgcccagatccccggtctcctcctctgcctagctcttcccagaggatgtggtttggggcaggcaggtatggatcacataggatgcgatacctgtggccgtgtatgtccacatgtgtgcctgtagatacatcatcaagccctttggagcttcctaagttgctttggctgaggggagaggaaaacatggattattcactccccccatactctttgtgatacacatgtgacatgtgaaagacatacgagacatagctacatgtgatgtgcacatgtgtgaagtgcatgtatgcgtactggttgttgagctgggaaaccgtggcccaggcagtggtcactacagcctgattggtcctccaggtcagaacggtgccccacagtggtcagtccccagccctgtgggcccccacctccatcgcccagccttttattacacactctgagagtgtctccaatgcctgtctgacaaagacagtcccagcccattctcctgtctggctgggttgggtgcaagcaggctctgaatgcctggcatttcagctgcatcacctcccagctccttattgcccaaatagagagggtggccctggctcccctccgagcaactctgcatttaattttgtaatctgggaagtgcctggttttgaaaatccgctttctctcactcttcccctccttccttgcccctggctgctctagtgttctgtctcccagtcacctcgctctcccagcaccagtgcccttctcctgctcccagatactctttcctttcctctctcctgttttccttcctctgctatctctcacacctctcccagactatgtcatcttgttctcctgcctgggttcaaactctgcatccttctctaacaacgtgactacctcatgtctgcttcaaggcccccgtgcccttcctgtatccgcggctgccgcgcactcgcctgccatcctcctgcctcctcttcactcagtgcttctgcttgccctgccccaggcagcccacccacgcccagtgcgggtgtggagaagatcttctggcttccctgcatcttgcctttgggattgggatccaagggttctccatggatggatccaagtcatagaggggaatgtttgagacagggaagggggctgtgatccagaggctcagaataaaaagatgccctcccttctatgcaggggggcaagtttactggatggagatgatttgggcctctcttccagaagaagctaaaggaagagaaggggagtgagagttcagggaggcccttcccaccctgtgaggcttgacttgatctggattggggatgacaggaatctcaccctctggggtgctggcaaggaggtctttgcacaggaaaaggggtagctcatttcagtttgttttttctttaaattgaatcctcaagtcattttctgttcacctgccgcacagggacaagcttgacttctattttctgtgtagtgaaaacaatgtcatttatttggtttttcacctcagccctctcataggagcatagaatgttagggtctttactccctaatgatgtctgattggcacatcaagagttaactctgccttctgggccaaattcgaaataaccagtccatttttccttttttttttttttttttttaaatggtggaatgtctctcagcacagttgcggcttcctcaaaccctgaaagcatctgtgtttattatactcgggtgtcactcactgttgatgtctgcacctacgtttccacctcctccccctccttcagccagcctatgataacactaaagattattaatgttggttttgtatctcgttaaagacagaattgtcacttgtagtatttctgtagcattcagcgctgctgtggctaacaccactgtgtatgtttcatcattgctctgaaggtcaaaagcctcattttattttgctggtttgattttttttttttaaagaagaaaaaaaaactgccctgaattaaatggctgttttaacagtaggctcttagcattataccacatagtcatttttcatgttcttgtttaacaggcactgaggttctggtttaaattaaatagctgcaaatgagacaatttataacccattaggttgggtggaaaattgtttctcaaaagcaaataagtaataaatctggtatctgcctataactcacagttgataagaaagtggccatttctcactagcactatatatgatttgggctctgggtaatttggaagtgttaggtttgtgtctttgtagcagtatttttattagaaaagaatctattggccttttacagggtattaatccctttgtcacctaccattgatgccttaagttttctgagtctcaattaaaaatcttccttttcttgatgcatgacaagtgtaatcagtacttgctcatttatttgtctgtatttagtttatgctgtactatttaattatccttccagcgttttttttttctccttacaaatatgatactctttagtgttaagctaaggcattgattcatgtatctgtccttataatgaattaataaactattttccagaaatgtggaattctcttttggaa

SEQ ID NO: 24712 - protein, 838 aa, Homo sapiens
MACAAASLAVVVREGLPSAPTRVTATPLSSSAVLVAWERPEMHSEQIIGFSLHYQKARGMDNVEYQFAVNNDTTELQVRDLEPNTDYEFYVVAYSQLGASRTSTPALVHTLDDVPSAAPQLSLSSPNPSDIRVAWLPLPPSLSNGQVVKYKIEYGLGKEDQIFSTEVRGNETQLMLNSLQPNKVYRVRISAGTAAGFGAPSQWMHHRTPSMHNQSHVPFAPAELKVQAKMESLVVSWQPPPHPTQISGYKLYWREVGAEEEANGDRLPGGRGDQAWDVGPVRLKKKVKQYELTQLVPGRLYEVKLVAFNKHEDGYAAVWKGKTEKAPAPDMPIQRGPPLPPAHVHAESNSSTSIWLRWKKPDFTTVKIVNYTVRFSPWGLRNASLVTYYTSSGEDILIGGLKPFTKYEFAVQSHGVDMDGPFGSVVERSTLPDRPSTPPSDLRLSPLTPSTVRLHWCPPTEPNGEIVEYLILYSSNHTQPEHQWTLLTTQGNIFSAEVHGLESDTRYFFKMGARTEVGPGPFSRLQDVITLQEKLSDSLDMHSVTGIIVGVCLGLLCLLACMCAGLRRSPHRESLPGLSSTATPGNPALYSRARLGPPSPPAAHELESLVHPHPQDWSPPPSDVEDRAEVHSLMGGGVSEGRSHSKRKISWAQPSGLSWAGSWAGCELPQAGPRPALTRALLPPAGTGQTLLLQALVYDAIKGNGRKKSPPACRNQVEAEVIVHSDFSASNGNPDLHLQDLEPEDPLPPEAPDLISGVGDPGQGAAWLDRELGGCELAAPGPDRLTCLPEAASASCSYPDLQPGEVLEETPGDSCQLKSPCPLGASPGLPRSPVSSSA

SEQ ID NO: 24713 - DNA, 6508 bp, Homo sapiens
ctcgcccaagatggcgatggaggggcgggtgaggcggcagcggccctggcccccgcgccggccccagctcgggcccgggcccccgaggccgcgcccccgcccgcggcgccgcgcctccccgggccactgacgcccggcgcgctctccccccgcggcggcggccgaagcacggggaggcggcggcggcggcggcggcccgagcccagccccatggcgcggggggacgccggccgcggccgcgggctcctcgcgttgaccttctgcctgttggccgcgcgcggggagctgctgttgccccaggagacgactgtggagctgagctgtggagtggggccactgcaagtgatcctgggcccagagcaggctgcagtgctaaactgtagcctgggggctgctgccgctggaccccccaccagggtgacctggagcaaggatggggacaccctgctggagcacgaccacttacacctgctgcccaatggttccctgtggctgtcccagccactagcacccaatggcagtgacgagtcagtccctgaggctgtgggggtcattgaaggcaactattcgtgcctagcccacggccccctcggagtgctggccagccagactgctgtcgtcaagcttgccacactcgcagacttctctctgcacccggagtctcagacggtggaggagaacgggacagctcgctttgagtgccacattgaagggctgccagctcccatcattacttgggagaaggaccaggtgacattgcctgaggagcctcggctcatcgtgcttcccaacggcgtccttcagatcctggatgttcaggagagtgatgcaggcccctaccgctgcgtggccaccaactcagctcgccagcacttcagccaggaggccctactcagtgtggcccacagagggtccctggcgtccaccagggggcaggacgtggtcattgtggcagccccagagaacaccacagtggtgtctggccagagtgtggtgatggaatgtgtggcctcagctgaccccaccccttttgtgtcctgggtccgacaagacgggaagcccatctccacagatgtcatcgtcctgggccgcaccaacctactaattgccaacgcgcagccctggcactccggcgtctatgtctgccgcgccaacaagccccgcacgcgcgacttcgccactgcagccgctgagctccgtgtgctggcggctcccgccatcactcaggcgcccgaggcgctgtcgcggacgcgggcgagcacagcgcgcttcgtgtgccgcgcgtcgggggagccgcggccagcgctgcgctggctgcacaacggggcgccgctgcggcccaacgggcgcgtcaaggtccagggcggcggtggcagcctggtcatcacacagatcggcctgcaggacgccggctactaccagtgcgtggctgagaacagcgcgggaatggcgtgcgctgccgcgtcgctggccgtggtggtgcgcgaggggctgcccagcgcccccacgcgggtcactgctacgccactgagcagctccgctgtgttggtggcctgggagcggcccgagatgcacagcgagcagatcatcggcttctctctccactaccagaaggcacggggcatggacaatgtggaataccagtttgcagtgaacaacgacaccacagaactacaggttcgggacctggaacccaacacagattatgagttctacgtggtggcctactcccagctgggagccagccgcacctccaccccagcactggtgcacacactggatgatgtccccagtgcagcaccccagctctccctgtccagccccaacccttcggacatcagggtggcgtggctgcccctgccccccagcctgagcaatgggcaggtggtgaagtacaagatagaatacggtttgggaaaggaagatcagattttctctactgaggtgcgaggaaatgagacacagcttatgctgaactcgcttcagccaaacaaggtgtatcgagtacggatttcggctggtacagcagccggcttcggggccccctcccagtggatgcatcacaggacgcccagtatgcacaaccagagccatgtcccttttgcccctgcagagttgaaggtgcaggcaaagatggagtccctggtcgtgtcatggcagccaccccctcaccccacccagatctctggctacaaactatattggcgggaggtgggggctgaggaggaggccaatggcgatcgcctgccagggggccgtggagaccaggcttgggatgtggggcctgtccggctcaagaagaaagtgaagcagtatgagctgacccagctagtccctggccggctgtacgaggtgaagctcgtggctttcaacaaacatgaggatggctatgcagcagtgtggaagggcaagacggagaaggcgccggcaccagacatgcctatccagaggggaccacccctgcctccagcccacgtccatgcggaatcaaacagctccacatccatctggcttcggtggaaaaagccagatttcaccacagtcaagattgtcaactacactgtgcgcttcagcccctgggggctcaggaatgcctccctggtcacctattacaccagttctggagaagacatcctcattggcggcttgaagccattcaccaaatacgagtttgcagtgcagtctcacggcgtggacatggatgggcctttcggctctgtggtggagcgctccaccctgcctgaccggccctccacacccccatccgacctgcgactgagccccctgacaccgtccacggttcggctgcactggtgcccccccacagagcccaacggggagatcgtggagtatctgatcctgtacagcagcaaccacacgcagcctgagcaccagtggaccttgctcaccacgcagggaaacatcttcagtgctgaggtccatggcctggagagcgacactcggtacttcttcaagatgggggcgcgcacagaggtgggacctgggcctttctcccgcctgcaggatgtgatcacgctccaggagaagctgtcagactcgctggacatgcactcagtcacgggcatcatcgtgggtgtctgcctgggcctcctctgcctcctggcctgcatgtgtgctggcctgcgccgcagcccccacagggaatccctcccaggcctgtcctccaccgccacccccgggaatcccgcgctgtactccagagctcggcttggcccccccagccccccagctgcccatgaattggagtcccttgtgcacccccatccccaggactggtccccgccaccctcagacgtggaggacagggctgaagtgcacagccttatgggtggcggtgtttctgaaggccggagtcactccaaaagaaagatctcctgggctcaaccaagcgggctgagctgggctggttcctgggcaggctgtgagctgccccaggcaggcccccggccggctctgacccgggccctgctgccccctgctggaactgggcagacgctgttgctgcaggctctggtgtacgacgccataaagggcaatgggaggaagaagtcacccccagcctgcaggaaccaggtggaggctgaagtcattgtccactctgactttagtgcatctaacgggaaccctgacctccatctccaagacctggagcctgaggaccccctgcctccagaggctcctgatctcatctcgggtgttggggatccagggcagggggcagcctggctggacagggagttgggagggtgtgagctggcagcccccgggccagacagacttacctgcttgccagaggcagccagtgcttcctgctcctacccggacctccagccaggcgaggtgctagaggagacccctggagatagctgccagctcaaatccccctgccctctaggagccagcccaggcctgcccagatccccggtctcctcctctgcctagctcttcccagaggatgtggtttggggcaggcaggtatggatcacataggatgcgatacctgtggccgtgtatgtccacatgtgtgcctgtagatacatcatcaagccctttggagcttcctaagttgctttggctgaggggagaggaaaacatggattattcactccccccatactctttgtgatacacatgtgacatgtgaaagacatacgagacatagctacatgtgatgtgcacatgtgtgaagtgcatgtatgcgtactggttgttgagctgggaaaccgtggcccaggcagtggtcactacagcctgattggtcctccaggtcagaacggtgccccacagtggtcagtccccagccctgtgggcccccacctccatcgcccagccttttattacacactctgagagtgtctccaatgcctgtctgacaaagacagtcccagcccattctcctgtctggctgggttgggtgcaagcaggctctgaatgcctggcatttcagctgcatcacctcccagctccttattgcccaaatagagagggtggccctggctcccctccgagcaactctgcatttaattttgtaatctgggaagtgcctggttttgaaaatccgctttctctcactcttcccctccttccttgcccctggctgctctagtgttctgtctcccagtcacctcgctctcccagcaccagtgcccttctcctgctcccagatactctttcctttcctctctcctgttttccttcctctgctatctctcacacctctcccagactatgtcatcttgttctcctgcctgggttcaaactctgcatccttctctaacaacgtgactacctcatgtctgcttcaaggcccccgtgcccttcctgtatccgcggctgccgcgcactcgcctgccatcctcctgcctcctcttcactcagtgcttctgcttgccctgccccaggcagcccacccacgcccagtgcgggtgtggagaagatcttctggcttccctgcatcttgcctttgggattgggatccaagggttctccatggatggatccaagtcatagaggggaatgtttgagacagggaagggggctgtgatccagaggctcagaataaaaagatgccctcccttctatgcaggggggcaagtttactggatggagatgatttgggcctctcttccagaagaagctaaaggaagagaaggggagtgagagttcagggaggcccttcccaccctgtgaggcttgacttgatctggattggggatgacaggaatctcaccctctggggtgctggcaaggaggtctttgcacaggaaaaggggtagctcatttcagtttgttttttctttaaattgaatcctcaagtcattttctgttcacctgccgcacagggacaagcttgacttctattttctgtgtagtgaaaacaatgtcatttatttggtttttcacctcagccctctcataggagcatagaatgttagggtctttactccctaatgatgtctgattggcacatcaagagttaactctgccttctgggccaaattcgaaataaccagtccatttttccttttttttttttttttttttaaatggtggaatgtctctcagcacagttgcggcttcctcaaaccctgaaagcatctgtgtttattatactcgggtgtcactcactgttgatgtctgcacctacgtttccacctcctccccctccttcagccagcctatgataacactaaagattattaatgttggttttgtatctcgttaaagacagaattgtcacttgtagtatttctgtagcattcagcgctgctgtggctaacaccactgtgtatgtttcatcattgctctgaaggtcaaaagcctcattttattttgctggtttgattttttttttttaaagaagaaaaaaaaactgccctgaattaaatggctgttttaacagtaggctcttagcattataccacatagtcatttttcatgttcttgtttaacaggcactgaggttctggtttaaattaaatagctgcaaatgagacaatttataacccattaggttgggtggaaaattgtttctcaaaagcaaataagtaataaatctggtatctgcctataactcacagttgataagaaagtggccatttctcactagcactatatatgatttgggctctgggtaatttggaagtgttaggtttgtgtctttgtagcagtatttttattagaaaagaatctattggccttttacagggtattaatccctttgtcacctaccattgatgccttaagttttctgagtctcaattaaaaatcttccttttcttgatgcatgacaagtgtaatcagtacttgctcatttatttgtctgtatttagtttatgctgtactatttaattatccttccagcgttttttttttctccttacaaatatgatactctttagtgttaagctaaggcattgattcatgtatctgtccttataatgaattaataaactattttccagaaatgtggaattctcttttggaa

SEQ ID NO: 24714 - protein, 1250 aa, Homo sapiens; identical to SEQ ID NO: 3295

SEQ ID NO: 24715 - DNA, 413 bp, Homo sapiens
gctggtttgattttttttttttaaagaagaaaaaaaaactgccctgaattaaatggctgttttaacagtaggcttctgggtaatttggaagtgttaggtttgtgtctttgtagcagtatttttattagaaaagaatctattggccttttacagggtattaatccctttgtcacctaccattgatgccttaagttttctgagtctcaattaaaaatcttccttttcttgatgcatgacaagtgtaatcagtacttgctcatttatttgtctgtatttagtttatgctgtactatttaattatccttccagcgttttttttttctccttacaaatatgatactctttagtgttaagctaaggcattgattcatgtatctgtccttataatgaattaataaactattttccagaaa

SEQ ID NO: 24716 - protein, 34 aa, Homo sapiens
MTSVISTCSFICLYLVYAVLFNYPSSVFFFSLQI

SEQ ID NO: 24717 - DNA, 3407 bp, Homo sapiens
acaacgcgtggctatgcgagcatggctctacctcctcttcggagccggctgcggacgctagggcctctctccctcctccacggaatggttggctgtcagggaagcacatgggcctccatatcccggcggaataggtcagcttggttctcacgaaggaaagggcctcccagcaggtgacccagggtagccagaacacccagctccctcctcatccctggagctggggagacctctgagacccagacatccccgtgtggggagaagaggccagtcggcttggctgtggccaagtgggactgggaccaggataagatctcctgggctcaaccaagcgggctgagctgggctggttcctgggcaggctgtgagctgccccaggcaggcccccggccggctctgacccgggccctgctgccccctgctggaactgggcagacgctgttgctgcaggctctggtgtacgacgccataaagggcaatgggaggaagaagtcacccccagcctgcaggaaccaggtggaggctgaagtcattgtccactctgactttagtgcatctaacgggaaccctgacctccatctccaagacctggagcctgaggaccccctgcctccagaggctcctgatctcatctcgggtgttggggatccagggcagggggcagcctggctggacagggagttgggagggtgtgagctggcagcccccgggccagacagacttacctgcttgccagaggcagccagtgcttcctgctcctacccggacctccagccaggcgaggtgctagaggagacccctggagatagctgccagctcaaatccccctgccctctaggagccagcccaggcctgcccagatccccggtctcctcctctgcctagctcttcccagaggatgtggtttggggcaggcaggtatggatcacataggatgcgatacctgtggccgtgtatgtccacatgtgtgcctgtagatacatcatcaagccctttggagcttcctaagttgctttggctgaggggagaggaaaacatggattattcactccccccatactctttgtgatacacatgtgacatgtgaaagacatacgagacatagctacatgtgatgtgcacatgtgtgaagtgcatgtatgcgtactggttgttgagctgggaaaccgtggcccaggcagtggtcactacagcctgattggtcctccaggtcagaacggtgccccacagtggtcagtccccagccctgtgggcccccacctccatcgcccagccttttattacacactctgagagtgtctccaatgcctgtctgacaaagacagtcccagcccattctcctgtctggctgggttgggtgcaagcaggctctgaatgcctggcatttcagctgcatcacctcccagctccttattgcccaaatagagagggtggccctggctcccctccgagcaactctgcatttaattttgtaatctgggaagtgcctggttttgaaaatccgctttctctcactcttcccctccttccttgcccctggctgctctagtgttctgtctcccagtcacctcgctctcccagcaccagtgcccttctcctgctcccagatactctttcctttcctctctcctgttttccttcctctgctatctctcacacctctcccagactatgtcatcttgttctcctgcctgggttcaaactctgcatccttctctaacaacgtgactacctcatgtctgcttcaaggcccccgtgcccttcctgtatccgcggctgccgcgcactcgcctgccatcctcctgcctcctcttcactcagtgcttctgcttgccctgccccaggcagcccacccacgcccagtgcgggtgtggagaagatcttctggcttccctgcatcttgcctttgggattgggatccaagggttctccatggatggatccaagtcatagaggggaatgtttgagacagggaagggggctgtgatccagaggctcagaataaaaagatgccctcccttctatgcaggggggcaagtttactggatggagatgatttgggcctctcttccagaagaagctaaaggaagagaaggggagtgagagttcagggaggcccttcccaccctgtgaggcttgacttgatctggattggggatgacaggaatctcaccctctggggtgctggcaaggaggtctttgcacaggaaaaggggtagctcatttcagtttgttttttctttaaattgaatcctcaagtcattttctgttcacctgccgcacagggacaagcttgacttctattttctgtgtagtgaaaacaatgtcatttatttggtttttcacctcagccctctcataggagcatagaatgttagggtctttactccctaatgatgtctgattggcacatcaagagttaactctgccttctgggccaaattcgaaataaccagtccatttttccttttttttttttttttttttaaatggtggaatgtctctcagcacagttgcggcttcctcaaaccctgaaagcatctgtgtttattatactcgggtgtcactcactgttgatgtctgcacctacgtttccacctcctccccctccttcagccagcctatgataacactaaagattattaatgttggttttgtatctcgttaaagacagaattgtcacttgtagtatttctgtagcattcagcgctgctgtggctaacaccactgtgtatgtttcatcattgctctgaaggtcaaaagcctcattttattttgctggtttgattttttttttttaaagaagaaaaaaaaactgccctgaattaaatggctgttttaacagtaggctcttagcattataccacatagtcatttttcatgttcttgtttaacaggcactgaggttctggtttaaattaaatagctgcaaatgagacaatttataacccattaggttgggtggaaaattgtttctcaaaagcaaataagtaataaatctggtatctgcctataactcacagttgataagaaagtggccatttctcactagcactatatatgatttgggctctgggtaatttggaagtgttaggtttgtgtctttgtagcagtatttttattagaaaagaatctattggccttttacagggtattaatccctttgtcacctaccattgatgccttaagttttctgagtctcaattaaaaatcttccttttcttgatgcatgacaagtgtaatcagtacttgctcatttatttgtctgtatttagtttatgctgtactatttaattatccttccagcgttttttttttctccttacaaatatgatactctttagtgttaagctaaggcattgattcatgtatctgtccttataatgaattaataaactattttccag

SEQ ID NO: 24718 - protein, 103 aa, Homo sapiens; identical to SEQ ID NO: 24710

SEQ ID NO: 24719 - DNA, 5544 bp, Homo sapiens
agcaatatttaggggaggctgaggaggcctggggacagttttgggagagaaagagaatggtcgttgtggggctggggtaaatggggagaagaaagggtaggtctgcgctgagccggagtagtttggaaagggtgaatcagggagaggttaaagtgattggaaggggagcgagggagggcggtggggggcaggcttggggtactggggggggggcagagaccttagttgcgggatcccgcgctcagcgtcgcccctcgcgcccctagcggctcccgccatcactcaggcgcccgaggcgctgtcgcggacgcgggcgagcacagcgcgcttcgtgtgccgcgcgtcgggggagccgcggccagcgctgcgctggctgcacaacggggcgccgctgcggcccaacgggcgcgtcaaggtccagggcggcggtggcagcctggtcatcacacagatcggcctgcaggacgccggctactaccagtgcgtggctgagaacagcgcgggaatggcgtgcgctgccgcgtcgctggccgtggtggtgcgcgaggggctgcccagcgcccccacgcgggtcactgctacgccactgagcagctccgctgtgttggtggcctgggagcggcccgagatgcacagcgagcagatcatcggcttctctctccactaccagaaggcacggggcatggacaatgtggaataccagtttgcagtgaacaacgacaccacagaactacaggttcgggacctggaacccaacacagattatgagttctacgtggtggcctactcccagctgggagccagccgcacctccaccccagcactggtgcacacactggatgatgtccccagtgcagcaccccagctctccctgtccagccccaacccttcggacatcagggtggcgtggctgcccctgccccccagcctgagcaatgggcaggtggtgaagtacaagatagaatacggtttgggaaaggaagatcagattttctctactgaggtgcgaggaaatgagacacagcttatgctgaactcgcttcagccaaacaaggtgtatcgagtacggatttcggctggtacagcagccggcttcggggccccctcccagtggatgcatcacaggacgcccagtatgcacaaccagagccatgtcccttttgcccctgcagagttgaaggtgcaggcaaagatggagtccctggtcgtgtcatggcagccaccccctcaccccacccagatctctggctacaaactatattggcgggaggtgggggctgaggaggaggccaatggcgatcgcctgccagggggccgtggagaccaggcttgggatgtggggcctgtccggctcaagaagaaagtgaagcagtatgagctgacccagctagtccctggccggctgtacgaggtgaagctcgtggctttcaacaaacatgaggatggctatgcagcagtgtggaagggcaagacggagaaggcgccggcaccagacatgcctatccagaggggaccacccctgcctccagcccacgtccatgcggaatcaaacagctccacatccatctggcttcggtggaaaaagccagatttcaccacagtcaagattgtcaactacactgtgcgcttcagcccctgggggctcaggaatgcctccctggtcacctattacaccagttctggagaagacatcctcattggcggcttgaagccattcaccaaatacgagtttgcagtgcagtctcacggcgtggacatggatgggcctttcggctctgtggtggagcgctccaccctgcctgaccggccctccacacccccatccgacctgcgactgagccccctgacaccgtccacggttcggctgcactggtgcccccccacagagcccaacggggagatcgtggagtatctgatcctgtacagcagcaaccacacgcagcctgagcaccagtggaccttgctcaccacgcagggaaacatcttcagtgctgaggtccatggcctggagagcgacactcggtacttcttcaagatgggggcgcgcacagaggtgggacctgggcctttctcccgcctgcaggatgtgatcacgctccaggagaagctgtcagactcgctggacatgcactcagtcacgggcatcatcgtgggtgtctgcctgggcctcctctgcctcctggcctgcatgtgtgctggcctgcgccgcagcccccacagggaatccctcccaggcctgtcctccaccgccacccccgggaatcccgcgctgtactccagagctcggcttggcccccccagccccccagctgcccatgaattggagtcccttgtgcacccccatccccaggactggtccccgccaccctcagacgtggaggacagggctgaagtgcacagccttatgggtggcggtgtttctgaaggccggagtcactccaaaagaaagatctcctgggctcaaccaagcgggctgagctgggctggttcctgggcaggctgtgagctgccccaggcaggcccccggccggctctgacccgggccctgctgccccctgctggaactgggcagacgctgttgctgcaggctctggtgtacgacgccataaagggcaatgggaggaagaagtcacccccagcctgcaggaaccaggtggaggctgaagtcattgtccactctgactttagtgcatctaacgggaaccctgacctccatctccaagacctggagcctgaggaccccctgcctccagaggctcctgatctcatctcgggtgttggggatccagggcagggggcagcctggctggacagggagttgggagggtgtgagctggcagcccccgggccagacagacttacctgcttgccagaggcagccagtgcttcctgctcctacccggacctccagccaggcgaggtgctagaggagacccctggagatagctgccagctcaaatccccctgccctctaggagccagcccaggcctgcccagatccccggtctcctcctctgcctagctcttcccagaggatgtggtttggggcaggcaggtatggatcacataggatgcgatacctgtggccgtgtatgtccacatgtgtgcctgtagatacatcatcaagccctttggagcttcctaagttgctttggctgaggggagaggaaaacatggattattcactccccccatactctttgtgatacacatgtgacatgtgaaagacatacgagacatagctacatgtgatgtgcacatgtgtgaagtgcatgtatgcgtactggttgttgagctgggaaaccgtggcccaggcagtggtcactacagcctgattggtcctccaggtcagaacggtgccccacagtggtcagtccccagccctgtgggcccccacctccatcgcccagccttttattacacactctgagagtgtctccaatgcctgtctgacaaagacagtcccagcccattctcctgtctggctgggttgggtgcaagcaggctctgaatgcctggcatttcagctgcatcacctcccagctccttattgcccaaatagagagggtggccctggctcccctccgagcaactctgcatttaattttgtaatctgggaagtgcctggttttgaaaatccgctttctctcactcttcccctccttccttgcccctggctgctctagtgttctgtctcccagtcacctcgctctcccagcaccagtgcccttctcctgctcccagatactctttcctttcctctctcctgttttccttcctctgctatctctcacacctctcccagactatgtcatcttgttctcctgcctgggttcaaactctgcatccttctctaacaacgtgactacctcatgtctgcttcaaggcccccgtgcccttcctgtatccgcggctgccgcgcactcgcctgccatcctcctgcctcctcttcactcagtgcttctgcttgccctgccccaggcagcccacccacgcccagtgcgggtgtggagaagatcttctggcttccctgcatcttgcctttgggattgggatccaagggttctccatggatggatccaagtcatagaggggaatgtttgagacagggaagggggctgtgatccagaggctcagaataaaaagatgccctcccttctatgcaggggggcaagtttactggatggagatgatttgggcctctcttccagaagaagctaaaggaagagaaggggagtgagagttcagggaggcccttcccaccctgtgaggcttgacttgatctggattggggatgacaggaatctcaccctctggggtgctggcaaggaggtctttgcacaggaaaaggggtagctcatttcagtttgttttttctttaaattgaatcctcaagtcattttctgttcacctgccgcacagggacaagcttgacttctattttctgtgtagtgaaaacaatgtcatttatttggtttttcacctcagccctctcataggagcatagaatgttagggtctttactccctaatgatgtctgattggcacatcaagagttaactctgccttctgggccaaattcgaaataaccagtccatttttccttttttttttttttttttttaaatggtggaatgtctctcagcacagttgcggcttcctcaaaccctgaaagcatctgtgtttattatactcgggtgtcactcactgttgatgtctgcacctacgtttccacctcctccccctccttcagccagcctatgataacactaaagattattaatgttggttttgtatctcgttaaagacagaattgtcacttgtagtatttctgtagcattcagcgctgctgtggctaacaccactgtgtatgtttcatcattgctctgaaggtcaaaagcctcattttattttgctggtttgattttttttttttaaagaagaaaaaaaaactgccctgaattaaatggctgttttaacagtaggctcttagcattataccacatagtcatttttcatgttcttgtttaacaggcactgaggttctggtttaaattaaatagctgcaaatgagacaatttataacccattaggttgggtggaaaattgtttctcaaaagcaaataagtaataaatctggtatctgcctataactcacagttgataagaaagtggccatttctcactagcactatatatgatttgggctctgggtaatttggaagtgttaggtttgtgtctttgtagcagtatttttattagaaaagaatctattggccttttacagggtattaatccctttgtcacctaccattgatgccttaagttttctgagtctcaattaaaaatcttccttttcttgatgcatgacaagtgtaatcagtacttgctcatttatttgtctgtatttagtttatgctgtactatttaattatccttccagcgttttttttttctccttacaaatatgatactctttagtgttaagctaaggcattgattcatgtatctgtccttataatgaattaataaactattttccag

SEQ ID NO: 24720 - protein, 838 aa, Homo sapiens; identical to SEQ ID NO: 24712

SEQ ID NO: 24721 - DNA, 6485 bp, Homo sapiens
ctcgcccaagatggcgatggaggggcgggtgaggcggcagcggccctggcccccgcgccggccccagctcgggcccgggcccccgaggccgcgcccccgcccgcggcgccgcgcctccccgggccactgacgcccggcgcgctctccccccgcggcggcggccgaagcacggggaggcggcggcggcggcggcggcccgagcccagccccatggcgcggggggacgccggccgcggccgcgggctcctcgcgttgaccttctgcctgttggccgcgcgcggggagctgctgttgccccaggagacgactgtggagctgagctgtggagtggggccactgcaagtgatcctgggcccagagcaggctgcagtgctaaactgtagcctgggggctgctgccgctggaccccccaccagggtgacctggagcaaggatggggacaccctgctggagcacgaccacttacacctgctgcccaatggttccctgtggctgtcccagccactagcacccaatggcagtgacgagtcagtccctgaggctgtgggggtcattgaaggcaactattcgtgcctagcccacggccccctcggagtgctggccagccagactgctgtcgtcaagcttgccacactcgcagacttctctctgcacccggagtctcagacggtggaggagaacgggacagctcgctttgagtgccacattgaagggctgccagctcccatcattacttgggagaaggaccaggtgacattgcctgaggagcctcggctcatcgtgcttcccaacggcgtccttcagatcctggatgttcaggagagtgatgcaggcccctaccgctgcgtggccaccaactcagctcgccagcacttcagccaggaggccctactcagtgtggcccacagagggtccctggcgtccaccagggggcaggacgtggtcattgtggcagccccagagaacaccacagtggtgtctggccagagtgtggtgatggaatgtgtggcctcagctgaccccaccccttttgtgtcctgggtccgacaagacgggaagcccatctccacagatgtcatcgtcctgggccgcaccaacctactaattgccaacgcgcagccctggcactccggcgtctatgtctgccgcgccaacaagccccgcacgcgcgacttcgccactgcagccgctgagctccgtgtgctggcggctcccgccatcactcaggcgcccgaggcgctgtcgcggacgcgggcgagcacagcgcgcttcgtgtgccgcgcgtcgggggagccgcggccagcgctgcgctggctgcacaacggggcgccgctgcggcccaacgggcgcgtcaaggtccagggcggcggtggcagcctggtcatcacacagatcggcctgcaggacgccggctactaccagtgcgtggctgagaacagcgcgggaatggcgtgcgctgccgcgtcgctggccgtggtggtgcgcgaggggctgcccagcgcccccacgcgggtcactgctacgccactgagcagctccgctgtgttggtggcctgggagcggcccgagatgcacagcgagcagatcatcggcttctctctccactaccagaaggcacggggcatggacaatgtggaataccagtttgcagtgaacaacgacaccacagaactacaggttcgggacctggaacccaacacagattatgagttctacgtggtggcctactcccagctgggagccagccgcacctccaccccagcactggtgcacacactggatgatgtccccagtgcagcaccccagctctccctgtccagccccaacccttcggacatcagggtggcgtggctgcccctgccccccagcctgagcaatgggcaggtggtgaagtacaagatagaatacggtttgggaaaggaagatcagattttctctactgaggtgcgaggaaatgagacacagcttatgctgaactcgcttcagccaaacaaggtgtatcgagtacggatttcggctggtacagcagccggcttcggggccccctcccagtggatgcatcacaggacgcccagtatgcacaaccagagccatgtcccttttgcccctgcagagttgaaggtgcaggcaaagatggagtccctggtcgtgtcatggcagccaccccctcaccccacccagatctctggctacaaactatattggcgggaggtgggggctgaggaggaggccaatggcgatcgcctgccagggggccgtggagaccaggcttgggatgtggggcctgtccggctcaagaagaaagtgaagcagtatgagctgacccagctagtccctggccggctgtacgaggtgaagctcgtggctttcaacaaacatgaggatggctatgcagcagtgtggaagggcaagacggagaaggcgccggcaccagacatgcctatccagaggggaccacccctgcctccagcccacgtccatgcggaatcaaacagctccacatccatctggcttcggtggaaaaagccagatttcaccacagtcaagattgtcaactacactgtgcgcttcagcccctgggggctcaggaatgcctccctggtcacctattacaccagttctggagaagacatcctcattggcggcttgaagccattcaccaaatacgagtttgcagtgcagtctcacggcgtggacatggatgggcctttcggctctgtggtggagcgctccaccctgcctgaccggccctccacacccccatccgacctgcgactgagccccctgacaccgtccacggttcggctgcactggtgcccccccacagagcccaacggggagatcgtggagtatctgatcctgtacagcagcaaccacacgcagcctgagcaccagtggaccttgctcaccacgcagggaaacatcttcagtgctgaggtccatggcctggagagcgacactcggtacttcttcaagatgggggcgcgcacagaggtgggacctgggcctttctcccgcctgcaggatgtgatcacgctccaggagaagctgtcagactcgctggacatgcactcagtcacgggcatcatcgtgggtgtctgcctgggcctcctctgcctcctggcctgcatgtgtgctggcctgcgccgcagcccccacagggaatccctcccaggcctgtcctccaccgccacccccgggaatcccgcgctgtactccagagctcggcttggcccccccagccccccagctgcccatgaattggagtcccttgtgcacccccatccccaggactggtccccgccaccctcagacgtggaggacagggctgaagtgcacagccttatgggtggcggtgtttctgaaggccggagtcactccaaaagaaagatctcctgggctcaaccaagcgggctgagctgggctggttcctgggcaggctgtgagctgccccaggcaggcccccggccggctctgacccgggccctgctgccccctgctggaactgggcagacgctgttgctgcaggctctggtgtacgacgccataaagggcaatgggaggaagaagtcacccccagcctgcaggaaccaggtggaggctgaagtcattgtccactctgactttagtgcatctaacgggaaccctgacctccatctccaagacctggagcctgaggaccccctgcctccagaggctcctgatctcatctcgggtgttggggatccagggcagggggcagcctggctggacagggagttgggagggtgtgagctggcagcccccgggccagacagacttacctgcttgccagaggcagccagtgcttcctgctcctacccggacctccagccaggcgaggtgctagaggagacccctggagatagctgccagctcaaatccccctgccctctaggagccagcccaggcctgcccagatccccggtctcctcctctgcctagctcttcccagaggatgtggtttggggcaggcaggtatggatcacataggatgcgatacctgtggccgtgtatgtccacatgtgtgcctgtagatacatcatcaagccctttggagcttcctaagttgctttggctgaggggagaggaaaacatggattattcactccccccatactctttgtgatacacatgtgacatgtgaaagacatacgagacatagctacatgtgatgtgcacatgtgtgaagtgcatgtatgcgtactggttgttgagctgggaaaccgtggcccaggcagtggtcactacagcctgattggtcctccaggtcagaacggtgccccacagtggtcagtccccagccctgtgggcccccacctccatcgcccagccttttattacacactctgagagtgtctccaatgcctgtctgacaaagacagtcccagcccattctcctgtctggctgggttgggtgcaagcaggctctgaatgcctggcatttcagctgcatcacctcccagctccttattgcccaaatagagagggtggccctggctcccctccgagcaactctgcatttaattttgtaatctgggaagtgcctggttttgaaaatccgctttctctcactcttcccctccttccttgcccctggctgctctagtgttctgtctcccagtcacctcgctctcccagcaccagtgcccttctcctgctcccagatactctttcctttcctctctcctgttttccttcctctgctatctctcacacctctcccagactatgtcatcttgttctcctgcctgggttcaaactctgcatccttctctaacaacgtgactacctcatgtctgcttcaaggcccccgtgcccttcctgtatccgcggctgccgcgcactcgcctgccatcctcctgcctcctcttcactcagtgcttctgcttgccctgccccaggcagcccacccacgcccagtgcgggtgtggagaagatcttctggcttccctgcatcttgcctttgggattgggatccaagggttctccatggatggatccaagtcatagaggggaatgtttgagacagggaagggggctgtgatccagaggctcagaataaaaagatgccctcccttctatgcaggggggcaagtttactggatggagatgatttgggcctctcttccagaagaagctaaaggaagagaaggggagtgagagttcagggaggcccttcccaccctgtgaggcttgacttgatctggattggggatgacaggaatctcaccctctggggtgctggcaaggaggtctttgcacaggaaaaggggtagctcatttcagtttgttttttctttaaattgaatcctcaagtcattttctgttcacctgccgcacagggacaagcttgacttctattttctgtgtagtgaaaacaatgtcatttatttggtttttcacctcagccctctcataggagcatagaatgttagggtctttactccctaatgatgtctgattggcacatcaagagttaactctgccttctgggccaaattcgaaataaccagtccatttttccttttttttttttttttttttaaatggtggaatgtctctcagcacagttgcggcttcctcaaaccctgaaagcatctgtgtttattatactcgggtgtcactcactgttgatgtctgcacctacgtttccacctcctccccctccttcagccagcctatgataacactaaagattattaatgttggttttgtatctcgttaaagacagaattgtcacttgtagtatttctgtagcattcagcgctgctgtggctaacaccactgtgtatgtttcatcattgctctgaaggtcaaaagcctcattttattttgctggtttgattttttttttttaaagaagaaaaaaaaactgccctgaattaaatggctgttttaacagtaggctcttagcattataccacatagtcatttttcatgttcttgtttaacaggcactgaggttctggtttaaattaaatagctgcaaatgagacaatttataacccattaggttgggtggaaaattgtttctcaaaagcaaataagtaataaatctggtatctgcctataactcacagttgataagaaagtggccatttctcactagcactatatatgatttgggctctgggtaatttggaagtgttaggtttgtgtctttgtagcagtatttttattagaaaagaatctattggccttttacagggtattaatccctttgtcacctaccattgatgccttaagttttctgagtctcaattaaaaatcttccttttcttgatgcatgacaagtgtaatcagtacttgctcatttatttgtctgtatttagtttatgctgtactatttaattatccttccagcgttttttttttctccttacaaatatgatactctttagtgttaagctaaggcattgattcatgtatctgtccttataatgaattaataaactattttccag

SEQ ID NO: 24722 - protein, 1250 aa, Homo sapiens; identical to SEQ ID NO: 3295

SEQ ID NO: 24723 - DNA, 2384 bp, Homo sapiens
agcctccattagtaaggttggtgactattggtaagaggtggacttcattgacaccaagtgggaggtagggaaagcccagaaatggcaggatgatatggtggttctgtcgttgggaaaggtattgggttttgctgtttgtatttatactgtataatagataccacgctttttcttattatctgtatatgtattgcttttcatgtttgatattttcccatgccaagatttgtttatatatattttcaatgttaaattaaattgatttgggtaactttcttccccaagaaagtattttcccccttaagtatatatctgactgtggagggtgttttgttttgttttgttttgttttgtttggactaactggcctcgaaggatctatccttataatatatgcaaagtagaaatggtatacagtagcttttaagcagctactccattgaaacctctcacccattaaggctgtttcttcaaagtggcatctcttattttaccgaaacaaacttagaaaacttcatgtactctggagttcacaggtgttttccttttgcatgttgccttctcctttcctcctatcacaaagaatgcttctattatcactcccagtcacttaaatgccattctgcttctttagcaggaaaaaatacctgaatgaattctcttacagaaagacagtttgactgaatttgctttttacaatcagtgtggaaaatatcatagtcaattgaggcaatcagtagaaatctcataaaagtacaaaaaaattagctgggcatgatggcgtgtgcctataatcccacctactcgggaggctgaggcaggagaatcgcttgaacctgggaggcggaagttgcagtgagccgagatggcgccactgtagtccagtctgggcgacagagtgagattctgcctcaaaataaataaataaataaaaatttgtattccattgatttgggtagacaccaggaatgtgcatttctaacaagctttccaggcgatcctatagtaagtcatctgtggactactttaagaaactcttctatagagaatggagttggattaataataggtgattttttacactggactgattcacaagaacctaaacagtagtccatgaagctgctcatctgtggtaactatttggccccgtctcactctgaaagcagcaggagatgttgtttactttgtttctatcccctttgtctggagattaattttggaatgaaagtttttctctctatgccattcctggttcttttccaaagcctcatacaagaggattaggtcacaatgcatgcattaccttttaaaagaatgcgatattgataccgatgcttacttttttttttttactacttgttttattcctt[450 bp omitted]cttccttggtatagtggaggatttgaggattggaatatagagtagagtgcttgcttaagcctgggagcccatctttatagctatttgatgtaagaaaagagacatggccatttctaaactatataaggtgagtgtgtctattcccagcagatataaaggaaaaaggaaacttttttgattcccaccttcccagcctcacctagccatcttccagcctcaaatatagagatgttagtgcaaggtcctgggctctaggtgatcatttcataagtcctttacagataaagaaaaagtagtgtttgtatgtttgtttttaagtaaccccaaaacaaatttatattgtattcagcaaaattggaattcaggtgtttaattttagaacatgaagtgcctgctgttttaagcattgacttgtataaaaagaattgcatgtctccagtaagcttatgggttttctcatttttaggtatatggcttttaatcatgtaaagtgaaacattagttttcttgcattttattacaggttctttgttgcaataaagatgctgctgaaattaattg

SEQ ID NO: 24724 - protein, 56 aa, Homo sapiens
MKLLICGNYLAPSHSESSRRCCLLCFYPLCLEINFGMKVFLSMPFLVLFQSLIQED

SEQ ID NO: 24725 - DNA, 8192 bp, Homo sapiens
agattccgagtcaaccaccgttcactgggcgccccttgagctctgggcgctggcctcctggcttccacgtccgttatcttaattgagtctcgctggggttgggaggccgggtattgtcagcgcttacagatgaggaaacggaagcccacagaggcgaagggattttccttaagtccgacttggcagatgggcttcggcctcagattttctggtttttcagctggtggtcttttttctctcctgcctcatgctaggtcgattccctccctgctcactgccctctcccattctgttccacccactcgcagcaggacactttcctttcctgccacacctgtcttctcacacacttttcttctaagacttggcattcctcccatctctcttctcaatattctctgctatgcctctcctcttgttcctcattcatagtttttcaaggtctttgccccctctgtgctattgaatctctcaactaggtgtggaccctaaagaatgagatagctaggcttcagtgaggctttaggtgtttaagtggacggctgtttggcccttgagttaaaaattaaggaatttcacttgagtggatccaaactcaagagtcctaaagctattttctgagtcaacatgctctatttctgagtgaggggcttagtgctatgaggtgtcttgacatcttagtccattgttgctgtgctggcataacctcgctgtttttcctgcacttgccacttagcttttcccaccccatcccttcatcacctacttgggctatgggagcccaaaattaaaacttatagagtaacagatgtaatagcagaccttcctttttttttttttcctaagccagaatttcaacaagtttaatgcttctttttccagaaaagttacctatttaaattattctcagagtaatgcagcaagaaaatggaatgcacttaagatgaatagaaaattgtttatctcgtgaaaagtcttaagttattaaattcaagttaattccctttctgcaaaaatggcctgtaactcttactggctatcctcctgagttaattctatctccatccagcttgatatgacattattatgtaaaagaggaacaggaataggcacataaaaataaattttattaatcatatgccgtttttgatgatttgcaatagtcactgagtaacttcacatctgtatgccttttgtaactttttaaagcctttccatggttttcctttgtctggacaccaaagtttgctatgttaggatattcttttgactatattgggctacacatctctgaaataaaataattcttgaattctgataacataaaacgcagatacaaaataatgtaggcattatatattgccccaaaaagtgatattttggtatcagttttaactactattttggggcttctctttttggccacatatggtccatcttaatgatcaaagtcttatcttatttcattatcctggtgagcaggctttgatggtgaggaaaggaaagattcctgtgagaagagcaggatgagcagagggattctatgcttgaagtcgagtcacttgaaaaagatctctttgaatgtggaagagatctgagcagatgaaaataaaatcaggaaaatgcaacatggcagcagcaatggaaacagaacagctgggtgttgagatatttgaaactgcggactgtgaggagaatattgaatcacaggatcggcctaaattggagcctttttatgttgagcggtattcctggagtcagcttaaaaagctgcttgccgataccagaaaatatcatggctacatgatggctaaggcaccacatgatttcatgtttgtgaagaggaatgatccagatggacctcattcagacagaatctattaccttgccatgtctggtgagaacagagaaaatacactgttttattctgaaattcccaaaactatcaatagagcagcagtcttaatgctctcttggaagcctcttttggatctttttcaggcaacactggactatggaatgtattctcgagaagaagaactattaagagaaagaaaacgcattggaacagtcggaattgcttcttacgattatcaccaaggaagtggaacatttctgtttcaagccggtagtggaatttatcacgtaaaagatggagggccacaaggatttacgcaacaacctttaaggcccaatctagtggaaactagttgtcccaacatacggatggatccaaaattatgccctgctgatccagactggattgcttttatacatagcaacgatatttggatatctaacatcgtaaccagagaagaaaggagactcacttatgtgcacaatgagctagccaacatggaagaagatgccagatcagctggagtcgctacctttgttctccaagaagaatttgatagatattctggctattggtggtgtccaaaagctgaaacaactcccagtggtggtaaaattcttagaattctatatgaagaaaatgatgaatctgaggtggaaattattcatgttacatcccctatgttggaaacaaggagggcagattcattccgttatcctaaaacaggtacagcaaatcctaaagtcacttttaagatgtcagaaataatgattgatgctgaaggaaggatcatagatgtcatagataaggaactaattcaaccttttgagattctatttgaaggagttgaatatattgccagagctggatggactcctgagggaaaatatgcttggtccatcctactagatcgctcccagactcgcctacagatagtgttgatctcacctgaattatttatcccagtagaagatgatgttatggaaaggcagagactcattgagtcagtgcctgattctgtgacgccactaattatctatgaagaaacaacagacatctggataaatatccatgacatctttcatgtttttccccaaagtcacgaagaggaaattgagtttatttttgcctctgaatgcaaaacaggtttccgtcatttatacaaaattacatctattttaaaggaaagcaaatataaacgatccagtggtgggctgcctgctccaagtgatttcaagtgtcctatcaaagaggagatagcaattaccagtggtgaatgggaagttcttggccggcatggatctaatatccaagttgatgaagtcagaaggctggtatattttgaaggcaccaaagactcccctttagagcatcacctgtacgtagtcagttacgtaaatcctggagaggtgacaaggctgactgaccgtggctactcacattcttgctgcatcagtcagcactgtgacttctttataagtaagtatagtaaccagaagaatccacactgtgtgtccctttacaagctatcaagtcctgaagatgacccaacttgcaaaacaaaggaattttgggccaccattttggattcagcaggtcctcttcctgactatactcctccagaaattttctcttttgaaagtactactggatttacattgtatgggatgctctacaagcctcatgatctacagcctggaaagaaatatcctactgtgctgttcatatatggtggtcctcaggtgcagttggtgaataatcggtttaaaggagtcaagtatttccgcttgaataccctagcctctctaggttatgtggttgtagtgatagacaacaggggatcctgtcaccgagggcttaaatttgaaggcgcctttaaatataaaatgggtcaaatagaaattgacgatcaggtggaaggactccaatatctagcttctcgatatgatttcattgacttagatcgtgtgggcatccacggctggtcctatggaggatacctctccctgatggcattaatgcagaggtcagatatcttcagggttgctattgctggggccccagtcactctgtggatcttctatgatacaggatacacggaacgttatatgggtcaccctgaccagaatgaacagggctattacttaggatctgtggccatgcaagcagaaaagttcccctctgaaccaaatcgtttactgctcttacatggtttcctggatgagaatgtccattttgcacataccagtatattactgagttttttagtgagggctggaaagccatatgatttacagatctatcctcaggagagacacagcataagagttcctgaatcgggagaacattatgaactgcatcttttgcactaccttcaagaaaaccttggatcacgtattgctgctctaaaagtgatataattttgacctgtgtagaactctctggtatacactggctatttaaccaaatgaggaggtttaatcaacagaaaacacagaattgatcatcacattttgatacctgccatgtaacatctactcctgaaaataaatgtggtgccatgcaggggtctacggtttgtggtagtaatctaataccttaaccccacatgctcaaaatcaaatgatacatattcctgagagacccagcaataccataagaattactaaaaaaaaaaaaaaaaaaaagacattagcaccatgtattcatactaccctattttcacttttaatagtattataaacttcatgaacttaattagtgtatttttacagtatacttttgagtttgttaaaatatgatgatattagtgattggtttggttcagttccagaatctttgactagttacagatttgatagcacttaaatgtaattgaatagcttatgcttcattgcttgggcatatccagcatgttatgaactaataactattaaacttgacttaaccagtcattcattaataatttttcaaggataacttagtggcctcctaaagacacttgttttggcactgaccagtttttagccaatttaatctgtatctagtataaataattctcatttttctttgatgatattaacagagtgggcttttccttttgcataaaggctagtaactgtatatgtagcatggatttaattagtcatgatattgataattacaggcagaaaatttttaatcaaatgattagagcttaaatatttgcaggcaagtttttttttttcctttaagaaaaggaaaaagtacacattcactagaattcttcagaaaatttagtggtgccagtttccatttggtatttccttattaaaatattctagaattttaaggagattgaagggaatcacagtggggtggggagacctgggtttggggaatgacagagagaagaggtggtgagggcctgattaaaaactaagcagaagtagttttaacaaaaatactcatgaaaatgtttggaaactgaaatttaaacaactgtaatattaaggaaaccagaatcaataaatcactgtcttgccagcacagctacagagtaacatgattcaggggaggaaaagttccttagagttacttttataattctttttttttttcctcttaggtttagaaatcttacaaatttaaactttatccttttaaaattatttgaacataatttagatattgtaagcttaaaatacaaatgtttatagataacctctttaccataaactaatccctggcaagccatggctctctttttttttttggtgtttaaagcctgtaaacagtttttctgaatgatcatgaacttttcttggtttagcactaggatttagctatgaagagagctcataggctttcaggtgctaattgagatctgccctgttagagtcttggggtgctagattggtcacattgacaccagtggcagggaaggcatctatgagtttgatgctttttatcacacacttcagtgtttagaaagttattaccaatacttttaaacaacactccaagaaaatttgctatatttctttctcatcactacagagagagtagatttccccatagagagcacagcctccattagtaaggttggtgactattggtaagaggtggacttcattgacaccaagtgggaggtagggaaagcccagaaatggcaggatgatatggtggttctgtcgttgggaaaggtattgggttttgctgtttgtatttatactgtataatagataccacgctttttcttattatctgtatatgtattgcttttcatgtttgatattttcccatgccaagatttgtttatatatattttcaatgttaaattaaattgatttgggtaactttcttccccaagaaagtattttcccccttaagtatatatctgactgtggagggtgttttgttttgttttgttttgttttgtttggactaactggcctcgaaggatctatccttataatatatgcaaagtagaaatggtatacagtagcttttaagcagctactccattgaaacctctcacccattaaggctgtttcttcaaagtggcatctcttattttaccgaaacaaacttagaaaacttcatgtactctggagttcacaggtgttttccttttgcatgttgccttctcctttcctcctatcacaaagaatgcttctattatcactcccagtcacttaaatgccattctgcttctttagcaggaaaaaatacctgaatgaattctcttacagaaagacagtttgactgaatttgctttttacaatcagtgtggaaaatatcatagtcaattgaggcaatcagtagaaatctcactaaaagtttgtaccccctgagtatgggtaacagcttaaacggcaagaatatataaaagtagcaacagtttagtgggagccaaaaagcactaggttaaatatcatactacgtttttaaagacttgataaatgtgtacacttgaacaaccatccagagggatagttacttgagcattacagagtagtggaactcaaaatctaagattcatctgggatacttctaaaagaaatgtagagttttgaatctcactcttaaaaatgtgtattcccaggctaggcatggtggctcacgcctgtaatcctagcactttgggaggccaaggcgggtgaatcacttgaagtcaggagatcaagaccagcttggtcgacatggtgaaaccccgtctctactaaaagtacaaaaaaattagctgggcatgatggcgtgtgcctataatcccacctactcgggaggctgaggcaggagaatcgcttgaacctgggaggcggaagttgcagtgagccgagatggcgccactgtagtccagtctgggcgacagagtgagattctgcctcaaaataaataaataaataaaaatttgtattccattgatttgggtagacaccaggaatgtgcatttctaacaagctttccaggcgatcctatagtaagtcatctgtggactactttaagaaactcttctatagagaatggagttggattaataataggtgattttttacactggactgattcacaagaacctaaacagtagtccatgaagctgctcatctgtggtaactatttggccccgtctcactctgaaagcagcaggagatgttgtttactttgtttctatcccctttgtctggagattaattttggaatgaaagtttttctctctatgccattcctggttcttttccaaagcctcatacaagaggattaggtcacaatgcatgcattaccttttaaaagaatgcgatattgataccgatgcttacttttttttttttactacttgttttattcctt[450 bp omitted]cttccttggtatagtggaggatttgaggattggaatatagagtagagtgcttgct

SEQ ID NO: 24726 - protein, 898 aa, Homo sapiens; identical to SEQ ID NO: 3301

SEQ ID NO: 24727 - DNA, 7282 bp, Homo sapiens
ggatcgcaacgaaccggaagtgctaaagcctccgaggccaaggccgctgctactgccgccgctgcttcttagtgccgcgttcgccgcctgggttgtcaccggcgccgccgccgaggaagccactgcaaccaggaccggagtggaggcggcgcagcatgaagcggcgcaggcccgctccatagcgcacgtcgggacggtccgggcggggccggggggaaggctttgatggtgaggaaaggaaagattcctgtgagaagagcaggatgagcagagggattctatgcttgaagtcgagtcacttgaaaaagatctctttgaatgtggaagagatctgagcagatgaaaataaaatcaggaaaatgcaacatggcagcagcaatggaaacagaacagctgggtgttgagatatttgaaactgcggactgtgaggagaatattgaatcacaggatcggcctaaattggagcctttttatgttgagcggtattcctggagtcagcttaaaaagctgcttgccgataccagaaaatatcatggctacatgatggctaaggcaccacatgatttcatgtttgtgaagaggaatgatccagatggacctcattcagacagaatctattaccttgccatgtctggtgagaacagagaaaatacactgttttattctgaaattcccaaaactatcaatagagcagcagtcttaatgctctcttggaagcctcttttggatctttttcaggcaacactggactatggaatgtattctcgagaagaagaactattaagagaaagaaaacgcattggaacagtcggaattgcttcttacgattatcaccaaggaagtggaacatttctgtttcaagccggtagtggaatttatcacgtaaaagatggagggccacaaggatttacgcaacaacctttaaggcccaatctagtggaaactagttgtcccaacatacggatggatccaaaattatgccctgctgatccagactggattgcttttatacatagcaacgatatttggatatctaacatcgtaaccagagaagaaaggagactcacttatgtgcacaatgagctagccaacatggaagaagatgccagatcagctggagtcgctacctttgttctccaagaagaatttgatagatattctggctattggtggtgtccaaaagctgaaacaactcccagtggtggtaaaattcttagaattctatatgaagaaaatgatgaatctgaggtggaaattattcatgttacatcccctatgttggaaacaaggagggcagattcattccgttatcctaaaacaggtacagcaaatcctaaagtcacttttaagatgtcagaaataatgattgatgctgaaggaaggatcatagatgtcatagataaggaactaattcaaccttttgagattctatttgaaggagttgaatatattgccagagctggatggactcctgagggaaaatatgcttggtccatcctactagatcgctcccagactcgcctacagatagtgttgatctcacctgaattatttatcccagtagaagatgatgttatggaaaggcagagactcattgagtcagtgcctgattctgtgacgccactaattatctatgaagaaacaacagacatctggataaatatccatgacatctttcatgtttttccccaaagtcacgaagaggaaattgagtttatttttgcctctgaatgcaaaacaggtttccgtcatttatacaaaattacatctattttaaaggaaagcaaatataaacgatccagtggtgggctgcctgctccaagtgatttcaagtgtcctatcaaagaggagatagcaattaccagtggtgaatgggaagttcttggccggcatggatctaatatccaagttgatgaagtcagaaggctggtatattttgaaggcaccaaagactcccctttagagcatcacctgtacgtagtcagttacgtaaatcctggagaggtgacaaggctgactgaccgtggctactcacattcttgctgcatcagtcagcactgtgacttctttataagtaagtatagtaaccagaagaatccacactgtgtgtccctttacaagctatcaagtcctgaagatgacccaacttgcaaaacaaaggaattttgggccaccattttggattcagcaggtcctcttcctgactatactcctccagaaattttctcttttgaaagtactactggatttacattgtatgggatgctctacaagcctcatgatctacagcctggaaagaaatatcctactgtgctgttcatatatggtggtcctcaggtgcagttggtgaataatcggtttaaaggagtcaagtatttccgcttgaataccctagcctctctaggttatgtggttgtagtgatagacaacaggggatcctgtcaccgagggcttaaatttgaaggcgcctttaaatataaaatggttgctattgctggggccccagtcactctgtggatcttctatgatacaggatacacggaacgttatatgggtcaccctgaccagaatgaacagggctattacttaggatctgtggccatgcaagcagaaaagttcccctctgaaccaaatcgtttactgctcttacatggtttcctggatgagaatgtccattttgcacataccagtatattactgagttttttagtgagggctggaaagccatatgatttacagatctatcctcaggagagacacagcataagagttcctgaatcgggagaacattatgaactgcatcttttgcactaccttcaagaaaaccttggatcacgtattgctgctctaaaagtgatataattttgacctgtgtagaactctctggtatacactggctatttaaccaaatgaggaggtttaatcaacagaaaacacagaattgatcatcacattttgatacctgccatgtaacatctactcctgaaaataaatgtggtgccatgcaggggtctacggtttgtggtagtaatctaataccttaaccccacatgctcaaaatcaaatgatacatattcctgagagacccagcaataccataagaattactaaaaaaaaaaaaaaaaaaaagacattagcaccatgtattcatactaccctattttcacttttaatagtattataaacttcatgaacttaattagtgtatttttacagtatacttttgagtttgttaaaatatgatgatattagtgattggtttggttcagttccagaatctttgactagttacagatttgatagcacttaaatgtaattgaatagcttatgcttcattgcttgggcatatccagcatgttatgaactaataactattaaacttgacttaaccagtcattcattaataatttttcaaggataacttagtggcctcctaaagacacttgttttggcactgaccagtttttagccaatttaatctgtatctagtataaataattctcatttttctttgatgatattaacagagtgggcttttccttttgcataaaggctagtaactgtatatgtagcatggatttaattagtcatgatattgataattacaggcagaaaatttttaatcaaatgattagagcttaaatatttgcaggcaagtttttttttttcctttaagaaaaggaaaaagtacacattcactagaattcttcagaaaatttagtggtgccagtttccatttggtatttccttattaaaatattctagaattttaaggagattgaagggaatcacagtggggtggggagacctgggtttggggaatgacagagagaagaggtggtgagggcctgattaaaaactaagcagaagtagttttaacaaaaatactcatgaaaatgtttggaaactgaaatttaaacaactgtaatattaaggaaaccagaatcaataaatcactgtcttgccagcacagctacagagtaacatgattcaggggaggaaaagttccttagagttacttttataattctttttttttttcctcttaggtttagaaatcttacaaatttaaactttatccttttaaaattatttgaacataatttagatattgtaagcttaaaatacaaatgtttatagataacctctttaccataaactaatccctggcaagccatggctctctttttttttttggtgtttaaagcctgtaaacagtttttctgaatgatcatgaacttttcttggtttagcactaggatttagctatgaagagagctcataggctttcaggtgctaattgagatctgccctgttagagtcttggggtgctagattggtcacattgacaccagtggcagggaaggcatctatgagtttgatgctttttatcacacacttcagtgtttagaaagttattaccaatacttttaaacaacactccaagaaaatttgctatatttctttctcatcactacagagagagtagatttccccatagagagcacagcctccattagtaaggttggtgactattggtaagaggtggacttcattgacaccaagtgggaggtagggaaagcccagaaatggcaggatgatatggtggttctgtcgttgggaaaggtattgggttttgctgtttgtatttatactgtataatagataccacgctttttcttattatctgtatatgtattgcttttcatgtttgatattttcccatgccaagatttgtttatatatattttcaatgttaaattaaattgatttgggtaactttcttccccaagaaagtattttcccccttaagtatatatctgactgtggagggtgttttgttttgttttgttttgttttgtttggactaactggcctcgaaggatctatccttataatatatgcaaagtagaaatggtatacagtagcttttaagcagctactccattgaaacctctcacccattaaggctgtttcttcaaagtggcatctcttattttaccgaaacaaacttagaaaacttcatgtactctggagttcacaggtgttttccttttgcatgttgccttctcctttcctcctatcacaaagaatgcttctattatcactcccagtcacttaaatgccattctgcttctttagcaggaaaaaatacctgaatgaattctcttacagaaagacagtttgactgaatttgctttttacaatcagtgtggaaaatatcatagtcaattgaggcaatcagtagaaatctcactaaaagtttgtaccccctgagtatgggtaacagcttaaacggcaagaatatataaaagtagcaacagtttagtgggagccaaaaagcactaggttaaatatcatactacgtttttaaagacttgataaatgtgtacacttgaacaaccatccagagggatagttacttgagcattacagagtagtggaactcaaaatctaagattcatctgggatacttctaaaagaaatgtagagttttgaatctcactcttaaaaatgtgtattcccaggctaggcatggtggctcacgcctgtaatcctagcactttgggaggccaaggcgggtgaatcacttgaagtcaggagatcaagaccagcttggtcgacatggtgaaaccccgtctctactaaaagtacaaaaaaattagctgggcatgatggcgtgtgcctataatcccacctactcgggaggctgaggcaggagaatcgcttgaacctgggaggcggaagttgcagtgagccgagatggcgccactgtagtccagtctgggcgacagagtgagattctgcctcaaaataaataaataaataaaaatttgtattccattgatttgggtagacaccaggaatgtgcatttctaacaagctttccaggcgatcctatagtaagtcatctgtggactactttaagaaactcttctatagagaatggagttggattaataataggtgattttttacactggactgattcacaagaacctaaacagtagtccatgaagctgctcatctgtggtaactatttggccccgtctcactctgaaagcagcaggagatgttgtttactttgtttctatcccctttgtctggagattaattttggaatgaaagtttttctctctatgccattcctggttcttttccaaagcctcatacaagaggattaggtcacaatgcatgcattaccttttaaaagaatgcgatattgataccgatgcttacttttttttttttactacttgttttattcctt[450 bp omitted]cttccttggtatagtggaggatttgaggattggaatatagagtagagtgcttgcttaagcctgggagcccatctttatagctatttgatgtaagaaaagagacatggccatttctaaactatataaggtgagtgtgtctattcccagcagatataaaggaaaaaggaaacttttttgattcccaccttcccagcctcacctagccatcttccagcctcaaatatagagatgttagtgcaaggtcctgggctctaggtgatcatttcataagtcctttacagataaagaaaaagtagtgtttgtatgtttgtttttaagtaaccccaaaacaaatttatattgtattcagcaaaattggaattcaggtgtttaattttagaacatgaagtgcctgctgttttaagcattgacttgtataaaaagaattgcatgtctccagtaagcttatgggttttctcatttttaggtatatggcttttaatcatgtaaagtgaaacattagttttcttgcattttattacaggttctttgttgcaataaagatgctgctgaaattaattg

SEQ ID NO: 24728 - protein, 847 aa, Homo sapiens; identical to SEQ ID NO: 3303

SEQ ID NO: 24729 - DNA, 7302 bp, Homo sapiens
agcggatcgcaacgaaccggaagtgctaaagcctccgaggccaaggccgctgctactgccgccgctgcttcttagtgccgcgttcgccgcctgggttgtcaccggcgccgccgccgaggaagccactgcaaccaggaccggagtggaggcggcgcagcatgaagcggcgcaggcccgctccatagcgcacgtcgggacggtccgggcggggccggggggaaggaaaatgcaacatggcagcagcaatggaaacagaacagctgggtgttgagatatttgaaactgcggactgtgaggagaatattgaatcacaggatcggcctaaattggagcctttttatgttgagcggtattcctggagtcagcttaaaaagctgcttgccgataccagaaaatatcatggctacatgatggctaaggcaccacatgatttcatgtttgtgaagaggaatgatccagatggacctcattcagacagaatctattaccttgccatgtctggtgagaacagagaaaatacactgttttattctgaaattcccaaaactatcaatagagcagcagtcttaatgctctcttggaagcctcttttggatctttttcaggcaacactggactatggaatgtattctcgagaagaagaactattaagagaaagaaaacgcattggaacagtcggaattgcttcttacgattatcaccaaggaagtggaacatttctgtttcaagccggtagtggaatttatcacgtaaaagatggagggccacaaggatttacgcaacaacctttaaggcccaatctagtggaaactagttgtcccaacatacggatggatccaaaattatgccctgctgatccagactggattgcttttatacatagcaacgatatttggatatctaacatcgtaaccagagaagaaaggagactcacttatgtgcacaatgagctagccaacatggaagaagatgccagatcagctggagtcgctacctttgttctccaagaagaatttgatagatattctggctattggtggtgtccaaaagctgaaacaactcccagtggtggtaaaattcttagaattctatatgaagaaaatgatgaatctgaggtggaaattattcatgttacatcccctatgttggaaacaaggagggcagattcattccgttatcctaaaacaggtacagcaaatcctaaagtcacttttaagatgtcagaaataatgattgatgctgaaggaaggatcatagatgtcatagataaggaactaattcaaccttttgagattctatttgaaggagttgaatatattgccagagctggatggactcctgagggaaaatatgcttggtccatcctactagatcgctcccagactcgcctacagatagtgttgatctcacctgaattatttatcccagtagaagatgatgttatggaaaggcagagactcattgagtcagtgcctgattctgtgacgccactaattatctatgaagaaacaacagacatctggataaatatccatgacatctttcatgtttttccccaaagtcacgaagaggaaattgagtttatttttgcctctgaatgcaaaacaggtttccgtcatttatacaaaattacatctattttaaaggaaagcaaatataaacgatccagtggtgggctgcctgctccaagtgatttcaagtgtcctatcaaagaggagatagcaattaccagtggtgaatgggaagttcttggccggcatggatctaatatccaagttgatgaagtcagaaggctggtatattttgaaggcaccaaagactcccctttagagcatcacctgtacgtagtcagttacgtaaatcctggagaggtgacaaggctgactgaccgtggctactcacattcttgctgcatcagtcagcactgtgacttctttataagtaagtatagtaaccagaagaatccacactgtgtgtccctttacaagctatcaagtcctgaagatgacccaacttgcaaaacaaaggaattttgggccaccattttggattcagcaggtcctcttcctgactatactcctccagaaattttctcttttgaaagtactactggatttacattgtatgggatgctctacaagcctcatgatctacagcctggaaagaaatatcctactgtgctgttcatatatggtggtcctcaggtgcagttggtgaataatcggtttaaaggagtcaagtatttccgcttgaataccctagcctctctaggttatgtggttgtagtgatagacaacaggggatcctgtcaccgagggcttaaatttgaaggcgcctttaaatataaaatgggtcaaatagaaattgacgatcaggtggaaggactccaatatctagcttctcgatatgatttcattgacttagatcgtgtgggcatccacggctggtcctatggaggatacctctccctgatggcattaatgcagaggtcagatatcttcagggttgctattgctggggccccagtcactctgtggatcttctatgatacaggatacacggaacgttatatgggtcaccctgaccagaatgaacagggctattacttaggatctgtggccatgcaagcagaaaagttcccctctgaaccaaatcgtttactgctcttacatggtttcctggatgagaatgtccattttgcacataccagtatattactgagttttttagtgagggctggaaagccatatgatttacagatctatcctcaggagagacacagcataagagttcctgaatcgggagaacattatgaactgcatcttttgcactaccttcaagaaaaccttggatcacgtattgctgctctaaaagtgatataattttgacctgtgtagaactctctggtatacactggctatttaaccaaatgaggaggtttaatcaacagaaaacacagaattgatcatcacattttgatacctgccatgtaacatctactcctgaaaataaatgtggtgccatgcaggggtctacggtttgtggtagtaatctaataccttaaccccacatgctcaaaatcaaatgatacatattcctgagagacccagcaataccataagaattactaaaaaaaaaaaaaaaaaaaagacattagcaccatgtattcatactaccctattttcacttttaatagtattataaacttcatgaacttaattagtgtatttttacagtatacttttgagtttgttaaaatatgatgatattagtgattggtttggttcagttccagaatctttgactagttacagatttgatagcacttaaatgtaattgaatagcttatgcttcattgcttgggcatatccagcatgttatgaactaataactattaaacttgacttaaccagtcattcattaataatttttcaaggataacttagtggcctcctaaagacacttgttttggcactgaccagtttttagccaatttaatctgtatctagtataaataattctcatttttctttgatgatattaacagagtgggcttttccttttgcataaaggctagtaactgtatatgtagcatggatttaattagtcatgatattgataattacaggcagaaaatttttaatcaaatgattagagcttaaatatttgcaggcaagtttttttttttcctttaagaaaaggaaaaagtacacattcactagaattcttcagaaaatttagtggtgccagtttccatttggtatttccttattaaaatattctagaattttaaggagattgaagggaatcacagtggggtggggagacctgggtttggggaatgacagagagaagaggtggtgagggcctgattaaaaactaagcagaagtagttttaacaaaaatactcatgaaaatgtttggaaactgaaatttaaacaactgtaatattaaggaaaccagaatcaataaatcactgtcttgccagcacagctacagagtaacatgattcaggggaggaaaagttccttagagttacttttataattctttttttttttcctcttaggtttagaaatcttacaaatttaaactttatccttttaaaattatttgaacataatttagatattgtaagcttaaaatacaaatgtttatagataacctctttaccataaactaatccctggcaagccatggctctctttttttttttggtgtttaaagcctgtaaacagtttttctgaatgatcatgaacttttcttggtttagcactaggatttagctatgaagagagctcataggctttcaggtgctaattgagatctgccctgttagagtcttggggtgctagattggtcacattgacaccagtggcagggaaggcatctatgagtttgatgctttttatcacacacttcagtgtttagaaagttattaccaatacttttaaacaacactccaagaaaatttgctatatttctttctcatcactacagagagagtagatttccccatagagagcacagcctccattagtaaggttggtgactattggtaagaggtggacttcattgacaccaagtgggaggtagggaaagcccagaaatggcaggatgatatggtggttctgtcgttgggaaaggtattgggttttgctgtttgtatttatactgtataatagataccacgctttttcttattatctgtatatgtattgcttttcatgtttgatattttcccatgccaagatttgtttatatatattttcaatgttaaattaaattgatttgggtaactttcttccccaagaaagtattttcccccttaagtatatatctgactgtggagggtgttttgttttgttttgttttgttttgtttggactaactggcctcgaaggatctatccttataatatatgcaaagtagaaatggtatacagtagcttttaagcagctactccattgaaacctctcacccattaaggctgtttcttcaaagtggcatctcttattttaccgaaacaaacttagaaaacttcatgtactctggagttcacaggtgttttccttttgcatgttgccttctcctttcctcctatcacaaagaatgcttctattatcactcccagtcacttaaatgccattctgcttctttagcaggaaaaaatacctgaatgaattctcttacagaaagacagtttgactgaatttgctttttacaatcagtgtggaaaatatcatagtcaattgaggcaatcagtagaaatctcactaaaagtttgtaccccctgagtatgggtaacagcttaaacggcaagaatatataaaagtagcaacagtttagtgggagccaaaaagcactaggttaaatatcatactacgtttttaaagacttgataaatgtgtacacttgaacaaccatccagagggatagttacttgagcattacagagtagtggaactcaaaatctaagattcatctgggatacttctaaaagaaatgtagagttttgaatctcactcttaaaaatgtgtattcccaggctaggcatggtggctcacgcctgtaatcctagcactttgggaggccaaggcgggtgaatcacttgaagtcaggagatcaagaccagcttggtcgacatggtgaaaccccgtctctactaaaagtacaaaaaaattagctgggcatgatggcgtgtgcctataatcccacctactcgggaggctgaggcaggagaatcgcttgaacctgggaggcggaagttgcagtgagccgagatggcgccactgtagtccagtctgggcgacagagtgagattctgcctcaaaataaataaataaataaaaatttgtattccattgatttgggtagacaccaggaatgtgcatttctaacaagctttccaggcgatcctatagtaagtcatctgtggactactttaagaaactcttctatagagaatggagttggattaataataggtgattttttacactggactgattcacaagaacctaaacagtagtccatgaagctgctcatctgtggtaactatttggccccgtctcactctgaaagcagcaggagatgttgtttactttgtttctatcccctttgtctggagattaattttggaatgaaagtttttctctctatgccattcctggttcttttccaaagcctcatacaagaggattaggtcacaatgcatgcattaccttttaaaagaatgcgatattgataccgatgcttacttttttttttttactacttgttttattcctt[450 bp omitted]cttccttggtatagtggaggatttgaggattggaatatagagtagagtgcttgcttaagcctgggagcccatctttatagctatttgatgtaagaaaagagacatggccatttctaaactatataaggtgagtgtgtctattcccagcagatataaaggaaaaaggaaacttttttgattcccaccttcccagcctcacctagccatcttccagcctcaaatatagagatgttagtgcaaggtcctgggctctaggtgatcatttcataagtcctttacagataaagaaaaagtagtgtttgtatgtttgtttttaagtaaccccaaaacaaatttatattgtattcagcaaaattggaattcaggtgtttaattttagaacatgaagtgcctgctgttttaagcattgacttgtataaaaagaattgcatgtctccagtaagcttatgggttttctcatttttaggtatatggcttttaatcatgtaaagtgaaacattagttttcttgcattttattacaggttctttgttgcaataaagatgctgctgaaattaattg

SEQ ID NO: 24730 - protein, 882 aa, Homo sapiens; identical to SEQ ID NO: 3299

SEQ ID NO: 24731 - DNA, 7002 bp, Homo sapiens
agcggatcgcaacgaaccggaagtgctaaagcctccgaggccaaggccgctgctactgccgccgctgcttcttagtgccgcgttcgccgcctgggttgtcaccggcgccgccgccgaggaagccactgcaaccaggaccggagtggaggcggcgcagcatgaagcggcgcaggcccgctccatagcgcacgtcgggacggtccgggcggggccggggggaaggaaaatgcaacatggcagcagcaatggaaacagaacagctgggtgttgagatatttgaaactgcggactgtgaggagaatattgaatcacaggatcggcctaaattggagcctttttatgttgagcggtattcctggagtcagcttaaaaagctgcttgccgataccagaaaatatcatggctacatgatggctaaggcaccacatgatttcatgtttgtgaagaggaatgatccagatggacctcattcagacagaatctattaccttgccatgtctggtgagaacagagaaaatacactgttttattctgaaattcccaaaactatcaatagagcagcagtcttaatgctctcttggaagcctcttttggatctttttcaggcaacactggactatggaatgtattctcgagaagaagaactattaagagaaagaaaacgcattggaacagtcggaattgcttcttacgattatcaccaaggaagtggaacatttctgtttcaagccggtagtggaatttatcacgtaaaagatggagggccacaaggatttacgcaacaacctttaaggcccaatctagtggaaactagttgtcccaacatacggatggatccaaaattatgccctgctgatccagactggattgcttttatacatagcaacgatatttggatatctaacatcgtaaccagagaagaaaggagactcacttatgtgcacaatgagctagccaacatggaagaagatgccagatcagctggagtcgctacctttgttctccaagaagaatttgatagatattctggctattggtggtgtccaaaagctgaaacaactcccagtggtggtaaaattcttagaattctatatgaagaaaatgatgaatctgaggtggaaattattcatgttacatcccctatgttggaaacaaggagggcagattcattccgttatcctaaaacaggtacagcaaatcctaaagtcacttttaagatgtcagaaataatgattgatgctgaaggaaggatcatagatgtcatagataaggaactaattcaaccttttgagattctatttgaaggagttgaatatattgccagagctggatggactcctgagggaaaatatgcttggtccatcctactagatcgctcccagactcgcctacagatagtgttgatctcacctgaattatttatcccagtagaagatgatgttatggaaaggcagagactcattgagtcagtgcctgattctgtgacgccactaattatctatgaagaaacaacagacatctggataaatatccatgacatctttcatgtttttccccaaagtcacgaagaggaaattgagtttatttttgcctctgaatgcaaaacaggtttccgtcatttatacaaaattacatctattttaaaggaaagcaaatataaacgatccagtggtgggctgcctgctccaagtgatttcaagtgtcctatcaaagaggagatagcaattaccagtggtgaatgggaagttcttggccggcatggatctaatatccaagttgatgaagtcagaaggctggtatattttgaaggcaccaaagactcccctttagagcatcacctgtacgtagtcagttacgtaaatcctggagaggtgacaaggctgactgaccgtggctactcacattcttgctgcatcagtcagcactgtgacttctttataagtaagtatagtaaccagaagaatccacactgtgtgtccctttacaagctatcaagtcctgaagatgacccaacttgcaaaacaaaggaattttgggccaccattttggattcagcaggtcctcttcctgactatactcctccagaaattttctcttttgaaagtactactggatttacattgtatgggatgctctacaagcctcatgatctacagcctggaaagaaatatcctactgtgctgttcatatatggtggtcctcaggttgctattgctggggccccagtcactctgtggatcttctatgatacaggatacacggaacgttatatgggtcaccctgaccagaatgaacagggctattacttaggatctgtggccatgcaagcagaaaagttcccctctgaaccaaatcgtttactgctcttacatggtttcctggatgagaatgtccattttgcacataccagtatattactgagttttttagtgagggctggaaagccatatgatttacagatctatcctcaggagagacacagcataagagttcctgaatcgggagaacattatgaactgcatcttttgcactaccttcaagaaaaccttggatcacgtattgctgctctaaaagtgatataattttgacctgtgtagaactctctggtatacactggctatttaaccaaatgaggaggtttaatcaacagaaaacacagaattgatcatcacattttgatacctgccatgtaacatctactcctgaaaataaatgtggtgccatgcaggggtctacggtttgtggtagtaatctaataccttaaccccacatgctcaaaatcaaatgatacatattcctgagagacccagcaataccataagaattactaaaaaaaaaaaaaaaaaaaagacattagcaccatgtattcatactaccctattttcacttttaatagtattataaacttcatgaacttaattagtgtatttttacagtatacttttgagtttgttaaaatatgatgatattagtgattggtttggttcagttccagaatctttgactagttacagatttgatagcacttaaatgtaattgaatagcttatgcttcattgcttgggcatatccagcatgttatgaactaataactattaaacttgacttaaccagtcattcattaataatttttcaaggataacttagtggcctcctaaagacacttgttttggcactgaccagtttttagccaatttaatctgtatctagtataaataattctcatttttctttgatgatattaacagagtgggcttttccttttgcataaaggctagtaactgtatatgtagcatggatttaattagtcatgatattgataattacaggcagaaaatttttaatcaaatgattagagcttaaatatttgcaggcaagtttttttttttcctttaagaaaaggaaaaagtacacattcactagaattcttcagaaaatttagtggtgccagtttccatttggtatttccttattaaaatattctagaattttaaggagattgaagggaatcacagtggggtggggagacctgggtttggggaatgacagagagaagaggtggtgagggcctgattaaaaactaagcagaagtagttttaacaaaaatactcatgaaaatgtttggaaactgaaatttaaacaactgtaatattaaggaaaccagaatcaataaatcactgtcttgccagcacagctacagagtaacatgattcaggggaggaaaagttccttagagttacttttataattctttttttttttcctcttaggtttagaaatcttacaaatttaaactttatccttttaaaattatttgaacataatttagatattgtaagcttaaaatacaaatgtttatagataacctctttaccataaactaatccctggcaagccatggctctctttttttttttggtgtttaaagcctgtaaacagtttttctgaatgatcatgaacttttcttggtttagcactaggatttagctatgaagagagctcataggctttcaggtgctaattgagatctgccctgttagagtcttggggtgctagattggtcacattgacaccagtggcagggaaggcatctatgagtttgatgctttttatcacacacttcagtgtttagaaagttattaccaatacttttaaacaacactccaagaaaatttgctatatttctttctcatcactacagagagagtagatttccccatagagagcacagcctccattagtaaggttggtgactattggtaagaggtggacttcattgacaccaagtgggaggtagggaaagcccagaaatggcaggatgatatggtggttctgtcgttgggaaaggtattgggttttgctgtttgtatttatactgtataatagataccacgctttttcttattatctgtatatgtattgcttttcatgtttgatattttcccatgccaagatttgtttatatatattttcaatgttaaattaaattgatttgggtaactttcttccccaagaaagtattttcccccttaagtatatatctgactgtggagggtgttttgttttgttttgttttgttttgtttggactaactggcctcgaaggatctatccttataatatatgcaaagtagaaatggtatacagtagcttttaagcagctactccattgaaacctctcacccattaaggctgtttcttcaaagtggcatctcttattttaccgaaacaaacttagaaaacttcatgtactctggagttcacaggtgttttccttttgcatgttgccttctcctttcctcctatcacaaagaatgcttctattatcactcccagtcacttaaatgccattctgcttctttagcaggaaaaaatacctgaatgaattctcttacagaaagacagtttgactgaatttgctttttacaatcagtgtggaaaatatcatagtcaattgaggcaatcagtagaaatctcactaaaagtttgtaccccctgagtatgggtaacagcttaaacggcaagaatatataaaagtagcaacagtttagtgggagccaaaaagcactaggttaaatatcatactacgtttttaaagacttgataaatgtgtacacttgaacaaccatccagagggatagttacttgagcattacagagtagtggaactcaaaatctaagattcatctgggatacttctaaaagaaatgtagagttttgaatctcactcttaaaaatgtgtattcccaggctaggcatggtggctcacgcctgtaatcctagcactttgggaggccaaggcgggtgaatcacttgaagtcaggagatcaagaccagcttggtcgacatggtgaaaccccgtctctactaaaagtacaaaaaaattagctgggcatgatggcgtgtgcctataatcccacctactcgggaggctgaggcaggagaatcgcttgaacctgggaggcggaagttgcagtgagccgagatggcgccactgtagtccagtctgggcgacagagtgagattctgcctcaaaataaataaataaataaaaatttgtattccattgatttgggtagacaccaggaatgtgcatttctaacaagctttccaggcgatcctatagtaagtcatctgtggactactttaagaaactcttctatagagaatggagttggattaataataggtgattttttacactggactgattcacaagaacctaaacagtagtccatgaagctgctcatctgtggtaactatttggccccgtctcactctgaaagcagcaggagatgttgtttactttgtttctatcccctttgtctggagattaattttggaatgaaagtttttctctctatgccattcctggttcttttccaaagcctcatacaagaggattaggtcacaatgcatgcattaccttttaaaagaatgcgatattgataccgatgcttacttttttttttttactacttgttttattcctt[450 bp omitted]cttccttggtatagtggaggatttgaggattggaatatagagtagagtgcttgcttaagcctgggagcccatctttatagctatttgatgtaagaaaagagacatggccatttctaaactatataaggtgagtgtgtctattcccagcagatataaaggaaaaaggaaacttttttgattcccaccttcccagcctcacctagccatcttccagcctcaaatatagagatgttagtgcaaggtcctgggctctaggtgatcatttcataagtcctttacagataaagaaaaagtagtgtttgtatgtttgtttttaagtaaccccaaaacaaatttatattgtattcagcaaaattggaattcaggtgtttaattttagaacatgaagtgcctgctgttttaagcattgacttgtataaaaagaattgcatgtctccagtaagcttatgggttttctcatttttaggtatatggcttttaatcatgtaaagtgaaacattagttttcttgcattttattacaggttctttgttgcaataaagatgctgctgaaattaattg

SEQ ID NO: 24732 - protein, 782 aa, Homo sapiens; identical to SEQ ID NO: 3297

SEQ ID NO: 24733 - DNA, 6199 bp, Homo sapiens
agattccgagtcaaccaccgttcactgggcgccccttgagctctgggcgctggcctcctggcttccacgtccgttatcttaattgagtctcgctggggttgggaggccgggtattgtcagcgcttacagatgaggaaacggaagcccacagaggcgaagggattttccttaagtccgacttggcagatgggcttcggcctcagattttctggtttttcagctggtggtcttttttctctcctgcctcatgctaggtcgattccctccctgctcactgccctctcccattctgttccacccactcgcagcaggacactttcctttcctgccacacctgtcttctcacacacttttcttctaagacttggcattcctcccatctctcttctcaatattctctgctatgcctctcctcttgttcctcattcatagtttttcaaggtctttgccccctctgtgctattgaatctctcaactaggtgtggaccctaaagaatgagatagctaggcttcagtgaggctttaggtgtttaagtggacggctgtttggcccttgagttaaaaattaaggaatttcacttgagtggatccaaactcaagagtcctaaagctattttctgagtcaacatgctctatttctgagtgaggggcttagtgctatgaggtgtcttgacatcttagtccattgttgctgtgctggcataacctcgctgtttttcctgcacttgccacttagcttttcccaccccatcccttcatcacctacttgggctatgggagcccaaaattaaaacttatagagtaacagatgtaatagcagaccttcctttttttttttttcctaagccagaatttcaacaagtttaatgcttctttttccagaaaagttacctatttaaattattctcagagtaatgcagcaagaaaatggaatgcacttaagatgaatagaaaattgtttatctcgtgaaaagtcttaagttattaaattcaagttaattccctttctgcaaaaatggcctgtaactcttactggctatcctcctgagttaattctatctccatccagcttgatatgacattattatgtaaaagaggaacaggaataggcacataaaaataaattttattaatcatatgccgtttttgatgatttgcaatagtcactgagtaacttcacatctgtatgccttttgtaactttttaaagcctttccatggttttcctttgtctggacaccaaagtttgctatgttaggatattcttttgactatattgggctacacatctctgaaataaaataattcttgaattctgataacataaaacgcagatacaaaataatgtaggcattatatattgccccaaaaagtgatattttggtatcagttttaactactattttggggcttctctttttggccacatatggtccatcttaatgatcaaagtcttatcttatttcattatcctggtgagcaggctttgatggtgaggaaaggaaagattcctgtgagaagagcaggatgagcagagggattctatgcttgaagtcgagtcacttgaaaaagatctctttgaatgtggaagagatctgagcagatgaaaataaaatcaggaaaatgcaacatggcagcagcaatggaaacagaacagctgggtgttgagatatttgaaactgcggactgtgaggagaatattgaatcacaggatcggcctaaattggagcctttttatgttgagcggtattcctggagtcagcttaaaaagctgcttgccgataccagaaaatatcatggctacatgatggctaaggcaccacatgatttcatgtttgtgaagaggaatgatccagatggacctcattcagacagaatctattaccttgccatgtctggtgagaacagagaaaatacactgttttattctgaaattcccaaaactatcaatagagcagcagtcttaatgctctcttggaagcctcttttggatctttttcaggcaacactggactatggaatgtattctcgagaagaagaactattaagagaaagaaaacgcattggaacagtcggaattgcttcttacgattatcaccaaggaagtggaacatttctgtttcaagccggtagtggaatttatcacgtaaaagatggagggccacaaggatttacgcaacaacctttaaggcccaatctagtggaaactagttgtcccaacatacggatggatccaaaattatgccctgctgatccagactggattgcttttatacatagcaacgatatttggatatctaacatcgtaaccagagaagaaaggagactcacttatgtgcacaatgagctagccaacatggaagaagatgccagatcagctggagtcgctacctttgttctccaagaagaatttgatagatattctggctattggtggtgtccaaaagctgaaacaactcccagtggtggtaaaattcttagaattctatatgaagaaaatgatgaatctgaggtggaaattattcatgttacatcccctatgttggaaacaaggagggcagattcattccgttatcctaaaacaggtacagcaaatcctaaagtcacttttaagatgtcagaaataatgattgatgctgaaggaaggatcatagatgtcatagataaggaactaattcaaccttttgagattctatttgaaggagttgaatatattgccagagctggatggactcctgagggaaaatatgcttggtccatcctactagatcgctcccagactcgcctacagatagtgttgatctcacctgaattatttatcccagtagaagatgatgttatggaaaggcagagactcattgagtcagtgcctgattctgtgacgccactaattatctatgaagaaacaacagacatctggataaatatccatgacatctttcatgtttttccccaaagtcacgaagaggaaattgagtttatttttgcctctgaatgcaaaacaggtttccgtcatttatacaaaattacatctattttaaaggaaagcaaatataaacgatccagtggtgggctgcctgctccaagtgatttcaagtgtcctatcaaagaggagatagcaattaccagtggtgaatgggaagttcttggccggcatggatctaatatccaagttgatgaagtcagaaggctggtatattttgaaggcaccaaagactcccctttagagcatcacctgtacgtagtcagttacgtaaatcctggagaggtgacaaggctgactgaccgtggctactcacattcttgctgcatcagtcagcactgtgacttctttataagtaagtatagtaaccagaagaatccacactgtgtgtccctttacaagctatcaagtcctgaagatgacccaacttgcaaaacaaaggaattttgggccaccattttggattcagcaggtcctcttcctgactatactcctccagaaattttctcttttgaaagtactactggatttacattgtatgggatgctctacaagcctcatgatctacagcctggaaagaaatatcctactgtgctgttcatatatggtggtcctcaggtgcagttggtgaataatcggtttaaaggagtcaagtatttccgcttgaataccctagcctctctaggttatgtggttgtagtgatagacaacaggggatcctgtcaccgagggcttaaatttgaaggcgcctttaaatataaaatgggtcaaatagaaattgacgatcaggtggaaggactccaatatctagcttctcgatatgatttcattgacttagatcgtgtgggcatccacggctggtcctatggaggatacctctccctgatggcattaatgcagaggtcagatatcttcagggttgctattgctggggccccagtcactctgtggatcttctatgatacaggatacacggaacgttatatgggtcaccctgaccagaatgaacagggctattacttaggatctgtggccatgcaagcagaaaagttcccctctgaaccaaatcgtttactgctcttacatggtttcctggatgagaatgtccattttgcacataccagtatattactgagttttttagtgagggctggaaagccatatgatttacagatctatcctcaggagagacacagcataagagttcctgaatcgggagaacattatgaactgcatcttttgcactaccttcaagaaaaccttggatcacgtattgctgctctaaaagtgatataattttgacctgtgtagaactctctggtatacactggctatttaaccaaatgaggaggtttaatcaacagaaaacacagaattgatcatcacattttgatacctgccatgtaacatctactcctgaaaataaatgtggtgccatgcaggggtctacggtttgtggtagtaatctaataccttaaccccacatgctcaaaatcaaatgatacatattcctgagagacccagcaataccataagaattactaaaaaaaaaaaaaaaaaaaagacattagcaccatgtattcatactaccctattttcacttttaatagtattataaacttcatgaacttaattagtgtatttttacagtatacttttgagtttgttaaaatatgatgatattagtgattggtttggttcagttccagaatctttgactagttacagatttgatagcacttaaatgtaattgaatagcttatgcttcattgcttgggcatatccagcatgttatgaactaataactattaaacttgacttaaccagtcattcattaataatttttcaaggataacttagtggcctcctaaagacacttgttttggcactgaccagtttttagccaatttaatctgtatctagtataaataattctcatttttctttgatgatattaacagagtgggcttttccttttgcataaaggctagtaactgtatatgtagcatggatttaattagtcatgatattgataattacaggcagaaaatttttaatcaaatgattagagcttaaatatttgcaggcaagtttttttttttcctttaagaaaaggaaaaagtacacattcactagaattcttcagaaaatttagtggtgccagtttccatttggtatttccttattaaaatattctagaattttaaggagattgaagggaatcacagtggggtggggagacctgggtttggggaatgacagagagaagaggtggtgagggcctgattaaaaactaagcagaagtagttttaacaaaaatactcatgaaaatgtttggaaactgaaatttaaacaactgtaatattaaggaaaccagaatcaataaatcactgtcttgccagcacagctacagagtaacatgattcaggggaggaaaagttccttagagttacttttataattctttttttttttcctcttaggtttagaaatcttacaaatttaaactttatccttttaaaattatttgaacataatttagatattgtaagcttaaaatacaaatgtttatagataacctctttaccataaactaatccctggcaagccatggctctctttttttttttggtgtttaaagcctgtaaacagtttttctgaatgatcatgaacttttcttggtttagcactaggatttagctatgaagagagctcataggctttcaggtgctaattgagatctgccctgttagagtcttggggtgctagattggtcacattgacaccagtggcagggaaggcatctatgagtttgatgctttttatcacacacttcagtgtttagaaagttattaccaatacttttaaacaacactccaagaaaatttgctatatttctttctcatcactacagagagagtagatttccccatagagagcacagcctccattagtaaggttggtgactattggtaagaggtggacttcattgacaccaagtgggaggtagggaaagcccagaaatggcaggatgatatggtggttctgtcgttgggaaaggtattgggttttgctgtttgtatttatactgtataatagataccacgctttttcttattatctgtatatgtattgcttttcatgtttgatattttcccatgccaagatttgtttatatatattttcaatgttaaattaaattgatttgggtaacttt

SEQ ID NO: 24734 - protein, 898 aa, Homo sapiens; identical to SEQ ID NO: 3301

SEQ ID NO: 24735 - DNA, 4783 bp, Homo sapiens
ggatcgcaacgaaccggaagtgctaaagcctccgaggccaaggccgctgctactgccgccgctgcttcttagtgccgcgttcgccgcctgggttgtcaccggcgccgccgccgaggaagccactgcaaccaggaccggagtggaggcggcgcagcatgaagcggcgcaggcccgctccatagcgcacgtcgggacggtccgggcggggccggggggaaggctttgatggtgaggaaaggaaagattcctgtgagaagagcaggatgagcagagggattctatgcttgaagtcgagtcacttgaaaaagatctctttgaatgtggaagagatctgagcagatgaaaataaaatcaggaaaatgcaacatggcagcagcaatggaaacagaacagctgggtgttgagatatttgaaactgcggactgtgaggagaatattgaatcacaggatcggcctaaattggagcctttttatgttgagcggtattcctggagtcagcttaaaaagctgcttgccgataccagaaaatatcatggctacatgatggctaaggcaccacatgatttcatgtttgtgaagaggaatgatccagatggacctcattcagacagaatctattaccttgccatgtctggtgagaacagagaaaatacactgttttattctgaaattcccaaaactatcaatagagcagcagtcttaatgctctcttggaagcctcttttggatctttttcaggcaacactggactatggaatgtattctcgagaagaagaactattaagagaaagaaaacgcattggaacagtcggaattgcttcttacgattatcaccaaggaagtggaacatttctgtttcaagccggtagtggaatttatcacgtaaaagatggagggccacaaggatttacgcaacaacctttaaggcccaatctagtggaaactagttgtcccaacatacggatggatccaaaattatgccctgctgatccagactggattgcttttatacatagcaacgatatttggatatctaacatcgtaaccagagaagaaaggagactcacttatgtgcacaatgagctagccaacatggaagaagatgccagatcagctggagtcgctacctttgttctccaagaagaatttgatagatattctggctattggtggtgtccaaaagctgaaacaactcccagtggtggtaaaattcttagaattctatatgaagaaaatgatgaatctgaggtggaaattattcatgttacatcccctatgttggaaacaaggagggcagattcattccgttatcctaaaacaggtacagcaaatcctaaagtcacttttaagatgtcagaaataatgattgatgctgaaggaaggatcatagatgtcatagataaggaactaattcaaccttttgagattctatttgaaggagttgaatatattgccagagctggatggactcctgagggaaaatatgcttggtccatcctactagatcgctcccagactcgcctacagatagtgttgatctcacctgaattatttatcccagtagaagatgatgttatggaaaggcagagactcattgagtcagtgcctgattctgtgacgccactaattatctatgaagaaacaacagacatctggataaatatccatgacatctttcatgtttttccccaaagtcacgaagaggaaattgagtttatttttgcctctgaatgcaaaacaggtttccgtcatttatacaaaattacatctattttaaaggaaagcaaatataaacgatccagtggtgggctgcctgctccaagtgatttcaagtgtcctatcaaagaggagatagcaattaccagtggtgaatgggaagttcttggccggcatggatctaatatccaagttgatgaagtcagaaggctggtatattttgaaggcaccaaagactcccctttagagcatcacctgtacgtagtcagttacgtaaatcctggagaggtgacaaggctgactgaccgtggctactcacattcttgctgcatcagtcagcactgtgacttctttataagtaagtatagtaaccagaagaatccacactgtgtgtccctttacaagctatcaagtcctgaagatgacccaacttgcaaaacaaaggaattttgggccaccattttggattcagcaggtcctcttcctgactatactcctccagaaattttctcttttgaaagtactactggatttacattgtatgggatgctctacaagcctcatgatctacagcctggaaagaaatatcctactgtgctgttcatatatggtggtcctcaggtgcagttggtgaataatcggtttaaaggagtcaagtatttccgcttgaataccctagcctctctaggttatgtggttgtagtgatagacaacaggggatcctgtcaccgagggcttaaatttgaaggcgcctttaaatataaaatggttgctattgctggggccccagtcactctgtggatcttctatgatacaggatacacggaacgttatatgggtcaccctgaccagaatgaacagggctattacttaggatctgtggccatgcaagcagaaaagttcccctctgaaccaaatcgtttactgctcttacatggtttcctggatgagaatgtccattttgcacataccagtatattactgagttttttagtgagggctggaaagccatatgatttacagatctatcctcaggagagacacagcataagagttcctgaatcgggagaacattatgaactgcatcttttgcactaccttcaagaaaaccttggatcacgtattgctgctctaaaagtgatataattttgacctgtgtagaactctctggtatacactggctatttaaccaaatgaggaggtttaatcaacagaaaacacagaattgatcatcacattttgatacctgccatgtaacatctactcctgaaaataaatgtggtgccatgcaggggtctacggtttgtggtagtaatctaataccttaaccccacatgctcaaaatcaaatgatacatattcctgagagacccagcaataccataagaattactaaaaaaaaaaaaaaaaaaaagacattagcaccatgtattcatactaccctattttcacttttaatagtattataaacttcatgaacttaattagtgtatttttacagtatacttttgagtttgttaaaatatgatgatattagtgattggtttggttcagttccagaatctttgactagttacagatttgatagcacttaaatgtaattgaatagcttatgcttcattgcttgggcatatccagcatgttatgaactaataactattaaacttgacttaaccagtcattcattaataatttttcaaggataacttagtggcctcctaaagacacttgttttggcactgaccagtttttagccaatttaatctgtatctagtataaataattctcatttttctttgatgatattaacagagtgggcttttccttttgcataaaggctagtaactgtatatgtagcatggatttaattagtcatgatattgataattacaggcagaaaatttttaatcaaatgattagagcttaaatatttgcaggcaagtttttttttttcctttaagaaaaggaaaaagtacacattcactagaattcttcagaaaatttagtggtgccagtttccatttggtatttccttattaaaatattctagaattttaaggagattgaagggaatcacagtggggtggggagacctgggtttggggaatgacagagagaagaggtggtgagggcctgattaaaaactaagcagaagtagttttaacaaaaatactcatgaaaatgtttggaaactgaaatttaaacaactgtaatattaaggaaaccagaatcaataaatcactgtcttgccagcacagctacagagtaacatgattcaggggaggaaaagttccttagagttacttttataattctttttttttttcctcttaggtttagaaatcttacaaatttaaactttatccttttaaaattatttgaacataatttagatattgtaagcttaaaatacaaatgtttatagataacctctttaccataaactaatccctggcaagccatggctctctttttttttttggtgtttaaagcctgtaaacagtttttctgaatgatcatgaacttttcttggtttagcactaggatttagctatgaagagagctcataggctttcaggtgctaattgagatctgccctgttagagtcttggggtgctagattggtcacattgacaccagtggcagggaaggcatctatgagtttgatgctttttatcacacacttcagtgtttagaaagttattaccaatacttttaaacaacactccaagaaaatttgctatatttctttctcatcactacagagagagtagatttccccatagagagcacagcctccattagtaaggttggtgactattggtaagaggtggacttcattgacaccaagtgggaggtagggaaagcccagaaatggcaggatgatatggtggttctgtcgttgggaaaggtattgggttttgctgtttgtatttatactgtataatagataccacgctttttcttattatctgtatatgtattgcttttcatgtttgatattttcccatgccaagatttgtttatatatattttcaatgttaaattaaattgatttgggtaacttt

SEQ ID NO: 24736 - protein, 847 aa, Homo sapiens; identical to SEQ ID NO: 3303

SEQ ID NO: 24737 - DNA, 4803 bp, Homo sapiens
agcggatcgcaacgaaccggaagtgctaaagcctccgaggccaaggccgctgctactgccgccgctgcttcttagtgccgcgttcgccgcctgggttgtcaccggcgccgccgccgaggaagccactgcaaccaggaccggagtggaggcggcgcagcatgaagcggcgcaggcccgctccatagcgcacgtcgggacggtccgggcggggccggggggaaggaaaatgcaacatggcagcagcaatggaaacagaacagctgggtgttgagatatttgaaactgcggactgtgaggagaatattgaatcacaggatcggcctaaattggagcctttttatgttgagcggtattcctggagtcagcttaaaaagctgcttgccgataccagaaaatatcatggctacatgatggctaaggcaccacatgatttcatgtttgtgaagaggaatgatccagatggacctcattcagacagaatctattaccttgccatgtctggtgagaacagagaaaatacactgttttattctgaaattcccaaaactatcaatagagcagcagtcttaatgctctcttggaagcctcttttggatctttttcaggcaacactggactatggaatgtattctcgagaagaagaactattaagagaaagaaaacgcattggaacagtcggaattgcttcttacgattatcaccaaggaagtggaacatttctgtttcaagccggtagtggaatttatcacgtaaaagatggagggccacaaggatttacgcaacaacctttaaggcccaatctagtggaaactagttgtcccaacatacggatggatccaaaattatgccctgctgatccagactggattgcttttatacatagcaacgatatttggatatctaacatcgtaaccagagaagaaaggagactcacttatgtgcacaatgagctagccaacatggaagaagatgccagatcagctggagtcgctacctttgttctccaagaagaatttgatagatattctggctattggtggtgtccaaaagctgaaacaactcccagtggtggtaaaattcttagaattctatatgaagaaaatgatgaatctgaggtggaaattattcatgttacatcccctatgttggaaacaaggagggcagattcattccgttatcctaaaacaggtacagcaaatcctaaagtcacttttaagatgtcagaaataatgattgatgctgaaggaaggatcatagatgtcatagataaggaactaattcaaccttttgagattctatttgaaggagttgaatatattgccagagctggatggactcctgagggaaaatatgcttggtccatcctactagatcgctcccagactcgcctacagatagtgttgatctcacctgaattatttatcccagtagaagatgatgttatggaaaggcagagactcattgagtcagtgcctgattctgtgacgccactaattatctatgaagaaacaacagacatctggataaatatccatgacatctttcatgtttttccccaaagtcacgaagaggaaattgagtttatttttgcctctgaatgcaaaacaggtttccgtcatttatacaaaattacatctattttaaaggaaagcaaatataaacgatccagtggtgggctgcctgctccaagtgatttcaagtgtcctatcaaagaggagatagcaattaccagtggtgaatgggaagttcttggccggcatggatctaatatccaagttgatgaagtcagaaggctggtatattttgaaggcaccaaagactcccctttagagcatcacctgtacgtagtcagttacgtaaatcctggagaggtgacaaggctgactgaccgtggctactcacattcttgctgcatcagtcagcactgtgacttctttataagtaagtatagtaaccagaagaatccacactgtgtgtccctttacaagctatcaagtcctgaagatgacccaacttgcaaaacaaaggaattttgggccaccattttggattcagcaggtcctcttcctgactatactcctccagaaattttctcttttgaaagtactactggatttacattgtatgggatgctctacaagcctcatgatctacagcctggaaagaaatatcctactgtgctgttcatatatggtggtcctcaggtgcagttggtgaataatcggtttaaaggagtcaagtatttccgcttgaataccctagcctctctaggttatgtggttgtagtgatagacaacaggggatcctgtcaccgagggcttaaatttgaaggcgcctttaaatataaaatgggtcaaatagaaattgacgatcaggtggaaggactccaatatctagcttctcgatatgatttcattgacttagatcgtgtgggcatccacggctggtcctatggaggatacctctccctgatggcattaatgcagaggtcagatatcttcagggttgctattgctggggccccagtcactctgtggatcttctatgatacaggatacacggaacgttatatgggtcaccctgaccagaatgaacagggctattacttaggatctgtggccatgcaagcagaaaagttcccctctgaaccaaatcgtttactgctcttacatggtttcctggatgagaatgtccattttgcacataccagtatattactgagttttttagtgagggctggaaagccatatgatttacagatctatcctcaggagagacacagcataagagttcctgaatcgggagaacattatgaactgcatcttttgcactaccttcaagaaaaccttggatcacgtattgctgctctaaaagtgatataattttgacctgtgtagaactctctggtatacactggctatttaaccaaatgaggaggtttaatcaacagaaaacacagaattgatcatcacattttgatacctgccatgtaacatctactcctgaaaataaatgtggtgccatgcaggggtctacggtttgtggtagtaatctaataccttaaccccacatgctcaaaatcaaatgatacatattcctgagagacccagcaataccataagaattactaaaaaaaaaaaaaaaaaaaagacattagcaccatgtattcatactaccctattttcacttttaatagtattataaacttcatgaacttaattagtgtatttttacagtatacttttgagtttgttaaaatatgatgatattagtgattggtttggttcagttccagaatctttgactagttacagatttgatagcacttaaatgtaattgaatagcttatgcttcattgcttgggcatatccagcatgttatgaactaataactattaaacttgacttaaccagtcattcattaataatttttcaaggataacttagtggcctcctaaagacacttgttttggcactgaccagtttttagccaatttaatctgtatctagtataaataattctcatttttctttgatgatattaacagagtgggcttttccttttgcataaaggctagtaactgtatatgtagcatggatttaattagtcatgatattgataattacaggcagaaaatttttaatcaaatgattagagcttaaatatttgcaggcaagtttttttttttcctttaagaaaaggaaaaagtacacattcactagaattcttcagaaaatttagtggtgccagtttccatttggtatttccttattaaaatattctagaattttaaggagattgaagggaatcacagtggggtggggagacctgggtttggggaatgacagagagaagaggtggtgagggcctgattaaaaactaagcagaagtagttttaacaaaaatactcatgaaaatgtttggaaactgaaatttaaacaactgtaatattaaggaaaccagaatcaataaatcactgtcttgccagcacagctacagagtaacatgattcaggggaggaaaagttccttagagttacttttataattctttttttttttcctcttaggtttagaaatcttacaaatttaaactttatccttttaaaattatttgaacataatttagatattgtaagcttaaaatacaaatgtttatagataacctctttaccataaactaatccctggcaagccatggctctctttttttttttggtgtttaaagcctgtaaacagtttttctgaatgatcatgaacttttcttggtttagcactaggatttagctatgaagagagctcataggctttcaggtgctaattgagatctgccctgttagagtcttggggtgctagattggtcacattgacaccagtggcagggaaggcatctatgagtttgatgctttttatcacacacttcagtgtttagaaagttattaccaatacttttaaacaacactccaagaaaatttgctatatttctttctcatcactacagagagagtagatttccccatagagagcacagcctccattagtaaggttggtgactattggtaagaggtggacttcattgacaccaagtgggaggtagggaaagcccagaaatggcaggatgatatggtggttctgtcgttgggaaaggtattgggttttgctgtttgtatttatactgtataatagataccacgctttttcttattatctgtatatgtattgcttttcatgtttgatattttcccatgccaagatttgtttatatatattttcaatgttaaattaaattgatttgggtaacttt

SEQ ID NO: 24738 - protein, 882 aa, Homo sapiens; identical to SEQ ID NO: 3299

SEQ ID NO: 24739 - DNA, 4503 bp, Homo sapiens
agcggatcgcaacgaaccggaagtgctaaagcctccgaggccaaggccgctgctactgccgccgctgcttcttagtgccgcgttcgccgcctgggttgtcaccggcgccgccgccgaggaagccactgcaaccaggaccggagtggaggcggcgcagcatgaagcggcgcaggcccgctccatagcgcacgtcgggacggtccgggcggggccggggggaaggaaaatgcaacatggcagcagcaatggaaacagaacagctgggtgttgagatatttgaaactgcggactgtgaggagaatattgaatcacaggatcggcctaaattggagcctttttatgttgagcggtattcctggagtcagcttaaaaagctgcttgccgataccagaaaatatcatggctacatgatggctaaggcaccacatgatttcatgtttgtgaagaggaatgatccagatggacctcattcagacagaatctattaccttgccatgtctggtgagaacagagaaaatacactgttttattctgaaattcccaaaactatcaatagagcagcagtcttaatgctctcttggaagcctcttttggatctttttcaggcaacactggactatggaatgtattctcgagaagaagaactattaagagaaagaaaacgcattggaacagtcggaattgcttcttacgattatcaccaaggaagtggaacatttctgtttcaagccggtagtggaatttatcacgtaaaagatggagggccacaaggatttacgcaacaacctttaaggcccaatctagtggaaactagttgtcccaacatacggatggatccaaaattatgccctgctgatccagactggattgcttttatacatagcaacgatatttggatatctaacatcgtaaccagagaagaaaggagactcacttatgtgcacaatgagctagccaacatggaagaagatgccagatcagctggagtcgctacctttgttctccaagaagaatttgatagatattctggctattggtggtgtccaaaagctgaaacaactcccagtggtggtaaaattcttagaattctatatgaagaaaatgatgaatctgaggtggaaattattcatgttacatcccctatgttggaaacaaggagggcagattcattccgttatcctaaaacaggtacagcaaatcctaaagtcacttttaagatgtcagaaataatgattgatgctgaaggaaggatcatagatgtcatagataaggaactaattcaaccttttgagattctatttgaaggagttgaatatattgccagagctggatggactcctgagggaaaatatgcttggtccatcctactagatcgctcccagactcgcctacagatagtgttgatctcacctgaattatttatcccagtagaagatgatgttatggaaaggcagagactcattgagtcagtgcctgattctgtgacgccactaattatctatgaagaaacaacagacatctggataaatatccatgacatctttcatgtttttccccaaagtcacgaagaggaaattgagtttatttttgcctctgaatgcaaaacaggtttccgtcatttatacaaaattacatctattttaaaggaaagcaaatataaacgatccagtggtgggctgcctgctccaagtgatttcaagtgtcctatcaaagaggagatagcaattaccagtggtgaatgggaagttcttggccggcatggatctaatatccaagttgatgaagtcagaaggctggtatattttgaaggcaccaaagactcccctttagagcatcacctgtacgtagtcagttacgtaaatcctggagaggtgacaaggctgactgaccgtggctactcacattcttgctgcatcagtcagcactgtgacttctttataagtaagtatagtaaccagaagaatccacactgtgtgtccctttacaagctatcaagtcctgaagatgacccaacttgcaaaacaaaggaattttgggccaccattttggattcagcaggtcctcttcctgactatactcctccagaaattttctcttttgaaagtactactggatttacattgtatgggatgctctacaagcctcatgatctacagcctggaaagaaatatcctactgtgctgttcatatatggtggtcctcaggttgctattgctggggccccagtcactctgtggatcttctatgatacaggatacacggaacgttatatgggtcaccctgaccagaatgaacagggctattacttaggatctgtggccatgcaagcagaaaagttcccctctgaaccaaatcgtttactgctcttacatggtttcctggatgagaatgtccattttgcacataccagtatattactgagttttttagtgagggctggaaagccatatgatttacagatctatcctcaggagagacacagcataagagttcctgaatcgggagaacattatgaactgcatcttttgcactaccttcaagaaaaccttggatcacgtattgctgctctaaaagtgatataattttgacctgtgtagaactctctggtatacactggctatttaaccaaatgaggaggtttaatcaacagaaaacacagaattgatcatcacattttgatacctgccatgtaacatctactcctgaaaataaatgtggtgccatgcaggggtctacggtttgtggtagtaatctaataccttaaccccacatgctcaaaatcaaatgatacatattcctgagagacccagcaataccataagaattactaaaaaaaaaaaaaaaaaaaagacattagcaccatgtattcatactaccctattttcacttttaatagtattataaacttcatgaacttaattagtgtatttttacagtatacttttgagtttgttaaaatatgatgatattagtgattggtttggttcagttccagaatctttgactagttacagatttgatagcacttaaatgtaattgaatagcttatgcttcattgcttgggcatatccagcatgttatgaactaataactattaaacttgacttaaccagtcattcattaataatttttcaaggataacttagtggcctcctaaagacacttgttttggcactgaccagtttttagccaatttaatctgtatctagtataaataattctcatttttctttgatgatattaacagagtgggcttttccttttgcataaaggctagtaactgtatatgtagcatggatttaattagtcatgatattgataattacaggcagaaaatttttaatcaaatgattagagcttaaatatttgcaggcaagtttttttttttcctttaagaaaaggaaaaagtacacattcactagaattcttcagaaaatttagtggtgccagtttccatttggtatttccttattaaaatattctagaattttaaggagattgaagggaatcacagtggggtggggagacctgggtttggggaatgacagagagaagaggtggtgagggcctgattaaaaactaagcagaagtagttttaacaaaaatactcatgaaaatgtttggaaactgaaatttaaacaactgtaatattaaggaaaccagaatcaataaatcactgtcttgccagcacagctacagagtaacatgattcaggggaggaaaagttccttagagttacttttataattctttttttttttcctcttaggtttagaaatcttacaaatttaaactttatccttttaaaattatttgaacataatttagatattgtaagcttaaaatacaaatgtttatagataacctctttaccataaactaatccctggcaagccatggctctctttttttttttggtgtttaaagcctgtaaacagtttttctgaatgatcatgaacttttcttggtttagcactaggatttagctatgaagagagctcataggctttcaggtgctaattgagatctgccctgttagagtcttggggtgctagattggtcacattgacaccagtggcagggaaggcatctatgagtttgatgctttttatcacacacttcagtgtttagaaagttattaccaatacttttaaacaacactccaagaaaatttgctatatttctttctcatcactacagagagagtagatttccccatagagagcacagcctccattagtaaggttggtgactattggtaagaggtggacttcattgacaccaagtgggaggtagggaaagcccagaaatggcaggatgatatggtggttctgtcgttgggaaaggtattgggttttgctgtttgtatttatactgtataatagataccacgctttttcttattatctgtatatgtattgcttttcatgtttgatattttcccatgccaagatttgtttatatatattttcaatgttaaattaaattgatttgggtaacttt

SEQ ID NO: 24740 - protein, 782 aa, Homo sapiens; identical to SEQ ID NO: 3297

SEQ ID NO: 24741 - DNA, 3026 bp, Homo sapiens
gaggaagccgaggctctgagattccgagtcaaccaccgttcactgggcgccccttgagctctgggcgctggcctcctggcttccacgctttgatggtgaggaaaggaaagattcctgtgagaagagcaggatgagcagagggattctatgcttgaagtcgagtcacttgaaaaagatctctttgaatgtggaagagatctgagcagatgaaaataaaatcaggaaaatgcaacatggcagcagcaatggaaacagaacagctgggtgttgagatatttgaaactgcggactgtgaggagaatattgaatcacaggatcggcctaaattggagcctttttatgttgagcggtattcctggagtcagcttaaaaagctgcttgccgataccagaaaatatcatggctacatgatggctaaggcaccacatgatttcatgtttgtgaagaggaatgatccagatggacctcattcagacagaatctattaccttgccatgtctggtgagaacagagaaaatacactgttttattctgaaattcccaaaactatcaatagagcagcagtcttaatgctctcttggaagcctcttttggatctttttcaggcaacactggactatggaatgtattctcgagaagaagaactattaagagaaagaaaacgcattggaacagtcggaattgcttcttacgattatcaccaaggaagtggaacatttctgtttcaagccggtagtggaatttatcacgtaaaagatggagggccacaaggatttacgcaacaacctttaaggcccaatctagtggaaactagttgtcccaacatacggatggatccaaaattatgccctgctgatccagactggattgcttttatacatagcaacgatatttggatatctaacatcgtaaccagagaagaaaggagactcacttatgtgcacaatgagctagccaacatggaagaagatgccagatcagctggagtcgctacctttgttctccaagaagaatttgatagatattctggctattggtggtgtccaaaagctgaaacaactcccagtggtggtaaaattcttagaattctatatgaagaaaatgatgaatctgaggtggaaattattcatgttacatcccctatgttggaaacaaggagggcagattcattccgttatcctaaaacaggtacagcaaatcctaaagtcacttttaagatgtcagaaataatgattgatgctgaaggaaggatcatagatgtcatagataaggaactaattcaaccttttgagattctatttgaaggagttgaatatattgccagagctggatggactcctgagggaaaatatgcttggtccatcctactagatcgctcccagactcgcctacagatagtgttgatctcacctgaattatttatcccagtagaagatgatgttatggaaaggcagagactcattgagtcagtgcctgattctgtgacgccactaattatctatgaagaaacaacagacatctggataaatatccatgacatctttcatgtttttccccaaagtcacgaagaggaaattgagtttatttttgcctctgaatgcaaaacaggtttccgtcatttatacaaaattacatctattttaaaggaaagcaaatataaacgatccagtggtgggctgcctgctccaagtgatttcaagtgtcctatcaaagaggagatagcaattaccagtggtgaatgggaagttcttggccggcatggatctaatatccaagttgatgaagtcagaaggctggtatattttgaaggcaccaaagactcccctttagagcatcacctgtacgtagtcagttacgtaaatcctggagaggtgacaaggctgactgaccgtggctactcacattcttgctgcatcagtcagcactgtgacttctttataagtaagtatagtaaccagaagaatccacactgtgtgtccctttacaagctatcaagtcctgaagatgacccaacttgcaaaacaaaggaattttgggccaccattttggattcagcaggtcctcttcctgactatactcctccagaaattttctcttttgaaagtactactggatttacattgtatgggatgctctacaagcctcatgatctacagcctggaaagaaatatcctactgtgctgttcatatatggtggtcctcaggtgcagttggtgaataatcggtttaaaggagtcaagtatttccgcttgaataccctagcctctctaggttatgtggttgtagtgatagacaacaggggatcctgtcaccgagggcttaaatttgaaggcgcctttaaatataaaatgggtcaaatagaaattgacgatcaggtggaaggactccaatatctagcttctcgatatgatttcattgacttagatcgtgtgggcatccacggctggtcctatggaggatacctctccctgatggcattaatgcagaggtcagatatcttcagggttgctattgctggggccccagtcactctgtggatcttctatgatacaggatacacggaacgttatatgggtcaccctgaccagaatgaacagggctattacttaggatctgtggccatgcaagcagaaaagttcccctctgaaccaaatcgtttactgctcttacatggtttcctggatgagaatgtccattttgcacataccagtatattactgagttttttagtgagggctggaaagccatatgatttacagatctatcctcaggagagacacagcataagagttcctgaatcgggagaacattatgaactgcatcttttgcactaccttcaagaaaaccttggatcacgtattgctgctctaaaagtgatataattttgacctgtgtagaactctctggtatacactggctatttaaccaaatgaggaggtttaatcaacagaaaacacagaattgatcatcacattttgatacctgccatgtaacatctactcctgaaaataaatgtggtgccatgc

SEQ ID NO: 24742 - protein, 898 aa, Homo sapiens; identical to SEQ ID NO: 3301

SEQ ID NO: 24743 - DNA, 706 bp, Homo sapiens
cccacagccagttctttgaccttatgttgtattctcatggtcaaatagaaattgacgatcaggtggaaggactccaatatctagcttctcgatatgatttcattgacttagatcgtgtgggcatccacggctggtcctatggaggatacctctccctgatggcattaatgcagaggtcagatatcttcagggttgctattgctggggccccagtcactctgtggatcttctatgatacaggatacacggaacgttatatgggtcaccctgaccagaatgaacagggctattacttaggatctgtggccatgcaagcagaaaagttcccctctgaaccaaatcgtttactgctcttacatggtttcctggatgagaatgtccattttgcacataccagtatattactgagttttttagtgagggctggaaagccatatgatttacaggtgagttactctacattttctagttaaatgcagtcatgattagtgattgattactttgaaatctattagctgtggggtaagtccagatttttagagtgtccaccctctgcttaagagaactaaagtaagaggcatatttagtagtgcctgtagttggataaaaattaagattctgttgcagtcaggctgacatacctgcctatcagattacatgactgtgtgtctgtatctgctttcagtttggaagcatggaaaagatg

SEQ ID NO: 24744 - protein, 149 aa, Homo sapiens
MLYSHGQIEIDDQVEGLQYLASRYDFIDLDRVGIHGWSYGGYLSLMALMQRSDIFRVAIAGAPVTLWIFYDTGYTERYMGHPDQNEQGYYLGSVAMQAEKFPSEPNRLLLLHGFLDENVHFAHTSILLSFLVRAGKPYDLQVSYSTFSS

SEQ ID NO: 24745 - DNA, 742 bp, Homo sapiens
ctagttggaaggctgaggcaggagaatcgcttgagtgcaggaagtctaggctgcaaatgaattatgatcacatcactgcactacagcctggctgaaacagtgatactctggctcaaaaaaaaccaataaataaataaataaataaattgcatttacttcttctgaagtagtacttgtctttcattcatgtgtttatcttgccccacaaatttaaactttaatccaccacctgcaaagagtgatgggcatttatacagagcttagattgatagggaaaaggaaggaagtctaccctgtgttttattctcagtaccaattcagtgaattctttaaagaaaaaaaaattgcgtttttgaagtaccttgcatttgtttcagctgtcacttggatgatcacattcatgagatctctaggaactccatcctgtatgtgtgtgacacatatagttgaggtatgctgccaggatttagtgaaggcctaactaaatgtggtttcctcaaattgacaggaagatttattgaaggattatgtttactggctactgtaaaaatcacttgtagtctctaaagtgattaaggagacataatgaagatccagatcccaggtttgtttttgttagtaaaaactttagagtatctgctgggcatggtagctcaaacttgtagtcccaacactttgggaggccagtacaagaggattgctttagcccaggagtttgaggtcagcctgggtaacataggga

SEQ ID NO: 24746 - protein, 51 aa, Homo sapiens [sequence omitted]

SEQ ID NO: 24747 - DNA, 561 bp, Homo sapiens
gcgttcgccgcctgggttgtcaccggcgccgccgccgaggaagccactgcaaccaggaccggagtggaggcggcgcagcatgaagcggcgcaggcccgctccatagcgcacgtcgggacggtccgggcggggccggggggaaggaaaatgcaacatggcagcagcaatggaaacagaacagctgggtgttgagatatttgaaactgcggactgtgaggagaatattgaatcacaggatcggcctaaattggagcctttttatgttgagcggtattcctggagtcagcttaaaaagctgcttgccgataccagaaaatatcatggctacatgatggctaaggcaccacatgatttcatgtttgtgaagaggaatgatccagatggacctcattcagacagaatctattaccttggtaacaagtcattaattgatcatgatcgtttttcaaaatcgaagatgccagaaattgcttcttcctaaagctagcttgaaatgcctttctttagatggtctgattaggaaaacaaacaataaaaccattagtttgttcccactcaaca

SEQ ID NO: 24748 - protein, 108 aa, Homo sapiens
MAAAMETEQLGVEIFETADCEENIESQDRPKLEPFYVERYSWSQLKKLLADTRKYHGYMMAKAPHDFMFVKRNDPDGPHSDRIYYLGNKSLIDHDRFSKSKMPEIASS

SEQ ID NO: 24749 - DNA, 1237 bp, Homo sapiens
gtcactgcgcaggcgcggcccgcgagcgtggggtatctcgaggtgccgggttgcaggcgctcaggagcgctagggtttgaggcctgctttctgctcgcgccagcagagcactacctgaggcagcgaggcgcagcgagcctagcctccccgcgccctgggcagtgtggccatggagaatcaggtgttgacgccgcatgtctactgggctcagcgacaccgcgagctatatctgcgcgtggagctgagtgacgtacagaaccctgccatcagcatcactgaaaacgtgctgcatttcaaagctcaaggacatggtgccaaaggagacaatgtctatgaatttcacctggagttcttagaccttgtgaaaccagagcctgtttacaaactgacccagaggcaggtaaacattacagtacagaagaaagtgagtcagtggtgggagagactcacaaagcaggaaaagcgaccactgtttttggctcctgactttgatcgttggctggatgaatctgatgcggaaatggagctcagagctaaggaagaagagcgcctaaataaactccgactggaaagcgaaggctctcctgaaactcttacaaacttaaggaaaggatacctgtttatgtataatcttgtgcaattcttgggattctcctggatctttgtcaacctgactgtgcgattctgtatcttgggaaaaggcaatccttttatgacacattccatactgtggctgacatgatgtatttctgccagatgctggcagttgtggaaactatcaatgcagcaattggagtcactacgtcaccggtgctgccttctctgatccagcttcttggaagaaattttattttgtttatcatctttggcaccatggaagaaatgcagaacaaagctgtggttttctttgtgttttatttgtggagtgcaattgaaattttcaggtactctttctacatgctgacgtgcattgacatggattggaaggtgctcacatggcttcgttacactctgtggattcccttatatccactgggatgtttggcggaagctgtctcagtgattcagtccattccaatattcaatgagaccggacgattcagtttcacattgccatatccagtgaaaatcaaagttagattttccttttttcttcagatttatcttataatgatatttttaggtttatacataaattttcgtcacctttataaacagcgcagacggcgctatggac

SEQ ID NO: 24750 - protein, 190 aa, Homo sapiens
MENQVLTPHVYWAQRHRELYLRVELSDVQNPAISITENVLHFKAQGHGAKGDNVYEFHLEFLDLVKPEPVYKLTQRQVNITVQKKVSQWWERLTKQEKRPLFLAPDFDRWLDESDAEMELRAKEEERLNKLRLESEGSPETLTNLRKGYLFMYNLVQFLGFSWIFVNLTVRFCILGKGNPFMTHSILWLT

SEQ ID NO: 24751 - DNA, 1397 bp, Homo sapiens
gtcactgcgcaggcgcggcccgcgagcgtggggtatctcgaggtgccgggttgcaggcgctcaggagcgctagggtttgaggcctgctttctgctcgcgccagcagagcactacctgaggcagcgaggcgcagcgagcctagcctccccgcgccctgggcagtgtggccatggagaatcaggtgttgacgccgcatgtctactgggctcagcgacaccgcgagctatatctgcgcgtggagctgagtgacgtacagaaccctgccatcagcatcactgaaaacgtgctgcatttcaaagctcaaggacatggtgccaaaggagacaatgtctatgaatttcacctggagttcttagaccttgtgaaaccagagcctgtttacaaactgacccagaggcaggtaaacattacagtacagaagaaagtgagtcagtggtgggagagactcacaaagcaggaaaagcgaccactgtttttggctcctgactttgatcgttggctggatgaatctgatgcggaaatggagctcagagctaaggaagaagagcgcctaaataaactccgactggaaagcgaaggctctcctgaaactcttacaaacttaaggaaaggatacctgtttatgtataatcttgtgcaattcttgggattctcctggatctttgtcaacctgactgtgcgattctgtatcttgggaaaaggcaatccttttatgacacattccatactgtggctgacatgatgtatttctgccagatgctggcagttgtggaaactatcaatgcagcaattggagtcactacgtcaccggtgctgccttctctgatccagcttcttggaagaaattttattttgtttatcatctttggcaccatggaagaaatgcagaacaaagctgtggttttctttgtgttttatttgtggagtgcaattgaaattttcaggtactctttctacatgctgacgtgcattgacatggattggaaggtgctcacatggcttcgttacactctgtggattcccttatatccactgggatgtttggcggaagctgtctcagtgattcagtccattccaatattcaatgagaccggacgattcagtttcacattgccatatccagtgaaaatcaaagttagattttccttttttcttcagatttatcttataatgatatttttaggtttatacataaattttcgtcacctttataaacagcgcagacggcgctatggacaaaaaaagaaaaagatccactaaaaagaaagatttagatggcttcttgccagtttgagcctaatctgattcttacagttttaccttcttgaaccaatgtaaaagtttttttaatgttaaatgattaaattctcagtgaggctatcttccttttccccagt

SEQ ID NO: 24752 - protein, 190 aa, Homo sapiens; identical to SEQ ID NO: 24750

SEQ ID NO: 24753 - DNA, 3236 bp, Homo sapiens
gtcactgcgcaggcgcggcccgcgagcgtggggtatctcgaggtgccgggttgcaggcgctcaggagcgctagggtttgaggcctgctttctgctcgcgccagcagagcactacctgaggcagcgaggcgcagcgagcctagcctccccgcgccctgggcagtgtggccatggagaatcaggtgttgacgccgcatgtctactgggctcagcgacaccgcgagctatatctgcgcgtggagctgagtgacgtacagaaccctgccatcagcatcactgaaaacgtgctgcatttcaaagctcaaggacatggtgccaaaggagacaatgtctatgaatttcacctggagttcttagaccttgtgaaaccagagcctgtttacaaactgacccagaggcaggtaaacattacagtacagaagaaagtgagtcagtggtgggagagactcacaaagcaggaaaagcgaccactgtttttggctcctgactttgatcgttggctggatgaatctgatgcggaaatggagctcagagctaaggaagaagagcgcctaaataaactccgactggaaagcgaaggctctcctgaaactcttacaaacttaaggaaaggatacctgtttatgtataatcttgtgcaattcttgggattctcctggatctttgtcaacctgactgtgcgattctgtatcttgggaaaaggcaatccttttatgacacattccatactgtggctgacatgatgtatttctgccagatgctggcagttgtggaaactatcaatgcagcaattggagtcactacgtcaccggtgctgccttctctgatccagcttcttggaagaaattttattttgtttatcatctttggcaccatggaagaaatgcagaacaaagctgtggttttctttgtgttttatttgtggagtgcaattgaaattttcaggtactctttctacatgctgacgtgcattgacatggattggaaggtgctcacatggcttcgttacactctgtggattcccttatatccactgggatgtttggcggaagctgtctcagtgattcagtccattccaatattcaatgagaccggacgattcagtttcacattgccatatccagtgaaaatcaaagttagattttccttttttcttcagatttatcttataatgatatttttaggtttatacataaattttcgtcacctttataaacagcgcagacggcgctatggacaaaaaaagaaaaagatccactaaaaagaaagatttagatggcttcttgccagtttgagcctaatctgattcttacagttttaccttcttgaaccaatgtaaaagtttttttaatgttaaatgattaaattctcagtgaggctatcttccttttccccagtaacattcctgaatttactgttatcttattgtagtacttgcatgacatggattcctgatatctgatgagaggttcattcttgtgtattcagttaatgacaccaaaaggctcagcccaccccaaccctatctcatgttcagtctgtctaatacatgccagagatttttttttcaaaaagtgctttatccctacaatgtactgacagttcttacagttgagatttgttcttttcagctattgcttgtgaaaaaaagcaagactatgtcactctatagaaggctgttaaagtgactcaggcaggaattaattattctgtacctaaggggttacttgtttaatgggatggcattgactttttgaaaatcaagtggactgagtcattgataaaacatttctaagagtggggctagagaacatactttacatctgacatcctttggcctaacaacatctattattatagtgctcagcagtgtgggcattgaagaggcgcagaatgctttgaaagaaactaatcagaatcttggaacatcatgatcatgccattcttaagtaaatcaactattttcaacactgaagaaaaatgaaacattatttagaaaacaatgagattacaagttccaaactcagccaggaatgtggctcacacctgtaatcccagcactttgggacacctaggtgggagcatcgcttgaagccaggagttcaagaccagcttgggcaacgtagtgagacccctatctctacaaaaaataaaaaaattagctgggtgtgatggcacacacctgttgtcccagctactcaagaagctgagatgggaggatcctgagctcaggaggtcaaggctgcagtgagccgagattgtgccactgcactgcagctggggtgacagtgcaagaccctgtctcaaaccaaaccaaaccacacacacacaaacacacatacacacacacacacacgaggtccaaatggtagcagggatccaaagggaacacagtatgtaggtcaaactggcagtaacagtgtacagcctttgacaaactagaaatattagagtaggccaaacacacctccaaactgtaaggctgtgcacaaacataaaaaatggcagccttccatctcctgcactggctgagtccatttacttgtgtacttgttctagtgagtggtgggactgtacatttttgaatagacctcaaaaatacttcattctgctgctgttcagttggctttttaaacctgtctgcagtaggacactgaaaacagcaagaacttcggggtgaacacccgctgatcctttaacaaggatttctggcaggaaactcacaaaaaggagaactgaaaatttagacatacagttggccattgtaaaaaacatcagtttcctctcatacattccaagtaaaccaagtaaaataagtgttggagtaacacttgcataaaagaatttaaggagtgatagctctttctgttctgccattcccaacattcctgggggaaaggagactcaatgagttaatactatttcactgagcccaagatggaaacttggtttgacctaaaacatctgattaatataggctagctgatttcttaaaaattcgttgcattgaaggatattttgcatgtctgtaacacctgtcaatacttgtttgtattgatttctgatattcttgcagctgactacgtgtaattgggcagatcagctttgcagtagattatgctgcatcctcgtggcaaaattctgtattcttagtgattgttacaaacccctttattgctgtctgagaaagtgaaagattgtgtatttctattaaaacatttacaatcaaaattctaa

SEQ ID NO: 24754 - protein, 190 aa, Homo sapiens; identical to SEQ ID NO: 24750

SEQ ID NO: 24755 - DNA, 476 bp, Homo sapiens
gtgccgggttgcaggcgctcaggagcgctagggtttgaggcctgctttctgctcgcgccagcagagcactacctgaggcagcgaggcgcagcgagcctagcctccccgcgccctgggcagtgtggccatggagaatcaggtgttgacgccgcatgtctactgggctcagcgacaccgcgagctatatctgcgcgtggagctgagtgacgtacagaaccctgccatcagcatcactgaaaacgtgctgcatttcaaaggtcagtatcccagcaaatgctcccatctctatacacagttaaggaggtgtggtggtggtttcccttttttaaaaaaatgtatttgtcttacttgttttttgctgatgttcacgcctctgatcctcatgaggtaagctaaattgttttgaaatatatgattagaaaagtcaaagaattggtttaaaatcctgtttcccccatggagaggcagtagataca

SEQ ID NO: 24756 - protein, 87 aa, Homo sapiens
MENQVLTPHVYWAQRHRELYLRVELSDVQNPAISITENVLHFKGQYPSKCSHLYTQLRRCGGGFPFLKKCICLTCFLLMFTPLILMR

SEQ ID NO: 24757 - DNA, 8192 bp, Homo sapiens
ggcctgtctgtccagattcttctcagcctctctgtgcagtgttccctcctccagagtatgaggcaagaccctctctggaatgagggtcttaggacccacaatcagattagagtcgtgccttgggcagctgaaaggaaggcagggaaggtcatagagggagattctgttgtctgaggcctaaagtgtcccaacattataacaaaaaactgtaacaagggctgtgggagttataagccagaaaccgttgccgaaaacctatatatacatatacacatatcataatatcacaccaggggtaatatttttttcttgggtttgttatgtctgtatacctattcttcaaggctgggaaaggaagtcctgctgaaaatacatgctggagagcaatgttccttgtatgtttctctgtgggagtaggagcccaggctggtgaggacctggaccaggtatttgtgtgggagcttaggagcattcaggaaggaaaaagggttgaagtcatccagatatgcctcatacacctgtctcctgctgggactattgcttttaatagcttactgctttgctttgctttacagctcttacaaacttaaggaaaggatacctgtttatgtataatcttgtgcaattcttgggattctcctggatctttgtcaacctgactgtgcgattctgtatcttgggaaaaggcaagtaagacatttttggattaattttccctttctcagtagtttggcccagtattcaccaaagggagcactctctgcctttgatgttaataataacccctgcatttgtgcagcaccctctacttttcgttgtgctttcatagctcttatttcccatggccttgtgaaataagctgactggtattctttccatataacaggtaataaaatataggcctagagatggtcaaaaatggttcacatccatagctagccagagccacatcttgggctagaatccttttgtaaaaatgttcactaacaactaaataaattgatgtgatacttccagtgccaaagttatgcaaggccaaaagggttctcacccttttggagcctaaatacgttctaaaatgaactattctaaaacagaataaaaagagcatcataaagatattagttcttcttaaattaatttatgtgtttagcaggattctggctttgaccagtggcattccattggtaaatgccaatgggaaatttttgagaatttgatctaaagtattctgaaactttatttgatgaataaataggtaataaaatttaggagaagaaagattaatgggagaggatttttctacctgataatgaaagtatggaccaggtgtagtagctcatacctgtaatcccagcactttaacaggctgaagtggaaggatctcttgcgcccaggaggttgaagctgcagtaagccgtgatcatgacactgtactctagactgggtgatggagcaagaccttgactcttaaaaaaatttagaaaggtggctgtgcgtggtggctcacgcctgtaatcccagtactttgggaggtctaggtgggcagatcacgaggtcaagagatcgagaccatcctggtcaacatggtgaaacccccatctctactaaaattacaaaaattagctgggcatggtggtgcgtgcctgtagtcccagctactcgggaggctgaggcaggagaatcacttgaacccaggaggcgggggttgcagtgagccaagatcgtgccactgcactgcagcctggtgacagagtaagactccatctcaaaaaaaaaaaagagaaaggcatataaggtgtacgtgttaactttctggtaactggtagagcttactattcatgaccccattggcctgcacccttcctgcttagttaagtaagaaacttgaatctgactggatgtttgttattcctttcttacagttattttcacgaaaggagtaatctagtttgagaaatagttctgttggaatttaccaactgattcacccttaatgtatatttttgcctatagagtccttttatgacacattccatactgtggctgacatgatgtatttctgccagatgctggcagttgtggaaactatcaatgcagcaattggagtcactacgtcaccggtgctgccttctctgatccaggtattgaatagttaagctgaagggtgggtaatggaaggtcccattatttgtctagtgggtatgtgtattagtccattttcatgctgctcataaagacatacctgagactgggcagtttacaaaagaaagaggtttaattggacttacagttccatgtggctgggaaggtctcacgatcatggtggagggcgaaaggcacttcttacgtggtggcggcaagagagaatgaggaagaagcaaaagcagaaactcctgataaacccatcagatctcgtgagacttattcactatcctgagaatagcatgggaaagaccggccgcactgattcatttacctccccctaggtccctgccacaacacgtgggaatcctgggagatacaattaaagttgaaatttgaatggggacacagccaaaccatatcattctagccgtggcccctccaaatctcataccctcacatttcaaaaccaatcatgccttctcaacagtcccccaaagtcttatttcagcattaaccccaaagtccacagtccaaagtctcatctgagacaaggcaagtcccttctgcctttgagcctgtaaaatcaaagcacactagttacttcctagatacaaggggagtactggcattgggtaaatacagccgttccaaatgggagaaattggccaaaataaaggggttacagtgcccatgcaagtctgaaatccagtggggcggtcaaactttaaagctccaaaatgatctcctttgactccaggtctcacatccaggtcacgctgatgcaaaaggtgggttcccatggtcttaggcagctccactcctgtgactttgcagggagcagcctccctcccggctgctttcaccggctggcattgagtgtctgcagcttttccaggtgcatggtgcaagctgtcagtggatctaccactttggggtctggaggatggcggcctcttctcacagctccactaggcagtgccccagtagggattctgtgtgggggctccaaccccatgtttcccttcctcactgccctagcagaggttctccatgagggccccatccctgcagcaaacttttgcctgggcatccaggcatttccatacatcttctgaaatctgggcggaggtttccaaacctcaattcttgacttctctgcacccacaggctcaccaccacgtggaagctgccaaggcttggggcttgcaccctctgaagccacagcctgagctgtacattggcccctctcagccaaggctggagcagctgggacacagggcaccaaatccctaggttgcacacagcacagggaccctgggcctccgcgcctgtgatgggagggactgccatgaaggcctctgacatggtctggttacattttccccatggtcttggggattacattggggattacgttaggctccttgctacttgtgcaaatttctgcagccagcttgaggttctcctcaaaaaatgggtttttcttttctactgaatcatcaggctgcaaattttccaaacttttatgctgtttctcttttaaaacggaatgcttttaacagcacccaagtcacctcttgaatgcttttctgcttagaaatttctcctgccagataccctaaatcatctctctcaagttcagagttctacagatctctagggcaggggcaaaatgctgccagtctctttgctaaaatataacaagagtcacctttgctccagttcacctttgcttccaagaggttcttcatctccatctgagactacctcagcctggactttattgttcatatcactatcagcatttttgtcgaagccattcaacaaatctctacgaggttccaaacttacctacattttcctatcttcttctgagccctccaaactgttccaacctctgtctgttacccagttccaaggtcacttccacattttcgggtatcttttcagcaacatccaactttactggtaccaatttactgtattagtccgttttcccactgctgataaagacatacctgaaaccaggccgtttacaaaagaaagaggtttaattggatttacagttccatgtggcgggggaaggtctcacaattgtggtgcagggcaaaaggcacttcttacatggcggtggcaagagagaatgaggaagaaacaaaagcggaaacccctgataagcccgccagatcttgtgagacttatttactaacatgggaatagcacgggaagaccagcccccatgattcagttacctccccctgggtcccttccacaacatgtgggaattctaggagatacaattcaagctgacatttgaatggggacacagccaaaccatatctgtatgttacattttgctaagaagtctcaattagtaaaaacacctatttgtacaggaatagcattattttacctgaacaagaaagaacatttaaaaccccagggttatttaccaaagtagacttttactatttcaggtctttttcattttttataatatccttatgaaatcacaaagttataaagagctttaagactagggaaatttgactcttaggcaggagctgaaaaacctaccttcagtctccttagttagaaatgtatgtggtctcctcccaccttgtgtagatgaaggcagtacttcttaaaaacttgtattaatgaaaagtacaataatcaaactttaaaatttacagccaggcatggtggctcattcctgtaatccccatactttgggaagctgaggtaggaggattgcttgaggccagcagttggagaccacccttggcagcatagtgagaccccatttctaaaaaaataaaaatttgccaggcatggtgatgtgcacctatattcccactacttgggaggctgagacggaaggattccttgagtgcaggagttcgatgttgcagtgagctgggattgtgccactgccctccaacctgggcagcagagcgagacccctgtctctaaaaaaaataaaaaataaaaatttaatggatagtttgtgttgtagattagacatagctgaagagaaaattagtgaactgttttgagatacaggaaggaatagagagcacaaaaagtaaatatacagacgtaattttcttgaattataagactcaatattataatattgttagttctcatatttccctgtagattcaatacatttccaatcacaatctaaaaaattttggaatgtgaggagaaaattctgaagctttttgaaaaaacagagggccatccaggatagtagcatcattttcgataactaaaatgtgcaagcaacccaagtgttcatctacagatgaatggataagaatgactgttacatacatacaatgggatattatgtagccttaaaaatgaaagaaattctctcgtatgctacaatgtggatgaaccttaaggaaactatgctaagtgaaataagccagtcacagaaagtcaaatactagatgattctgcttacatggggtacttaaaatagtcaaaaccatagagacagaaagtaggatggtgtttgccaggggctggctgaatggggagttattgtttaatgggtcatagtttctttcttttttttttttttgagagtctcgcctgcactccagcctggacgacagagcgagactctgtctcaaaaaaaaaaaaaacaagaccaaaaaacatagatgagtctctggcccgtaactctgagtaagaagtagtcacagaatgatacatatagaatgatttcagaaagttttaaaacaggcaaaatgaaacaatatactgttcaggaatacatacacaagcagtaattcataaagaaaagccatgggccaggcacagtggctcatgcctataatcccagcactctgggaggctgacgcaagaggatcacttgagcccaagagtttgagcaagcttggccaacacagtgagaccccgtctctacaaaaaaataaaattagccagtgtggtagtacacacacctgtgatcccagctacttgagaggctgaagtgggaggattgcttgagcccagaagttcaaggctgcagtgagccatgattgcaccactgcactccagcccgggtgacggagcgagaccccgtctcgataaaaaagaaaagccatggaattattaacacatgatagtagttatttataggggtcccacgtttgtagtgctctatttcttaacttgggttatataaactcaaatgtttatttggcagtattctttagactgcgtttgaacatgtgtctgtattttaaagaaatgatttatgatatagttacacaaaatactgtacctgtctagtcacaaagactggtttgggcactttacttgttccagaactggagcaggattaaactggtcgaggtcaatcttttctatttgccttgcatttagtggggttagatttcagataacacatttctataactttacatatattttattaacttttttctctcttttgggtctttctaatagcttcttggaagaaattttattttgtttatcatctttggcaccatggaagaaatgcagaacaaagctgtggttttctttgtgttttatttgtggagtgcaattgaaattttcaggtgggtagaaatgccaggatggtgtttgaatgctgctccctgtttgcagcagctctgttcttgagggagttgttatcttagccagagtctcatttggtttgggactaagattacatatgtggagaattctggttgcacctatgtgctctgcaaagttgagacagatttttttaaagccgtcattggatcataataccagactggatactagggagcagaagaggagaaccagagaaagggaagactcatcttaccatgacttcaggatcttgcagtcttggaaagagaggacccatccacatggaaaaattcttgaaagggctgaagaaacaggaggttgaaggagcaatccaggttggatagaactaatttaagactaaatttctacaagggatgatagaaatgaatcttataccacaagattattgaagtttgaaatggcctctaacccaattttcccgttctcggttgttagtagcataaatatcttttaagaaatggatctagttaaagtagatgtattcttctttaccagaccatacacactccatatgtcttccctttcagtcagctggagcaaggattttgcaaatgaacttctcagctccaggtttggtggtattttgacaaagttgctagttgagagagagaacaggccatagcagccttaaattgtgtcttaaccatggtctgtgtcccatggcacccagtgtaccctctaatagccttaatacaaaggtaaaacagattataggtcctatgtttttcaaatcagacacgtaatgtgctgatgtaacaaggtttgagggaagcacatctcacacaggagagtgaaaatccagttatcacacttatgagctataaaaggatcagattatgggtccttaatgcaatgtttactgtttgagaaggaacatttattttctcaagggatgtcttttaaaatagcatatgtctgattctagattagaggtcttctgtatactttaattttggtaacaactcacttatccagaaataaagtatctaatatccttacccaccgggaatgtatatcagcactaggaataaagccaaaaaacatctgagtatccagtccgtttaccgaataaagagggttcctttgagacctaaacttagtctgccattaaagagcgttcagatcctttgaaaatttagggcgcagtgtggcaggagtttatgggttgatagccagcgttataattctgttctgaagaagccatgtgtggctgagaaatagaattcttctatttaaatgatattctaaggttgcattcggaacctgaagtggcttttcacattggaatcatttattttcaataggtactctttctacatgctgacgtgcattgacatggattggaaggtgctcacatggcttcgttacactctgtggattcccttatatccactgggatg

SEQ ID NO: 24758 - protein, 53 aa, Homo sapiens
MGSYCLMGHSFFLFFFFESLACTPAWTTERDSVSKKKKTRPKNIDESLARNSE

SEQ ID NO: 24759 - DNA, 500 bp, Homo sapiens
tctgctccaagctcactcttgtggctgttgacaggaagcttcagtttcttgccatagcccgtctccatatggctactcatggcatggcttcccccaaagcaattggttagagagagagagcccgaagccacagtgcctaatctcagaagtgacaaatcatcacacagaccaacccagtataacatgggaggggactacacaaaggtatgaaataacaggagatagaggttgttgggatcattgtcacggcttgctaccccagacagtgagaggaagaccacgcaaggtttatacataaattttcgtcacctttataaacagcgcagacggcgctatggacaaaaaaagaaaaagatccactaaaaagaaagatttagatggcttcttgccagtttgagcctaatctgattcttacagttttaccttcttgaaccaatgtaaaagtttttttaatgttaaatgattaaattctcagtgaggctatcttccttttccccagt

SEQ ID NO: 24760 - protein, 43 aa, Homo sapiens
MAWLPPKQLVREREPEATVPNLRSDKSSHRPTQYNMGGDYTKV

SEQ ID NO: 24761 - DNA, 2339 bp, Homo sapiens
tctgctccaagctcactcttgtggctgttgacaggaagcttcagtttcttgccatagcccgtctccatatggctactcatggcatggcttcccccaaagcaattggttagagagagagagcccgaagccacagtgcctaatctcagaagtgacaaatcatcacacagaccaacccagtataacatgggaggggactacacaaaggtatgaaataacaggagatagaggttgttgggatcattgtcacggcttgctaccccagacagtgagaggaagaccacgcaaggtttatacataaattttcgtcacctttataaacagcgcagacggcgctatggacaaaaaaagaaaaagatccactaaaaagaaagatttagatggcttcttgccagtttgagcctaatctgattcttacagttttaccttcttgaaccaatgtaaaagtttttttaatgttaaatgattaaattctcagtgaggctatcttccttttccccagtaacattcctgaatttactgttatcttattgtagtacttgcatgacatggattcctgatatctgatgagaggttcattcttgtgtattcagttaatgacaccaaaaggctcagcccaccccaaccctatctcatgttcagtctgtctaatacatgccagagatttttttttcaaaaagtgctttatccctacaatgtactgacagttcttacagttgagatttgttcttttcagctattgcttgtgaaaaaaagcaagactatgtcactctatagaaggctgttaaagtgactcaggcaggaattaattattctgtacctaaggggttacttgtttaatgggatggcattgactttttgaaaatcaagtggactgagtcattgataaaacatttctaagagtggggctagagaacatactttacatctgacatcctttggcctaacaacatctattattatagtgctcagcagtgtgggcattgaagaggcgcagaatgctttgaaagaaactaatcagaatcttggaacatcatgatcatgccattcttaagtaaatcaactattttcaacactgaagaaaaatgaaacattatttagaaaacaatgagattacaagttccaaactcagccaggaatgtggctcacacctgtaatcccagcactttgggacacctaggtgggagcatcgcttgaagccaggagttcaagaccagcttgggcaacgtagtgagacccctatctctacaaaaaataaaaaaattagctgggtgtgatggcacacacctgttgtcccagctactcaagaagctgagatgggaggatcctgagctcaggaggtcaaggctgcagtgagccgagattgtgccactgcactgcagctggggtgacagtgcaagaccctgtctcaaaccaaaccaaaccacacacacacaaacacacatacacacacacacacacgaggtccaaatggtagcagggatccaaagggaacacagtatgtaggtcaaactggcagtaacagtgtacagcctttgacaaactagaaatattagagtaggccaaacacacctccaaactgtaaggctgtgcacaaacataaaaaatggcagccttccatctcctgcactggctgagtccatttacttgtgtacttgttctagtgagtggtgggactgtacatttttgaatagacctcaaaaatacttcattctgctgctgttcagttggctttttaaacctgtctgcagtaggacactgaaaacagcaagaacttcggggtgaacacccgctgatcctttaacaaggatttctggcaggaaactcacaaaaaggagaactgaaaatttagacatacagttggccattgtaaaaaacatcagtttcctctcatacattccaagtaaaccaagtaaaataagtgttggagtaacacttgcataaaagaatttaaggagtgatagctctttctgttctgccattcccaacattcctgggggaaaggagactcaatgagttaatactatttcactgagcccaagatggaaacttggtttgacctaaaacatctgattaatataggctagctgatttcttaaaaattcgttgcattgaaggatattttgcatgtctgtaacacctgtcaatacttgtttgtattgatttctgatattcttgcagctgactacgtgtaattgggcagatcagctttgcagtagattatgctgcatcctcgtggcaaaattctgtattcttagtgattgttacaaacccctttattgctgtctgagaaagtgaaagattgtgtatttctattaaaacatttacaatcaaaattctaa

SEQ ID NO: 24762 - protein, 52 aa, Homo sapiens
MFSLSNTCQRFFFQKVLYPYNVLTVLTVEICSFQLLLVKKSKTMSLYRRLLK

SEQ ID NO: 24763 - DNA, 1881 bp, Homo sapiens
gtttatacataaattttcgtcacctttataaacagcgcagacggcgctatggacaaaaaaagaaaaagatccactaaaaagaaagatttagatggcttcttgccagtttgagcctaatctgattcttacagttttaccttcttgaaccaatgtaaaagtttttttaatgttaaatgattaaattctcagtgaggctatcttccttttccccagtaacattcctgaatttactgttatcttattgtagtacttgcatgacatggattcctgatatctgatgagaggttcattcttgtgtattcagttaatgacaccaaaaggctcagcccaccccaaccctatctcatgttcagtctgtctaatacatgccagagatttttttttcaaaaagtgctttatccctacaatgtactgacagttcttacagttgagatttgttcttttcagctattgcttgtgaaaaaaagcaagactatgtcactctatagaaggctgttaaagtgactcaggcaggaattaattattctgtacctaaggggttacttgtttaatgggatggcattgactttttgaaaatcaagtggactgagtcattgataaaacatttctaagagtggggctagagaacatactttacatctgacatcctttggcctaacaacatctattattatagtgctcagcagtgtgggcattgaagaggcgcagaatgctttgaaagaaactaatcagaatcttggaacatcatgatcatgccattcttaagtaaatcaactattttcaacactgaagaaaaatgaaacattatttagaaaacaatgagattacaagttccaaactcagccagaagctgagatgggaggatcctgagctcaggaggtcaaggctgcagtgagccgagattgtgccactgcactgcagctggggtgacagtgcaagaccctgtctcaaaccaaaccaaaccacacacacacaaacacacatacacacacacacacacgaggtccaaatggtagcagggatccaaagggaacacagtatgtaggtcaaactggcagtaacagtgtacagcctttgacaaactagaaatattagagtaggccaaacacacctccaaactgtaaggctgtgcacaaacataaaaaatggcagccttccatctcctgcactggctgagtccatttacttgtgtacttgttctagtgagtggtgggactgtacatttttgaatagacctcaaaaatacttcattctgctgctgttcagttggctttttaaacctgtctgcagtaggacactgaaaacagcaagaacttcggggtgaacacccgctgatcctttaacaaggatttctggcaggaaactcacaaaaaggagaactgaaaatttagacatacagttggccattgtaaaaaacatcagtttcctctcatacattccaagtaaaccaagtaaaataagtgttggagtaacacttgcataaaagaatttaaggagtgatagctctttctgttctgccattcccaacattcctgggggaaaggagactcaatgagttaatactatttcactgagcccaagatggaaacttggtttgacctaaaacatctgattaatataggctagctgatttcttaaaaattcgttgcattgaaggatattttgcatgtctgtaacacctgtcaatacttgtttgtattgatttctgatattcttgcagctgactacgtgtaattgggcagatcagctttgcagtagattatgctgcatcctcgtggcaaaattctgtattcttagtgattgttacaaacccctttattgctgtctgagaaagtgaaagattgtgtatttctattaaaacatttacaatcaaaattctaa

SEQ ID NO: 24764 - protein, 32 aa, Homo sapiens
MKHYLENNEITSSKLSQKLRWEDPELRRSRLQ

SEQ ID NO: 24765 - DNA, 1805 bp, Homo sapiens
gtttatacataaattttcgtcacctttataaacagcgcagacggcgctatggacaaaaaaagaaaaagatccactaaaaagaaagatttagatggcttcttgccagtttgagcctaatctgattcttacagttttaccttcttgaaccaatgtaaaagtttttttaatgttaaatgattaaattctcagtgaggctatcttccttttccccagtaacattcctgaatttactgttatcttattgtagtacttgcatgacatggattcctgatatctgatgagaggttcattcttgtgtattcagttaatgacaccaaaaggctcagcccaccccaaccctatctcatgttcagtctgtctaatacatgccagagatttttttttcaaaaagtgctttatccctacaatgtactgacagttcttacagttgagatttgttcttttcagctattgcttgtgaaaaaaagcaagactatgtcactctatagaaggctgttaaagtgactcaggcaggaattaattattctgtacctaaggggttacttgtttaatgggatggcattgactttttgaaaatcaagtggactgagtcattgataaaacatttctaagagtggggctagagaacatactttacatctgacatcctttggcctaacaacatctattattatagtgctcagcagtgtgggcattgaagaggcgcagaatgctttgaaagaaactaatcagaatcttggaacatcatgatcatgccattcttaagtaaatcaactattttcaacactgaagaaaaatgaaacattatttagaaaacaatgagattacaagttccaaactcagccaggaatgtggctcacacctgtaatcccagcactttgggacacctaggtgggagcatcgcttgaagccaggagttcaagaccagcttgggcaacgtagtgagacccctatctctacaaaaaataaaaaaattagctgggtgtgatggcacacacctgttgtcccagctactcaagaagctgagatgggaggatcctgagctcaggaggtcaaggctgcagtgagccgagattgtgccactgcactgcagctggggtgacagtgcaagaccctgtttgttctagtgagtggtgggactgtacatttttgaatagacctcaaaaatacttcattctgctgctgttcagttggctttttaaacctgtctgcagtaggacactgaaaacagcaagaacttcggggtgaacacccgctgatcctttaacaaggatttctggcaggaaactcacaaaaaggagaactgaaaatttagacatacagttggccattgtaaaaaacatcagtttcctctcatacattccaagtaaaccaagtaaaataagtgttggagtaacacttgcataaaagaatttaaggagtgatagctctttctgttctgccattcccaacattcctgggggaaaggagactcaatgagttaatactatttcactgagcccaagatggaaacttggtttgacctaaaacatctgattaatataggctagctgatttcttaaaaattcgttgcattgaaggatattttgcatgtctgtaacacctgtcaatacttgtttgtattgatttctgatattcttgcagctgactacgtgtaattgggcagatcagctttgcagtagattatgctgcatcctcgtggcaaaattctgtattcttagtgattgttacaaacccctttattgctgtctgagaaagtgaaagattgtgtatttctattaaaacatttacaatcaaaattctaa

SEQ ID NO: 24766 - protein, 52 aa, Homo sapiens; identical to SEQ ID NO: 24762

SEQ ID NO: 24767 - DNA, 1066 bp, Homo sapiens
catctctttaaacatttagatccattcttttatattatttcccttttttaccacagaattctaatgttggatttttttttttacccttaatagacagatgtacagaagattttaagaaatgcaaggaaactacctgaaaaaacacagacattctataaggagctgaaccgtttgcgaaaggccgctctagcctttggtttcctggacctgctgaaaggggtggctgacatgctggaaagggaatgcacactgctgcctgagacagcccaccctgatgctgcattccagctgacccatgctgcccagcagctcaagctggccagtaccggcacctctgagtatgccgcttatgaccagaacatcacacctttgcacacggacttctctgggagcagcactgaaagaatttgaaactgacttttggagctttccttcttttttcatttcaactgaaaatgctttaggtaaaaacctttccagtatgttcacctctagaatagccacccaaagaccttcctgaggctgcctcagaagcaccacttgctgttttgaatgactctactagtatgagaaggatgtgaaggtggttggctggttgggctttaacttcctgggattcataatttttaagcttggaagatagctgctgttcccatgatgggcacatttcctgagaagcttgaatgactgatgagcatagagcacccctgccttcctcaggaaacctgaccggcaggggctctctggcttcctgaaagcttcacctcttccctcgtttatatctcaactgtaagggcattttcaagcttctgttcatggaatgagcaactcagactgtctggagcttgctgagtacaaacacaccaccactaagtttcagaactttccttagaacttgggcaaaatgtggtggtaactcttaagtgcttttggtatctcttgagattctaacttttaaagagcaaccattaatgtgtaaaatgattcctattattcaaggtttttttttaatgaaaataaaatatttgattttctagaaaatggtttcactatgaaactaaaggtc

SEQ ID NO: 24768 - protein, 74 aa, Homo sapiens
MLPSSSSWPVPAPLSMPLMTRTSHLCTRTSLGAALKEFETDFWSFPSFFISTENALGKNLSSMFTSRIATQRPS

SEQ ID NO: 24769 - DNA, 2576 bp, Homo sapiens
gtgagtggggaggccgagggcccgggactgcctttcgctgcttgttggggttacaggtgaaggggttatgggtgaagaacaacccagggccagcgcttggccttcccgccaccgtggcggccgccccgcgctgtctgtgaggcgccagttccggggcgctgctcccggcctcccctcgctctgaggctcggggtccccagctccgcgtaaactgcacgatttcgccctctgctcagctcccctctgccccctctttccaagagagacttccagatcccacattttcttgactgatttttaagcatttcttcgtttatagctgtctgtttgcattctgattgggaacactgggatcattttcatcatgccgacagtggtggtaatggatgtatccctttccatgacccgacctgtgtctattgaggggtccgaggaataccagcgtaagcacctagcagcccatggtttaacgatgctgtttgagcacatggccacaaattacaagcttgaatttacagcacttgtggttttttcatcactttgggagttgatggtccccttcacgagagattataataccctacaggaagcactaagtaatatggatgattatgacaaaacctgcttggagtctgcattagttggtgtttgcaatatcgttcagcaagaatggggtggtgcaattccttgccaggttgtcctggtgacagacggctgtcttggcattggtagagggtcactgcgacattccctagccactcaaaatcaacgaagtgagagcaacaggtttccactaccttttcctttcccatctaagttatatatcatgtgcatggcgaatttggaggagctccagagcaccgattccttggaatgccttgaacgtctcatagatttaaacaatggtgaagggcagatttttactattgatggccccctgtgcttgaagaatgtacagtctatgtttggaaaactgatagatttggcatatacgcctttccatgctgttctcaagtgtggccacctaactgctgatgtacaagtcttccccaggccagaaccttttgttgtagatgaagaaattgatcctatccctaaagtcattaacacagatttggaaatagtgggatttattgatatagctgatatttcaagtcccccagttctgtccagacatctggtcttacctatagcacttaacaaagaaggtgatgaggtgggtactggcatcactgatgacaatgaagatgaaaattcagccaatcagattgcaggcaaaatacccaacttttgtgtcctgctccatggtagcctaaaagtggaaggaatggtagcgattgttcaattaggtcctgaatggcatggaatgctctactcccaagctgacagcaagaagaaatcaaacctcatgatgtctctctttgagcctggcccagaacctctcccatggctagggaaaatggcacagttgggtcctatttcagatgctaaagaaaacccttatggcgaggatgacaataagagtccattccccctgcagcccaaaaacaaacgcagttatgcccagaatgtgactgtctggatcaaacccagcggcctgcagacagatgtacagaagattttaagaaatgcaaggaaactacctgaaaaaacacagacattctataaggagctgaaccgtttgcgaaaggccgctctagcctttggtttcctggacctgctgaaaggggtggctgacatgctggaaagggaatgcacactgctgcctgagacagcccaccctgatgctgcattccagctgacccatgctgcccagcagctcaagctggccagtaccggcacctctgagtatgccgcttatgaccagaacatcacacctttgcacacggacttctctgggagcagcactgaaagaatttgaaactgacttttggagctttccttcttttttcatttcaactgaaaatgctttaggtaaaaacctttccagtatgttcacctctagaatagccacccaaagaccttcctgaggctgcctcagaagcaccacttgctgttttgaatgactctactagtatgagaaggatgtgaaggtggttggctggttgggctttaacttcctgggattcataatttttaagcttggaagatagctgctgttcccatgatgggcacatttcctgagaagcttgaatgactgatgagcatagagcacccctgccttcctcaggaaacctgaccggcaggggctctctggcttcctgaaagcttcacctcttccctcgtttatatctcaactgtaagggcattttcaagcttctgttcatggaatgagcaactcagactgtctggagcttgctgagtacaaacacaccaccactaagtttcagaactttccttagaacttgggcaaaatgtggtggtaactcttaagtgcttttggtatctcttgagattctaacttttaaagagcaaccattaatgtgtaaaatgattcctattattcaaggtttttttttaatgaaaataaaatatttgattttctagaaaatggtttcactatgaaactaaaggtc

SEQ ID NO: 24770 - protein, 518 aa, Homo sapiens
MPTVVVMDVSLSMTRPVSIEGSEEYQRKHLAAHGLTMLFEHMATNYKLEFTALVVFSSLWELMVPFTRDYNTLQEALSNMDDYDKTCLESALVGVCNIVQQEWGGAIPCQVVLVTDGCLGIGRGSLRHSLATQNQRSESNRFPLPFPFPSKLYIMCMANLEELQSTDSLECLERLIDLNNGEGQIFTIDGPLCLKNVQSMFGKLIDLAYTPFHAVLKCGHLTADVQVFPRPEPFVVDEEIDPIPKVINTDLEIVGFIDIADISSPPVLSRHLVLPIALNKEGDEVGTGITDDNEDENSANQIAGKIPNFCVLLHGSLKVEGMVAIVQLGPEWHGMLYSQADSKKKSNLMMSLFEPGPEPLPWLGKMAQLGPISDAKENPYGEDDNKSPFPLQPKNKRSYAQNVTVWIKPSGLQTDVQKILRNARKLPEKTQTFYKELNRLRKAALAFGFLDLLKGVADMLERECTLLPETAHPDAAFQLTHAAQQLKLASTGTSEYAAYDQNITPLHTDFSGSSTERI

SEQ ID NO: 24771 - DNA, 2377 bp, Homo sapiens
cttctgtcgcgcggccttatagttccggctgtggcgcgcggacggaaagtttatgccgacggaaagtttatgccgacggactgtgtccggcgatgggcacgggcatttcttcgtttatagctgtctgtttgcattctgattgggaacactgggatcattttcatcatgccgacagtggtggtaatggatgtatccctttccatgacccgacctgtgtctattgaggggtccgaggaataccagcgtaagcacctagcagcccatggtttaacgatgctgtttgagcacatggccacaaattacaagcttgaatttacagcacttgtggttttttcatcactttgggagttgatggtccccttcacgagagattataataccctacaggaagcactaagtaatatggatgattatgacaaaacctgcttggagtctgcattagttggtgtttgcaatatcgttcagcaagaatggggtggtgcaattccttgccaggttgtcctggtgacagacggctgtcttggcattggtagagggtcactgcgacattccctagccactcaaaatcaacgaagtgagagcaacaggtttccactaccttttcctttcccatctaagttatatatcatgtgcatggcgaatttggaggagctccagagcaccgattccttggaatgccttgaacgtctcatagatttaaacaatggtgaagggcagatttttactattgatggccccctgtgcttgaagaatgtacagtctatgtttggaaaactgatagatttggcatatacgcctttccatgctgttctcaagtgtggccacctaactgctgatgtacaagtcttccccaggccagaaccttttgttgtagatgaagaaattgatcctatccctaaagtcattaacacagatttggaaatagtgggatttattgatatagctgatatttcaagtcccccagttctgtccagacatctggtcttacctatagcacttaacaaagaaggtgatgaggtgggtactggcatcactgatgacaatgaagatgaaaattcagccaatcagattgcaggcaaaatacccaacttttgtgtcctgctccatggtagcctaaaagtggaaggaatggtagcgattgttcaattaggtcctgaatggcatggaatgctctactcccaagctgacagcaagaagaaatcaaacctcatgatgtctctctttgagcctggcccagaacctctcccatggctagggaaaatggcacagttgggtcctatttcagatgctaaagaaaacccttatggcgaggatgacaataagagtccattccccctgcagcccaaaaacaaacgcagttatgcccagaatgtgactgtctggatcaaacccagcggcctgcagacagatgtacagaagattttaagaaatgcaaggaaactacctgaaaaaacacagacattctataaggagctgaaccgtttgcgaaaggccgctctagcctttggtttcctggacctgctgaaaggggtggctgacatgctggaaagggaatgcacactgctgcctgagacagcccaccctgatgctgcattccagctgacccatgctgcccagcagctcaagctggccagtaccggcacctctgagtatgccgcttatgaccagaacatcacacctttgcacacggacttctctgggagcagcactgaaagaatttgaaactgacttttggagctttccttcttttttcatttcaactgaaaatgctttaggtaaaaacctttccagtatgttcacctctagaatagccacccaaagaccttcctgaggctgcctcagaagcaccacttgctgttttgaatgactctactagtatgagaaggatgtgaaggtggttggctggttgggctttaacttcctgggattcataatttttaagcttggaagatagctgctgttcccatgatgggcacatttcctgagaagcttgaatgactgatgagcatagagcacccctgccttcctcaggaaacctgaccggcaggggctctctggcttcctgaaagcttcacctcttccctcgtttatatctcaactgtaagggcattttcaagcttctgttcatggaatgagcaactcagactgtctggagcttgctgagtacaaacacaccaccactaagtttcagaactttccttagaacttgggcaaaatgtggtggtaactcttaagtgcttttggtatctcttgagattctaacttttaaagagcaaccattaatgtgtaaaatgattcctattattcaaggtttttttttaatgaaaataaaatatttgattttctagaaaatggtttcactatgaaactaaaggtc

SEQ ID NO: 24772 - protein, 518 aa, Homo sapiens; identical to SEQ ID NO: 24770

SEQ ID NO: 24773 - DNA, 1392 bp, Homo sapiens
gggcggtccttggagagcttcagggtcgcccgggcagggttctggctcatcccggagggacgctagggggcgcggcctctcttcgcgatggccaatccgcggccacccctctcctcccacaaatccccaacttctctcgagccttggctgggtttcctgccgtgtctctctgcattgccctgaatctctccccattctcgggctctttccttccccttctgccccactgacccatgggcctcacctggcccggtgactctgtgtccgcttcacacttttgtcccctcactcccctgggccccgtcggtgcacgagcccaacccttcctgctattttcctcgtcactctttagccccctctctcgtatcctctgaaccggttgacagaatcctcttcctgttctttttaaacgcgcctggcctataccagtattttctagtttaaaggaggactacattaactcttattgttgtgtttctgaaaagtgaaatttaaaaagcagcctgaaaaataaaaatttataatttgcccttgaattggaaggaatggagattagggaaggaaaactactctagaggccatttaaaagtatgtatttattagaacatgcaaattcatgttgtctccatcagtggtcaccttgagggattagacattctaatggaatgtcctggctccaccctccagcatgttctcacccaacaatgacagttgagtggagtgggaagggaagtcattctaaagagtccaaagtcagtagcgccacatctggtttataaagtaagagatccagtgggacaatgctatttttgtatgccaacctagataggattataaagcaagactgatttcttctgtggtttatgaatggatcttaaggtaattacaaaagggaaattccaagaatgcataacacaatgacaacatggtgagaaaagtgcagtactacttccaaggtagctagtgtaaaggacacttgagtttttaaaactgtggttaaatgttttatgtggaatttgatgagtttgtatattaaataccactgcttgctgcttttactagaatcaagttaagggacacgttagaaatagaacagcttaatatcactggcttcagagcaaaatgagctcgggtgactgcagattatgatggtaaatatggctttaattacaaacatgaggaatgattcactgaagatgaaaagataggacggatgtgatatgaaaaaaacccaaacattttggcattgaatgatggctaaggtgttccaagtattccatcttttaagatgaattgcttaattaattgcctcgctaccccaggattctcattctttggaaataatttttattaaatttcaataaactgtgaatcccaatggtattttacttt

SEQ ID NO: 24774 - protein, 46 aa, Homo sapiens
MGLTWPGDSVSASHFCPLTPLGPVGARAQPFLLFSSSLFSPLSRIL

SEQ ID NO: 24775 - DNA, 1779 bp, Homo sapiens
ggtccttggagagcttcagggtcgcccgggcagggttctggctcatcccggagggacgctagggggcgcggcctctcttcgcgatggccaatccgcggccacccctctcctcccacaaatccccaacttctctcgagccttggctgggtttcctgccgtgtctctctgcattgccctgaatctctccccattctcgggctctttccttccccttctgccccactgacccatgggcctcacctggcccggtgactctgtgtccgcttcacacttttgtcccctcactcccctgggccccgtcggtgcacgagcccaacccttcctgctattttcctcgtcactctttagccccctctctcgtatcctctgaaccggttgacagaatcctcttcctgttctttttaaacgcgcctggcctataccagtattttctagtttaaaggaggactacattaactcttattgttgtgtttctgaaaagtgaaatttaaaaagcagcctgaaaaataaaaatttataatttgcccttgaattggaaggaatggagattagggaaggaaaactactctagaggccatttaaaagtatgtatttattagaacatgcaaattcatgttgtctccatcagtggtcaccttgagggattagacattctaatggaatgtcctggctccaccctccagcatgttctcacccaacaatgacagttgagtggagtgggaagggaagtcattctaaagagtccaaagtcagtagcgccacatctggtttataaagtaagagatccagtgggacaatgctatttttgtatgccaacctagataggattataaagcaagactgatttcttctgtggtttatgaatggatcttaaggtaattacaaaagggaaattccaagaatgcataacacaatgacaacatggtgagaaaagtgcagtactacttccaaggtagctagtgtaaaggacacttgagtttttaaaactgtggttaaatgttttatgtggaatttgatgagtttgtatattaaataccactgcttgctgcttttactagaatcaagttaagggacacgttagaaatagaacagcttaatatcactggcttcagagcaaaatgagctcgggtgactgcagattatgatggtaaatatggctttaattacaaacatgaggaatgattcactgaagatgaaaagataggacggatgtgatatgaaaaaaacccaaacattttggcattgaatgatggctaaggtgttccaagtattccatcttttaagatgaattgcttaattaattgcctcgctaccccaggattctcattctttggaaataatttttattaaatttcaataaactgtgaatcccaatggtattttactttacaacatggatgggctcatccttatctttaggtcatttggtcagaatcctcccgagaagactgatgaagagtatggaatcatgttccaattctatattcttaattatccttattcctgatgctactgcattgctgggtttccatagccaaggcctaagaacaggaggagaaggcaatgcttgtgggagggaggtcccaataccaaaattctgggcactaacctggtgtctgcagcccgttcccgttagcctcggggatgtcacctcacccacagcctgggatctgacgttcttcctcagactggagtaaggagtgatggaccgtaaaatgctgtgtaatgataaaaggctgaaatatccactgaatgattaaaaccaactctaataatctg

SEQ ID NO: 24776 - protein, 107 aa, Homo sapiens [sequence omitted]

SEQ ID NO: 24777 - DNA, 5582 bp, Homo sapiens
gcccgggcagggttctggctcatcccggagggacgctagggggcgcggcctctcttcgcgatggccaatccgcggccacccctctcctcccacaaatccccaacttctctcgagccttggctgggtttcctgccgtgtctctctgcattgccctgaatctctccccattctcgggctctttccttccccttctgccccactgacccatgggcctcacctggcccggtgactctgtgtccgcttcacacttttgtcccctcactcccctgggccccgtcggtgcacgagcccaacccttcctgctattttcctcgtcactctttagccccctctctcgtatcctctgaaccggttgacagaatcctcttcctgttctttttaaactgcaattcctgaactacaaatcctggccgggcgtggtggttcaggcctgtaatcccagcactttgggaggccaaggtgggcggatcgcttcaggtcaggagtttgagaccagcctgggaaacatggtgaaaccccgctctctactaaaatacaaaaattagccgggcatggtaacgagtgcctgtaatcccagctacttgggaggctaacgcacgagaatcttggggggaaaaaccccaaaactgtaattcctggctgaggtatgctttgtatatccttcttagctgacctgagcccaatttacctcaagacttggcctcttggtctcctcagcccaaatgctcactttatttcccctatcccctctttgagggaagcagagggccctcgttcctctcaccctggacaaggcatgcgtgctcagatttccctgtaaggcaacatgggctcttgcctgccactctggccacctggtgtctccattgtagtctgtgcctcagtgaggtccttaagagggcaagaggtgactttctttctaaccatgtagggagccagggaatcccagctagagataggcttagatggatgccagcaggcccctgggtagttacggttcaaagaacaatgtggaaccacataggttacaaagtgagtacagaaaggcctctagaaggcctcaggcatttgcctttttcttttagctgataggatggggcgagattaggagatgggacgaggaaggaggatgctttgaactgaacagacaaatctgtctgacttctcacagcttgttatgtgggagattgtggggccagttgcttgtagttttttcctgtccctgggaatatccctgccagcactggggccagggccctgcagactgccctatttgcttcaaaacttctttccccaacctggctgatctcaccatgtcaagacctagttatgcttgagcaggcattgggctccaggcctctggccgctccagaagggcacttgactgtaaggatgaaatcctgtctctgagctgcactcagtgtgaagtgccaccacctgcatccccctgtctcagggttgtggataccccctggctgggcttcatggagaaatcttctctgatcaccaacctgaatcccagagtagcctccatcttaggacagaatgagaggccttctgtaaccagatataactggccagcatggggaaattgatcaggatggggccgcaagagaggtggttactccggacaaagcggcttcattggagtcgcctcctcttcttactgggaatgttgatcatcggttctacttatcagcaccttaggagaccccggggcctttcctcattgtgggcagcagtctcttctcatcagcctataaaactggccagtcgggacctctccagtgaagagatgatgatgatgagcagcagcccttcaaaacctagctccgaaatggggggtaagatgctggtaccccaagcctcagtgggcagtgatgaagcaacactgagcatgacagtggagaatatccccagtatgcctaaaagaacagccaagatgatcccaacaacaaccaagaataattacagcccaacagcagcaggtacagaaagaaggaaggaagacaccccaacatccagtagaacactgacttactacacctcaacttcaagcagacaaatagtaaaaaagtataccccaacacccaggggagaaatgaagagctacagcccaactcaagtgagggaaaaggtgaagtatactccttccccacgtggtagaagagtaggcacttacgtgccgtccacattcatgacaatggaaacaagccatgcgatcacccccaggacaacagtgaaagacagtgacattacagcaacctataaaatactcgaaaccaactctcttaagagaataatggaggaaaccaccccaaccactctcaagggaatgtttgatagcaccccaacttttctgacacatgaggtagaagcaaacgtcttgacttctccaaggagcgtcatggaaaaaaacaacctgtttccccccagaagagtggaaagtaacagctcagcccatccctgggggttagtgggaaagagcaacccgaagactccccagggaacagtcctgttgcataccccagccacctctgaggggcaggtgacaataagcaccatgacaggcagcagcccagcagaaaccaaagccttcactgctgcctggagtcttaggaatccttcacccaggaccagtgtatcagccatcaaaacagccccagccatagtctggaggctggcaaagaaaccttccacagcacccagcacctcaacaacccctacggtcagggcaaagctgaccatgcaggtccatcactgtgtggttgtgaagccaacccccagccatgctcaccactccctccccaagcctcacaacagccctgctcccagaggagctcagtcctagtccctcagtgctgcctcccagcttgccagacctccaccccaagggagagtaccccccagatctgttcagtgtggaggagcggcggcagggctgggtggtcctgcacgtttttggcatgatgtatgtgtttgtggccttggccattgtttgcgacgagtacttcgttccagccctgggtgtcatcacagacaagctgcagatctccgaggatgtggcaggcgccacattcatggctgctggaggctctgctcctgagctcttcacctccctcatcggtgtcttcatttcccacagcaacgtgggcattggtaccattgtgggctctgctgtgttcaacattctctttgtcattggcacttgttccctcttctcccgagagatcctcaacctcacctggtggcccttattccgtgatgtctccttctacatccttgacctgataatgctcatcctcttcttcctggacagcctcattgcctggtgggagagcctgctgctgctgctggcctatgccttctatgtgttcaccatgaagtggaacaagcatatcgaggtctgggtgaaggagcagctcagcaggaggccagtggccaaggtcatggccttagaagacctcagcaagctcccgtccttgctgacccgagggagcagctcgacctctctgcacaacagcaccatccgcagcaccatctaccagctcatgctccacagcctggaccccctgagggaagttcgccttgccaaggagaaggaggaggagagcttgaatcaaggggccagagcccaaccccaggccaaagcagaaagcaaaccagaagaggaggagccagccaagctccctgcggtcacggtcacaccagcccctgttccagacatcaagggagatcagaaggagaatccaggcggtcaggaagatgtggctgaggccgagagcacaggtgaaatgccaggcgaagagggcgaaactgctggtgaaggtgaaactgaagagaaaagtggaggtgaaactcaaccagaaggtgaaggtgaaactgaaacacaaggaaaaggagaagaatgtgaagatgaaaatgaagcagaaggaaaaggagacaatgaaggtgaagatgagggtgaaatccacgcagaagatggtgaaatgaaaggtaatgaaggtgaaactgaaagccaggaactcagtgctgaaaatcacggtgaagccaaaaatgatgagaaaggtgtagaagatggagggggaagtgatggaggggatagcgaagaggaggaagaggaggaggaagagcaggaggaagaggaggaggaggaagagcaggaggaagaggaggaggaggaggaggaagaggaggagaagggaaatgaagagcctctgtccctggactggcctgaaaccaggcagaagcaggccatttacctcttccttctgcccatcgtgttcccactgtggctgacagtccccgacgtccgaaggcaggagtctaggaagttttttgttttcaccttcctgggatctatcatgtggatagccatgttctcatacctcatggtgtggtgggctcaccaggtgagtgaacagcaggaacgaaatcctctaccagcaggtcccaacgacactttccttcaggatcaatctccggtactcagggaatctcgaggatcaagtgaattcgtgcagtttctatgttgtttgtaaaggcttaaaagtagactttttattccagtgaacgcagtgcttctcaagtgtggcttttctgtcatatcctgtagcatggcatagaaggccttggaatcctgcctgattccagctgaacttggcttattagccttatttcctgctttctctgccatgtacccatccctctcacctggtgaaatcctacgcattctgagagccagcttttttcgcctgctctctggcattcaattagtcttcctctgagtacctatagtgtttctgttctgcctggaatactgaactgtaataattgtttactagctttcctctctaaaaggccgagattagggtctatgtcatcctgctcatacttcacctccagcctcttagttcctggcacacagcaagtgtccacattcctggaaatagaaatgctgacatgaacagctctttggaagggcagttcttgtggggaggtaggggtgttaagagttggaatgacagtgagcagcagatctggtgtaggtaacttttagtccaattgtgaaaagaagagcaacatggtccctgtggccaggagcaggagtcttgcttgctcttcctctctgtggccatctcagctgtcggtccccctatcacccttcctcactcaggctgagggggtgtggctgagctccttagaaggcagtctgtttgcacaaagtaggatgtggatagtgcttggatgtgcctcaggtttttcacctactgttgaccgttgccgtttaccaggttggtgaaacaatagggatttctgaagagatcatgggcctgacaatccttgcagcaggcacatcaattcctgacctcatcaccagtgtgattgtcgctcgaaaaggcctgggagacatggctgtgtcaagctctgtgggcagtaacatatttgatatcactgtggggtgagtggcaatgtaactttctaaggggtgttaagtatgactggaaaacactgcattggctctgttcactggttttctgctttattcattatacatagaataaaagggcatttatattgtt

SEQ ID NO: 24778 - protein, 583 aa, Homo sapiens
MLTTPSPSLTTALLPEELSPSPSVLPPSLPDLHPKGEYPPDLFSVEERRQGWVVLHVFGMMYVFVALAIVCDEYFVPALGVITDKLQISEDVAGATFMAAGGSAPELFTSLIGVFISHSNVGIGTIVGSAVFNILFVIGTCSLFSREILNLTWWPLFRDVSFYILDLIMLILFFLDSLIAWWESLLLLLAYAFYVFTMKWNKHIEVWVKEQLSRRPVAKVMALEDLSKLPSLLTRGSSSTSLHNSTIRSTIYQLMLHSLDPLREVRLAKEKEEESLNQGARAQPQAKAESKPEEEEPAKLPAVTVTPAPVPDIKGDQKENPGGQEDVAEAESTGEMPGEEGETAGEGETEEKSGGETQPEGEGETETQGKGEECEDENEAEGKGDNEGEDEGEIHAEDGEMKGNEGETESQELSAENHGEAKNDEKGVEDGGGSDGGDSEEEEEEEEEQEEEEEEEEQEEEEEEEEEEEEKGNEEPLSLDWPETRQKQAIYLFLLPIVFPLWLTVPDVRRQESRKFFVFTFLGSIMWIAMFSYLMVWWAHQVSEQQERNPLPAGPNDTFLQDQSPVLRESRGSSEFVQFLCCL

SEQ ID NO: 24779 - DNA, 711 bp, Homo sapiens
gagatacagatgggcacactcacctgccttcggacgtcggggactgtcagccacagtgggaacacgatgggcagaaggaagagagatggtctcgctctgtcaccaggctggagtgcagtggcacgatcttggcttactgcaatctctgcctcccaggttcaagcgattctcctgcctcagcctcccaagtagctgggactacaggcctaaaggaaatccttggtgtagagggcactaatggatctccccagagcaggctgggacatcccaagatacctgaggagttggtgccctgagccccccgcgcctccagcccatgacttggagctgatcaaagtgggagtaggagtacctgggtgcatgatgctttgggttactttcatctgaaatagcagttaatcctcacagcctcacctctaccctgcttcaccttgagtggcctggaacagtaagaaggtcacgagctccctctgctgaagcccacagaagggcccacccactgtggaagagctggcttcatctctgagtatgctggggtcactctggatgttggaagcctgggatcaggacctgaggtctgctagttacatgtccttgcctttatgctgctgtgggcagaacaaaatctagttctttcccttttcatgccactatgtaacacagtctcaatctggcccagaaagatgaaaaaaggaatataattcacaaagt

SEQ ID NO: 24780 - protein, 60 aa, Homo sapiens
MGTLTCLRTSGTVSHSGNTMGRRKRDGLALSPGWSAVARSWLTAISASQVQAILLPQPPK

SEQ ID NO: 24781 - DNA, 5377 bp, Homo sapiens
cccttcacacccgaccctgccttgaattaggattccataggagagctgggggcaggagaatggggtgttccctgctgtccagcttcagacccactctttgagatattggattctgacaagtttccagagctgagaagacagccagatgtcaaggtctgaagggttgtggataccccctggctgggcttcatggagaaatcttctctgatcaccaacctgaatcccagagtagcctccatcttaggacagaatgagaggccttctgtaaccagatataactggccagcatggggaaattgatcaggatggggccgcaagagaggtggttactccggacaaagcggcttcattggagtcgcctcctcttcttactgggaatgttgatcatcggttctacttatcagcaccttaggagaccccggggcctttcctcattgtgggcagcagtctcttctcatcagcctataaaactggccagtcgggacctctccagtgaagagatgatgatgatgagcagcagcccttcaaaacctagctccgaaatggggggtaagatgctggtaccccaagcctcagtgggcagtgatgaagcaacactgagcatgacagtggagaatatccccagtatgcctaaaagaacagccaagatgatcccaacaacaaccaagaataattacagcccaacagcagcaggtacagaaagaaggaaggaagacaccccaacatccagtagaacactgacttactacacctcaacttcaagcagacaaatagtaaaaaagtataccccaacacccaggggagaaatgaagagctacagcccaactcaagtgagggaaaaggtgaagtatactccttccccacgtggtagaagagtaggcacttacgtgccgtccacattcatgacaatggaaacaagccatgcgatcacccccaggacaacagtgaaagacagtgacattacagcaacctataaaatactcgaaaccaactctcttaagagaataatggaggaaaccaccccaaccactctcaagggaatgtttgatagcaccccaacttttctgacacatgaggtagaagcaaacgtcttgacttctccaaggagcgtcatggaaaaaaacaacctgtttccccccagaagagtggaaagtaacagctcagcccatccctgggggttagtgggaaagagcaacccgaagactccccagggaacagtcctgttgcataccccagccacctctgaggggcaggtgacaataagcaccatgacaggcagcagcccagcagaaaccaaagccttcactgctgcctggagtcttaggaatccttcacccaggaccagtgtatcagccatcaaaacagccccagccatagtctggaggctggcaaagaaaccttccacagcacccagcacctcaacaacccctacggtcagggcaaagctgaccatgcaggtccatcactgtgtggttgtgaagccaacccccagccatgctcaccactccctccccaagcctcacaacagccctgctcccagaggagctcagtcctagtccctcagtgctgcctcccagcttgccagacctccaccccaagggagagtaccccccagatctgttcagtgtggaggagcggcggcagggctgggtggtcctgcacgtttttggcatgatgtatgtgtttgtggccttggccattgtttgcgacgagtacttcgttccagccctgggtgtcatcacagacaagctgcagatctccgaggatgtggcaggcgccacattcatggctgctggaggctctgctcctgagctcttcacctccctcatcggtgtcttcatttcccacagcaacgtgggcattggtaccattgtgggctctgctgtgttcaacattctctttgtcattggcacttgttccctcttctcccgagagatcctcaacctcacctggtggcccttattccgtgatgtctccttctacatccttgacctgataatgctcatcctcttcttcctggacagcctcattgcctggtgggagagcctgctgctgctgctggcctatgccttctatgtgttcaccatgaagtggaacaagcatatcgaggtctgggtgaaggagcagctcagcaggaggccagtggccaaggtcatggccttagaagacctcagcaagccgggcgatggggccattgcggtggatgagctacaggataacaagaagctgaagctcccgtccttgctgacccgagggagcagctcgacctctctgcacaacagcaccatccgcagcaccatctaccagctcatgctccacagcctggaccccctgagggaagttcgccttgccaaggagaaggaggaggagagcttgaatcaaggggccagagcccaaccccaggccaaagcagaaagcaaaccagaagaggaggagccagccaagctccctgcggtcacggtcacaccagcccctgttccagacatcaagggagatcagaaggagaatccaggcggtcaggaagatgtggctgaggccgagagcacaggtgaaatgccaggcgaagagggcgaaactgctggtgaaggtgaaactgaagagaaaagtggaggtgaaactcaaccagaaggtgaaggtgaaactgaaacacaaggaaaaggagaagaatgtgaagatgaaaatgaagcagaaggaaaaggagacaatgaaggtgaagatgagggtgaaatccacgcagaagatggtgaaatgaaaggtaatgaaggtgaaactgaaagccaggaactcagtgctgaaaatcacggtgaagccaaaaatgatgagaaaggtgtagaagatggagggggaagtgatggaggggatagcgaagaggaggaagaggaggaggaagagcaggaggaagaggaggaggaggaagagcaggaggaagaggaggaggaggaggaggaagaggaggagaagggaaatgaagagcctctgtccctggactggcctgaaaccaggcagaagcaggccatttacctcttccttctgcccatcgtgttcccactgtggctgacagtccccgacgtccgaaggcaggagtctaggaagttttttgttttcaccttcctgggatctatcatgtggatagccatgttctcatacctcatggtgtggtgggctcaccaggttggtgaaacaatagggatttctgaagagatcatgggcctgacaatccttgcagcaggcacatcaattcctgacctcatcaccagtgtgattgtcgctcgaaaaggcctgggagacatggctgtgtcaagctctgtgggcagtaacatatttgatatcactgtgggcttgcctgttccttggttgcttttctctcttatcaatggattacagccagttccagtcagcagcaatggcttgttttgtgcaattgttttgctttttctcatgcttctgtttgtgatctcttcaattgcgtcatgtaaatggagaatgaacaagatcctgggcttcacaatgttcctcctttactttgtattcctgataatcagtgtgatgttagaagatcgaatcatatcctgtcctgtatctgtctgaatcagtcactcttgctcacaatgggcatggatcagaagaccatgcagaagttactgtatctcttgtgaccctaatgaaagaatgtatatgatcctggaaagtgaactgggtgacctaggacctctgatatgaatgtgatctgagactaaagtttgtccttggaaacacctgcagctcattgtggattaagaacctcacccctggaggggtggagtttctacccctgactcatgcagacatctattacatggaggcagtagaaggacccctggagccagagggttttctaaatgagataactgggggcaaaggttgggataggcgcagcagctataagacaagctcctacgctcactgttccctgatcattccaaaggctgctggcccaaaagatgcagatgtggtctacatctcagccttcctgacctctgccccaaacacacgctgcaattttgtctcctccttttctgttcaaattgtgaggttctatcaggtttgtaatcactgtagcttcagttattggtgagtctaaggatccaaggctacagaaaaaaaagaaatataacaggaattaatgatcattccacgttttgtagcccactgcatctggatatataccagtattttctttttttttttttttgagacagagtttggctcttgttgcccaggctggtgtgcaatggcgtgatctcggcacaccacaaccttcacctccccggttcaagcaattctcctgcctcagcctgaagtcgtgatctgcccgcctcggcctcccaaagtgctgggattacaggcgtcagccaccgcgcctggcctataccagtattttctagtttaaaggaggactacattaactcttattgttgtgtttctgaaaagtgaaatttaaaaagcagcctgaaaaataaaaatttataatttgcccttgaattggaaggaatggagattagggaaggaaaactactctagaggccatttaaaagtatgtatttattagaacatgcaaattcatgttgtctccatcagtggtcaccttgagggattagacattctaatggaatgtcctggctccaccctccagcatgttctcacccaacaatgacagttgagtggagtgggaagggaagtcattctaaagagtccaaagtcagtagcgccacatctggtttataaagtaagagatccagtgggacaatgctatttttgtatgccaacctagataggattataaagcaagactgatttcttctgtggtttatgaatggatcttaaggtaattacaaaagggaaattccaagaatgcataacacaatgacaacatggtgagaaaagtgcagtactacttccaaggtagctagtgtaaaggacacttgagtttttaaaactgtggttaaatgttttatgtggaatttgatgagtttgtatattaaataccactgcttgctgcttttactagaatcaagttaagggacacgttagaaatagaacagcttaatatcactggcttcagagcaaaatgagctcgggtgactgcagattatgatggtaaatatggctttaattacaaacatgaggaatgattcactgaagatgaaaagataggacggatgtgatatgaaaaaaacccaaacattttggcattgaatgatggctaaggtgttccaagtattccatcttttaagatgaattgcttaattaattgcctcgctaccccaggattctcattctttggaaataatttttattaaatttcaataaactgtgaatcccaatggtattttacttt

SEQ ID NO: 24782 - protein, 697 aa, Homo sapiens
MLTTPSPSLTTALLPEELSPSPSVLPPSLPDLHPKGEYPPDLFSVEERRQGWVVLHVFGMMYVFVALAIVCDEYFVPALGVITDKLQISEDVAGATFMAAGGSAPELFTSLIGVFISHSNVGIGTIVGSAVFNILFVIGTCSLFSREILNLTWWPLFRDVSFYILDLIMLILFFLDSLIAWWESLLLLLAYAFYVFTMKWNKHIEVWVKEQLSRRPVAKVMALEDLSKPGDGAIAVDELQDNKKLKLPSLLTRGSSSTSLHNSTIRSTIYQLMLHSLDPLREVRLAKEKEEESLNQGARAQPQAKAESKPEEEEPAKLPAVTVTPAPVPDIKGDQKENPGGQEDVAEAESTGEMPGEEGETAGEGETEEKSGGETQPEGEGETETQGKGEECEDENEAEGKGDNEGEDEGEIHAEDGEMKGNEGETESQELSAENHGEAKNDEKGVEDGGGSDGGDSEEEEEEEEEQEEEEEEEEQEEEEEEEEEEEEKGNEEPLSLDWPETRQKQAIYLFLLPIVFPLWLTVPDVRRQESRKFFVFTFLGSIMWIAMFSYLMVWWAHQVGETIGISEEIMGLTILAAGTSIPDLITSVIVARKGLGDMAVSSSVGSNIFDITVGLPVPWLLFSLINGLQPVPVSSNGLFCAIVLLFLMLLFVISSIASCKWRMNKILGFTMFLLYFVFLIISVMLEDRIISCPVSV

SEQ ID NO: 24783 - DNA, 5768 bp, Homo sapiens
cccttcacacccgaccctgccttgaattaggattccataggagagctgggggcaggagaatggggtgttccctgctgtccagcttcagacccactctttgagatattggattctgacaagtttccagagctgagaagacagccagatgtcaaggtctgaagggttgtggataccccctggctgggcttcatggagaaatcttctctgatcaccaacctgaatcccagagtagcctccatcttaggacagaatgagaggccttctgtaaccagatataactggccagcatggggaaattgatcaggatggggccgcaagagaggtggttactccggacaaagcggcttcattggagtcgcctcctcttcttactgggaatgttgatcatcggttctacttatcagcaccttaggagaccccggggcctttcctcattgtgggcagcagtctcttctcatcagcctataaaactggccagtcgggacctctccagtgaagagatgatgatgatgagcagcagcccttcaaaacctagctccgaaatggggggtaagatgctggtaccccaagcctcagtgggcagtgatgaagcaacactgagcatgacagtggagaatatccccagtatgcctaaaagaacagccaagatgatcccaacaacaaccaagaataattacagcccaacagcagcaggtacagaaagaaggaaggaagacaccccaacatccagtagaacactgacttactacacctcaacttcaagcagacaaatagtaaaaaagtataccccaacacccaggggagaaatgaagagctacagcccaactcaagtgagggaaaaggtgaagtatactccttccccacgtggtagaagagtaggcacttacgtgccgtccacattcatgacaatggaaacaagccatgcgatcacccccaggacaacagtgaaagacagtgacattacagcaacctataaaatactcgaaaccaactctcttaagagaataatggaggaaaccaccccaaccactctcaagggaatgtttgatagcaccccaacttttctgacacatgaggtagaagcaaacgtcttgacttctccaaggagcgtcatggaaaaaaacaacctgtttccccccagaagagtggaaagtaacagctcagcccatccctgggggttagtgggaaagagcaacccgaagactccccagggaacagtcctgttgcataccccagccacctctgaggggcaggtgacaataagcaccatgacaggcagcagcccagcagaaaccaaagccttcactgctgcctggagtcttaggaatccttcacccaggaccagtgtatcagccatcaaaacagccccagccatagtctggaggctggcaaagaaaccttccacagcacccagcacctcaacaacccctacggtcagggcaaagctgaccatgcaggtccatcactgtgtggttgtgaagccaacccccagccatgctcaccactccctccccaagcctcacaacagccctgctcccagaggagctcagtcctagtccctcagtgctgcctcccagcttgccagacctccaccccaagggagagtaccccccagatctgttcagtgtggaggagcggcggcagggctgggtggtcctgcacgtttttggcatgatgtatgtgtttgtggccttggccattgtttgcgacgagtacttcgttccagccctgggtgtcatcacagacaagctgcagatctccgaggatgtggcaggcgccacattcatggctgctggaggctctgctcctgagctcttcacctccctcatcggtgtcttcatttcccacagcaacgtgggcattggtaccattgtgggctctgctgtgttcaacattctctttgtcattggcacttgttccctcttctcccgagagatcctcaacctcacctggtggcccttattccgtgatgtctccttctacatccttgacctgataatgctcatcctcttcttcctggacagcctcattgcctggtgggagagcctgctgctgctgctggcctatgccttctatgtgttcaccatgaagtggaacaagcatatcgaggtctgggtgaaggagcagctcagcaggaggccagtggccaaggtcatggccttagaagacctcagcaagccgggcgatggggccattgcggtggatgagctacaggataacaagaagctgaagctcccgtccttgctgacccgagggagcagctcgacctctctgcacaacagcaccatccgcagcaccatctaccagctcatgctccacagcctggaccccctgagggaagttcgccttgccaaggagaaggaggaggagagcttgaatcaaggggccagagcccaaccccaggccaaagcagaaagcaaaccagaagaggaggagccagccaagctccctgcggtcacggtcacaccagcccctgttccagacatcaagggagatcagaaggagaatccaggcggtcaggaagatgtggctgaggccgagagcacaggtgaaatgccaggcgaagagggcgaaactgctggtgaaggtgaaactgaagagaaaagtggaggtgaaactcaaccagaaggtgaaggtgaaactgaaacacaaggaaaaggagaagaatgtgaagatgaaaatgaagcagaaggaaaaggagacaatgaaggtgaagatgagggtgaaatccacgcagaagatggtgaaatgaaaggtaatgaaggtgaaactgaaagccaggaactcagtgctgaaaatcacggtgaagccaaaaatgatgagaaaggtgtagaagatggagggggaagtgatggaggggatagcgaagaggaggaagaggaggaggaagagcaggaggaagaggaggaggaggaagagcaggaggaagaggaggaggaggaggaggaagaggaggagaagggaaatgaagagcctctgtccctggactggcctgaaaccaggcagaagcaggccatttacctcttccttctgcccatcgtgttcccactgtggctgacagtccccgacgtccgaaggcaggagtctaggaagttttttgttttcaccttcctgggatctatcatgtggatagccatgttctcatacctcatggtgtggtgggctcaccaggttggtgaaacaatagggatttctgaagagatcatgggcctgacaatccttgcagcaggcacatcaattcctgacctcatcaccagtgtgattgtcgctcgaaaaggcctgggagacatggctgtgtcaagctctgtgggcagtaacatatttgatatcactgtgggcttgcctgttccttggttgcttttctctcttatcaatggattacagccagttccagtcagcagcaatggcttgttttgtgcaattgttttgctttttctcatgcttctgtttgtgatctcttcaattgcgtcatgtaaatggagaatgaacaagatcctgggcttcacaatgttcctcctttactttgtattcctgataatcagtgtgatgttagaagatcgaatcatatcctgtcctgtatctgtctgaatcagtcactcttgctcacaatgggcatggatcagaagaccatgcagaagttactgtatctcttgtgaccctaatgaaagaatgtatatgatcctggaaagtgaactgggtgacctaggacctctgatatgaatgtgatctgagactaaagtttgtccttggaaacacctgcagctcattgtggattaagaacctcacccctggaggggtggagtttctacccctgactcatgcagacatctattacatggaggcagtagaaggacccctggagccagagggttttctaaatgagataactgggggcaaaggttgggataggcgcagcagctataagacaagctcctacgctcactgttccctgatcattccaaaggctgctggcccaaaagatgcagatgtggtctacatctcagccttcctgacctctgccccaaacacacgctgcaattttgtctcctccttttctgttcaaattgtgaggttctatcaggtttgtaatcactgtagcttcagttattggtgagtctaaggatccaaggctacagaaaaaaaagaaatataacaggaattaatgatcattccacgttttgtagcccactgcatctggatatataccagtattttctttttttttttttttgagacagagtttggctcttgttgcccaggctggtgtgcaatggcgtgatctcggcacaccacaaccttcacctccccggttcaagcaattctcctgcctcagcctgaagtcgtgatctgcccgcctcggcctcccaaagtgctgggattacaggcgtcagccaccgcgcctggcctataccagtattttctagtttaaaggaggactacattaactcttattgttgtgtttctgaaaagtgaaatttaaaaagcagcctgaaaaataaaaatttataatttgcccttgaattggaaggaatggagattagggaaggaaaactactctagaggccatttaaaagtatgtatttattagaacatgcaaattcatgttgtctccatcagtggtcaccttgagggattagacattctaatggaatgtcctggctccaccctccagcatgttctcacccaacaatgacagttgagtggagtgggaagggaagtcattctaaagagtccaaagtcagtagcgccacatctggtttataaagtaagagatccagtgggacaatgctatttttgtatgccaacctagataggattataaagcaagactgatttcttctgtggtttatgaatggatcttaaggtaattacaaaagggaaattccaagaatgcataacacaatgacaacatggtgagaaaagtgcagtactacttccaaggtagctagtgtaaaggacacttgagtttttaaaactgtggttaaatgttttatgtggaatttgatgagtttgtatattaaataccactgcttgctgcttttactagaatcaagttaagggacacgttagaaatagaacagcttaatatcactggcttcagagcaaaatgagctcgggtgactgcagattatgatggtaaatatggctttaattacaaacatgaggaatgattcactgaagatgaaaagataggacggatgtgatatgaaaaaaacccaaacattttggcattgaatgatggctaaggtgttccaagtattccatcttttaagatgaattgcttaattaattgcctcgctaccccaggattctcattctttggaaataatttttattaaatttcaataaactgtgaatcccaatggtattttactttacaacatggatgggctcatccttatctttaggtcatttggtcagaatcctcccgagaagactgatgaagagtatggaatcatgttccaattctatattcttaattatccttattcctgatgctactgcattgctgggtttccatagccaaggcctaagaacaggaggagaaggcaatgcttgtgggagggaggtcccaataccaaaattctgggcactaacctggtgtctgcagcccgttcccgttagcctcggggatgtcacctcacccacagcctgggatctgacgttcttcctcagactggagtaaggagtgatggaccgtaaaatgctgtgtaatgataaaaggctgaaatatccactgaatgattaaaaccaactctaataatctg

SEQ ID NO: 24784 - protein, 697 aa, Homo sapiens; identical to SEQ ID NO: 24782

SEQ ID NO: 24785 - DNA, 793 bp, Homo sapiens
gaaagtaagctacaaagataatatagtccaaggatggcaaaaacatctccctgcaattatttctccattccatgtctatcacagacattaccaatcaatcatggtacttttctacaaagtttgggtcagagtccttctcaattcagtacccaagcaggccatcacttgagcttgtaaaggaaataaatcctatttcttggtcctgagtccaaccatgtcattttaccagagaggaaataggccttgagaagggaaatgacttaccctaaggtcacagccagtcagtgacaatgcagagaatgtaagacagaactttgggaattaggcaccacaactaggcctcgtaggatcagaatccagatgtcacaacccccatggcagccttttcccacactctgcagctgccctctggctgctcagctgactgtcctaactgaaagggcgtggcagggatgatcctacaattccaggtaagatgtatgtcctgtctcatttgcagttcgccttgccaaggagaaggaggaggagagcttgaatcaaggggccagagcccaaccccaggccaaagcagaaagcaaaccagaaggaagatgtggctgaggccgagagcacaggtgaaatgccaggcgaagagggcgaaactgctggtgaaggtgaaactgaagagaaaagtggaggtgaaactcaaccagaaggtgaaggtgaaactgaaacacaaggaaaaggagaagaatgtgaagatgaaaatgaagcagaaggaaaaggagacaatgaaggtgaagatgagggtgaa

SEQ ID NO: 24786 - protein, 112 aa, Homo sapiens
MILQFQVRCMSCLICSSPCQGEGGGELESRGQSPTPGQSRKQTRRKMWLRPRAQVKCQAKRAKLLVKVKLKRKVEVKLNQKVKVKLKHKEKEKNVKMKMKQKEKETMKVKMR

SEQ ID NO: 24787 - DNA, 1209 bp, Homo sapiens
ctcgaaaaggcctgggagacatggctgtgtcaagctctgtgggcagtaacatatttgatatcactgtgggagtttggctcttgttgcccaggctggtgtgcaatggcgtgatctcggcacaccacaaccttcacctccccggttcaagcaattctcctgcctcagcctgaagtcgtgatctgcccgcctcggcctcccaaagtgctgggattacaggcgtcagccaccgcgcctggcctataccagtattttctagtttaaaggaggactacattaactcttattgttgtgtttctgaaaagtgaaatttaaaaagcagcctgaaaaataaaaatttataatttgcccttgaattggaaggaatggagattagggaaggaaaactactctagaggccatttaaaagtatgtatttattagaacatgcaaattcatgttgtctccatcagtggtcaccttgagggattagacattctaatggaatgtcctggctccaccctccagcatgttctcacccaacaatgacagttgagtggagtgggaagggaagtcattctaaagagtccaaagtcagtagcgccacatctggtttataaagtaagagatccagtgggacaatgctatttttgtatgccaacctagataggattataaagcaagactgatttcttctgtggtttatgaatggatcttaaggtaattacaaaagggaaattccaagaatgcataacacaatgacaacatggtgagaaaagtgcagtactacttccaaggtagctagtgtaaaggacacttgagtttttaaaactgtggttaaatgttttatgtggaatttgatgagtttgtatattaaataccactgcttgctgcttttactagaatcaagttaagggacacgttagaaatagaacagcttaatatcactggcttcagagcaaaatgagctcgggtgactgcagattatgatggtaaatatggctttaattacaaacatgaggaatgattcactgaagatgaaaagataggacggatgtgatatgaaaaaaacccaaacattttggcattgaatgatggctaaggtgttccaagtattccatcttttaagatgaattgcttaattaattgcctcgctaccccaggattctcattctttggaaataatttttattaaatttcaataaactgtgaatcccaatggtattttacttt

SEQ ID NO: 24788 - protein, 49 aa, Homo sapiens
MAVSSSVGSNIFDITVGVWLLLPRLVCNGVISAHHNLHLPGSSNSPASA

SEQ ID NO: 24789 - DNA, 1600 bp, Homo sapiens
ctcgaaaaggcctgggagacatggctgtgtcaagctctgtgggcagtaacatatttgatatcactgtgggagtttggctcttgttgcccaggctggtgtgcaatggcgtgatctcggcacaccacaaccttcacctccccggttcaagcaattctcctgcctcagcctgaagtcgtgatctgcccgcctcggcctcccaaagtgctgggattacaggcgtcagccaccgcgcctggcctataccagtattttctagtttaaaggaggactacattaactcttattgttgtgtttctgaaaagtgaaatttaaaaagcagcctgaaaaataaaaatttataatttgcccttgaattggaaggaatggagattagggaaggaaaactactctagaggccatttaaaagtatgtatttattagaacatgcaaattcatgttgtctccatcagtggtcaccttgagggattagacattctaatggaatgtcctggctccaccctccagcatgttctcacccaacaatgacagttgagtggagtgggaagggaagtcattctaaagagtccaaagtcagtagcgccacatctggtttataaagtaagagatccagtgggacaatgctatttttgtatgccaacctagataggattataaagcaagactgatttcttctgtggtttatgaatggatcttaaggtaattacaaaagggaaattccaagaatgcataacacaatgacaacatggtgagaaaagtgcagtactacttccaaggtagctagtgtaaaggacacttgagtttttaaaactgtggttaaatgttttatgtggaatttgatgagtttgtatattaaataccactgcttgctgcttttactagaatcaagttaagggacacgttagaaatagaacagcttaatatcactggcttcagagcaaaatgagctcgggtgactgcagattatgatggtaaatatggctttaattacaaacatgaggaatgattcactgaagatgaaaagataggacggatgtgatatgaaaaaaacccaaacattttggcattgaatgatggctaaggtgttccaagtattccatcttttaagatgaattgcttaattaattgcctcgctaccccaggattctcattctttggaaataatttttattaaatttcaataaactgtgaatcccaatggtattttactttacaacatggatgggctcatccttatctttaggtcatttggtcagaatcctcccgagaagactgatgaagagtatggaatcatgttccaattctatattcttaattatccttattcctgatgctactgcattgctgggtttccatagccaaggcctaagaacaggaggagaaggcaatgcttgtgggagggaggtcccaataccaaaattctgggcactaacctggtgtctgcagcccgttcccgttagcctcggggatgtcacctcacccacagcctgggatctgacgttcttcctcagactggagtaaggagtgatggaccgtaaaatgctgtgtaatgataaaaggctgaaatatccactgaatgattaaaaccaactctaataatctg

SEQ ID NO: 24790 - protein, 49 aa, Homo sapiens; identical to SEQ ID NO: 24788

SEQ ID NO: 24791 - DNA, 480 bp, Homo sapiens
gagtacacacaactgtgatagaccaccaagtacaggggtgatggaatgtcgaaaaacctttggagaaccttatctttaagatgtatttaacttgaaagctgctatttggcactttatctcagagcaagaagagaaagagcaggctgtctctttgagaagacccttgtccttcgtgctaaagttagcatgtgctgcctcttcctgtctggatataagactaagctttatttcaaaactgaaccctctagcagctgcataccagtttaccttaatatccttagtacttggtgtcttaacatcctcatactaccttgctcctttggcctcaaagtaagcatattggctggcttatatttcttaacaaaattagcagtacacaaattgaagaattttcatctttgattacaaaagtctgcgcatgtgcttgtactctgagatggtaatagattcttctgataaagttattgctgcctttccaca

SEQ ID NO: 24792 - protein, 71 aa, Homo sapiens
MCCLFLSGYKTKLYFKTEPSSSCIPVYLNILSTWCLNILILPCSFGLKVSILAGLYFLTKLAVHKLKNFHL

SEQ ID NO: 24793 - DNA, 1279 bp, Homo sapiens
gtagagtccacgacacttggactggaggtatcttggagtcctgagacttagaatcagttcagctgcagaaaacccaccttttgagttcacaccattagtgaatagcaccatgctgaaacatttcacagcttccaactctgggaaataatggagagagtttaaaaatgtaaaacttcagttagtttggggctgaacttgcttacttgaaaaatctggtgctaggcacatatatctgcctctcctttgtaaataccactccaatattattctttactattcagatccaagcttcatgttctacttgttcttcatgttctttaaatcatttgaaagttgtcaactgagagaaacatttcagaggggggaggcttttggcactggtgataaacatccctccaagagaaccgtctggggttctcttctatttgtggttggtggtttttattcttttaaaaacagctttcattgttgtttactttttgtgtaatacaaacaaaatgtaggaatcatagtttattgatttcaaatggctgacaaagaatgagtaaaaccattctttatggttttacgattcagactcatttggaaaagcgaatgtaatttttacctcctctttccaccccaagttttgtttctgcttttggagagggttgtatttcccctacttttaatcccagcactttgggaggctgaagcagggaggattgcttgagtccaggagttcaaaaccagcctgagcaacatagagagaccctgtctctacaaaaaaattttttaaatttgctcggtatggtggctcatgcttggtaatcccagctactcgggaggctgaagcaggaggatcactttgagcctgggggtttggggctgcaatgagctgtgatcatgccattgcactctagcctggattacagagcaagaccctgtctcaaaaaaaaaaaaaaaaaaaaaaaaaaaaaccagaaaatatcaatcatttaaaataactctatacaaacttttcttcaattttctgttaaccatacattttggagaataatggccaatcatgttggagagaaatgcccttttgctacagcatctgtcttttattttcttactcttagttttgtttatatgtttaaatggttgacaataaaccatgtcctgtgctgatgtagcttgtttactacgtcctaccattatgttctaaatggcacagatttgtattccatatcgtatttcaaatattctactttttcctcctagtgttaggtggagaaatatgcagctgttcatc

SEQ ID NO: 24794 - protein, 50 aa, Homo sapiens
MVLRFRLIWKSECNFYLLFPPQVLFLLLERVVFPLLLIPALWEAEAGRIA

SEQ ID NO: 24795 - DNA, 3449 bp, Homo sapiens
agggaaacaatattcttagttattgtctatttaagaccacagaaagctttagacctttttttgtcattatttgtcttattttttgctttcttcattcttggattcctatttctttatctattgcccttaatttatttttagtgctttgtaacttaatatctgtcagttgctgcttaatttctttctcctttctacacagaacattttccttcatctgttcttttgttcgtttacagcccaaaaatatccaatggtccatttattgcaaaaaagtgataactcatttaaccaggaactgttgaaaagtatggtaaaaagcattaaaatgaatgatgtctatggaccaatgagtcagattttagagacactgaataagtgtccacattttaaaagacagaggagtttatacagagaaatactatttctctcacttgtggcactgggaagagaaaacattgatatagatgcttttgataaagagtacaagatggcatacgatcgtctcacacctagtcaagtcaagagtacacacaactgtgatagaccaccaagtacaggggtgatggaatgtcgaaaaacctttggagaaccttatctttaagatgtatttgtatgtgtaaacattcaatgtatattgtatagtcagtgtataaaataacacttttagactctaaatattttttcttcaatttttgaaaatacaatttgtaaatggttcaaaagactcagacagcttatgtacagaatgtttgaagaagagaatagtgacaagtggggagaaagccactttgtttctcatttcttttttcttcttctttaactcccctgtaataggaaataaagtatttttgtgatgaggaaatccctaaacaaaattagttgccataaaatatgacaactgctttatggtttcttttggaagagacagattgaaaaatcatgaatggaatctaaacagaaatgtcagatgaacgtatttcctgttttcatagactattcaaatgttttgaccatgaagttgtattatacatattttaaattgtttatagtaagttgatatttttttaatttttaaatttaatatagcaaacttaaaatgaatttaaacttaagcaagcaagcgtgtattttccttgtctgctgctatttgaagtaattagtacagctgcagatctctctgtgtatatctatctatatatatattttttattacttgggagaatgaattttaaaatgtcagtgctagtgtcaagtgttgtcctaggattgcatgttagtacccctaagcctgagtgtggggagtgagttatgcaagggtagcgtgcactgcccagactgactcatggagccttgtgcaaggagagccagagaggttcactataccatgactccaaaattgtctctattgctaatagatacgtatagtatacagggaaaacagcttataaatccaaatatcaatttaaattttaatattctacatgaaaacttacattgggaaatatgcagacaagtgattatattccaaattttacccttattttaatatctaaaatattgggtatgatgcaaattatactatagaatatttatctgaaatatgacttactggggtattctgttaatactatatataaatattcagaatttttttcaaaagtagaaaaattcccctctaaaagtacagccagatagattttcatccatattgaggaacttagctttttcaacaagcttcagaatctgaagtctgtagaatctaaaatacagaaatatccagaaatcagacaataaattgaaagtttagacatcatgagtattaaatagctttaaaaatatatttttagtcatattatttctaatgtaactttctttgggtaatttctggtaaggaaaaacatcttttggctgctagaattagttatagattttcaatatgtgtgtgtgtttgcacacattatcattagtgaaggaattccctagccagctttaaagaaggaaaaaatggatagtcccaaattaggtgtataaagccagtagagtccacgacacttggactggaggtatcttggagtcctgagacttagaatcagttcagctgcagaaaacccaccttttgagttcacaccattagtgaatagcaccatgctgaaacatttcacagcttccaactctgggaaataatggagagagtttaaaaatgtaaaacttcagttagtttggggctgaacttgcttacttgaaaaatctggtgctaggcacatatatctgcctctcctttgtaaataccactccaatattattctttactattcagatccaagcttcatgttctacttgttcttcatgttctttaaatcatttgaaagttgtcaactgagagaaacatttcagaggggggaggcttttggcactggtgataaacatccctccaagagaaccgtctggggttctcttctatttgtggttggtggtttttattcttttaaaaacagctttcattgttgtttactttttgtgtaatacaaacaaaatgtaggaatcatagtttattgatttcaaatggctgacaaagaatgagtaaaaccattctttatggttttacgattcagactcatttggaaaagcgaatgtaatttttacctcctctttccaccccaagttttgtttctgcttttggagagggttgtatttcccctacttttaatccctagggaatattattgcacagatttagtcttaaaacctaaaacacaaatacaaagtggtaaacctgttcaaaagaaaattaaaatgtgaatcattcttgagctgggcgtggttgctcatggaggcctgtaatcccagcactttgggaggctgaagcagggaggattgcttgagtccaggagttcaaaaccagcctgagcaacatagagagaccctgtctctacaaaaaaattttttaaatttgctcggtatggtggctcatgcttggtaatcccagctactcgggaggctgaagcaggaggatcactttgagcctgggggtttggggctgcaatgagctgtgatcatgccattgcactctagcctggattacagagcaagaccctgtctcaaaaaaaaaaaaaaaaaaaaaaaaaaaaaccagaaaatatcaatcatttaaaataactctatacaaacttttcttcaattttctgttaaccatacattttggagaataatggccaatcatgttggagagaaatgcccttttgctacagcatctgtcttttattttcttactcttagttttgtttatatgtttaaatggttgacaataaaccatgtcctgtgctgatgtagcttgtttactacgtcctaccattatgttctaaatggcacagatttgtattccatatcgtatttcaaatattctactttttcctcctagtgttaggtggagaaatatgcagctgttcatc

SEQ ID NO: 24796 - protein, 116 aa, Homo sapiens
MVHLLQKSDNSFNQELLKSMVKSIKMNDVYGPMSQILETLNKCPHFKRQRSLYREILFLSLVALGRENIDIDAFDKEYKMAYDRLTPSQVKSTHNCDRPPSTGVMECRKTFGEPYL

SEQ ID NO: 24797 - DNA, 5622 bp, Homo sapiens
tgtcagagagtgagagtacaaaaggaagtgctgattgccttcctaagctcagttatcaaaattcttccagtatcgttcgcctcactggtacaagtaacaacagtgctggtaaaatatcaggagaaagcatggaaagcacacctgagctgctcttaatatcatctcttgaagatacaaatgaaacacgaaacattcaaagtagatgcttcaggaaaagacataaaagtgacaatgaaactaatttgcagcagcaagtggtctggggaaatagaaaccgtaatcttagtggaggggtactgatgggatttatgctcaatagaattaaccaggaagcaacccctggagatatagttgaaaaattgggagctgatgcaaaaattctttcaaatgttatctcaaaaagcacgagaccaaatactcttgatattgggaagccacctttaagatcaaaaagagacagtctagaaaaggaatctagtgatgatgatacaccttttgatggttctaactatttggcagataaagtggattctcctgttatttttgacttagaagacttagacagtgaaacagatgtatcaaaagcaggatgtgttgctacacaaaatcccaagaggattcaacgtatgaacagcagcttttcagtaaaaccttttgaaaaaactgatgtcgcaacaggatttgatcccctctctcttttggttgctgagactgaacagcagcaaaaagaagaagaggaggaggatgaagatgatagcaaaagcatttcaacaccatctgctaggcgtgatttagctgaagaaattgtgatgtatatgaataacatgagcagtcctttgacaagtcgtacaccaagcattgatttacaacgggcatgtgatgataaattaaataagaaaagtccaccattggtcaaggcatgcagaagatctagtctgcctcctaattctcctaagccagtgagacttaccaaatctaaaagttacacaaaaagtgaggagaaaccaagggatagactttggtcttctccagccttctcacctacttgcccatttagggaagaatctcaggatacattaacccactcatcaccttcatttaacttagatacactactagtacctaaactagatgttctaagaaacagtatgttcactgctggaaaaggagttgcagagaaagcaagcaaatggtattcaagattcaccatgtacaccacatcatctaaggatcaaagttctgatcgtaccagtctttcttcagtgggagcccaggattctgaatctacctctttaacagatgaagatgtctgccatgagttggaaggacctatctcctctcaagagaccagtgctacttcagggactaagagaattgatctcagccgaataagcctggaaagttctgcatccttggaaggatctctgtcgaagtttgccttacctgggaaatcagaagtgacatcttccttcaacgcgagtaatacaaatatcttccagaactatgcaatggaggttctcatctcaagttgctctcggtgtagaacttgtgattgtcttgtccatgatgaggaaatcatggctggctggacagcagatgattcaaatctcaatactacatgcccattctgtggcaatatcttcttaccctttctgaatatagaaataagagatttaagacgacctggaagatactttctaaagtcaagcccatcaacagaaaatatgcactttccatcctccatttcaagtcagacgaggcagtcttgcatttcaacatcagcctctggtcttgacacatctgctctctctgttcaagggaattttgatctaaatagcaaatctaaactgcaggaaaatttttgcacccgaagtattcagatccctgctaatagatcaaaaacagctatgtctaaatgtccaatatttccaatggccaggagtattagtacttctggccccttggataaggaagatactggaagacagaagctcatttctacaggcagcctgccagctactttacaaggagctacagattctttaggtttagaatggcaccttccaagtcccgatcctgtcactgttccgtatcttagtcctttagtggtatggaaagaacttgaaagcttattggaaaatgaaggtgatcatgcaataacagtagcagactttgtggaccatcatccaattgttttttggaacctggtatggtatttcagacgtcttgacttgcccagtaacttacctggattgattctttcttctgagcactgtaacaagtattcaaagattccccgccactgtatgtctgaagatagcaaatatgttttaatacaaatgttatgggacaatatgaagttacatcaggatccgggacagcccttgtacattctctggaatgcacacacccaaaaatatccaatggtccatttattgcaaaaaagtgataactcatttaaccaggaactgttgaaaagtatggtaaaaagcattaaaatgaatgatgtctatggaccaatgagtcagattttagagacactgaataagtgtccacattttaaaagacagaggagtttatacagagaaatactatttctctcacttgtggcactgggaagagaaaacattgatatagatgcttttgataaagagtacaagatggcatacgatcgtctcacacctagtcaagtcaagagtacacacaactgtgatagaccaccaagtacaggggtgatggaatgtcgaaaaacctttggagaaccttatctttaagatgtatttgtatgtgtaaacattcaatgtatattgtatagtcagtgtataaaataacacttttagactctaaatattttttcttcaatttttgaaaatacaatttgtaaatggttcaaaagactcagacagcttatgtacagaatgtttgaagaagagaatagtgacaagtggggagaaagccactttgtttctcatttcttttttcttcttctttaactcccctgtaataggaaataaagtatttttgtgatgaggaaatccctaaacaaaattagttgccataaaatatgacaactgctttatggtttcttttggaagagacagattgaaaaatcatgaatggaatctaaacagaaatgtcagatgaacgtatttcctgttttcatagactattcaaatgttttgaccatgaagttgtattatacatattttaaattgtttatagtaagttgatatttttttaatttttaaatttaatatagcaaacttaaaatgaatttaaacttaagcaagcaagcgtgtattttccttgtctgctgctatttgaagtaattagtacagctgcagatctctctgtgtatatctatctatatatatattttttattacttgggagaatgaattttaaaatgtcagtgctagtgtcaagtgttgtcctaggattgcatgttagtacccctaagcctgagtgtggggagtgagttatgcaagggtagcgtgcactgcccagactgactcatggagccttgtgcaaggagagccagagaggttcactataccatgactccaaaattgtctctattgctaatagatacgtatagtatacagggaaaacagcttataaatccaaatatcaatttaaattttaatattctacatgaaaacttacattgggaaatatgcagacaagtgattatattccaaattttacccttattttaatatctaaaatattgggtatgatgcaaattatactatagaatatttatctgaaatatgacttactggggtattctgttaatactatatataaatattcagaatttttttcaaaagtagaaaaattcccctctaaaagtacagccagatagattttcatccatattgaggaacttagctttttcaacaagcttcagaatctgaagtctgtagaatctaaaatacagaaatatccagaaatcagacaataaattgaaagtttagacatcatgagtattaaatagctttaaaaatatatttttagtcatattatttctaatgtaactttctttgggtaatttctggtaaggaaaaacatcttttggctgctagaattagttatagattttcaatatgtgtgtgtgtttgcacacattatcattagtgaaggaattccctagccagctttaaagaaggaaaaaatggatagtcccaaattaggtgtataaagccagtagagtccacgacacttggactggaggtatcttggagtcctgagacttagaatcagttcagctgcagaaaacccaccttttgagttcacaccattagtgaatagcaccatgctgaaacatttcacagcttccaactctgggaaataatggagagagtttaaaaatgtaaaacttcagttagtttggggctgaacttgcttacttgaaaaatctggtgctaggcacatatatctgcctctcctttgtaaataccactccaatattattctttactattcagatccaagcttcatgttctacttgttcttcatgttctttaaatcatttgaaagttgtcaactgagagaaacatttcagaggggggaggcttttggcactggtgataaacatccctccaagagaaccgtctggggttctcttctatttgtggttggtggtttttattcttttaaaaacagctttcattgttgtttactttttgtgtaatacaaacaaaatgtaggaatcatagtttattgatttcaaatggctgacaaagaatgagtaaaaccattctttatggttttacgattcagactcatttggaaaagcgaatgtaatttttacctcctctttccaccccaagttttgtttctgcttttggagagggttgtatttcccctacttttaatccctagggaatattattgcacagatttagtcttaaaacctaaaacacaaatacaaagtggtaaacctgttcaaaagaaaattaaaatgtgaatcattcttgagctgggcgtggttgctcatggaggcctgtaatcccagcactttgggaggctgaagcagggaggattgcttgagtccaggagttcaaaaccagcctgagcaacatagagagaccctgtctctacaaaaaaattttttaaatttgctcggtatggtggctcatgcttggtaatcccagctactcgggaggctgaagcaggaggatcactttgagcctgggggtttggggctgcaatgagctgtgatcatgccattgcactctagcctggattacagagcaagaccctgtctcaaaaaaaaaaaaaaaaaaaaaaaaaaaaaccagaaaatatcaatcatttaaaataactctatacaaacttttcttcaattttctgttaaccatacattttggagaataatggccaatcatgttggagagaaatgcccttttgctacagcatctgtcttttattttcttactcttagttttgtttatatgtttaaatggttgacaataaaccatgtcctgtgctgatgtagcttgtttactacgtcctaccattatgttctaaatggcacagatttgtattccatatcgtatttcaaatattctactttttcctcctagtgttaggtggagaaatatgcagctgttcatc

SEQ ID NO: 24798 - protein, 881 aa, Homo sapiens
MESTPELLLISSLEDTNETRNIQSRCFRKRHKSDNETNLQQQVVWGNRNRNLSGGVLMGFMLNRINQEATPGDIVEKLGADAKILSNVISKSTRPNTLDIGKPPLRSKRDSLEKESSDDDTPFDGSNYLADKVDSPVIFDLEDLDSETDVSKAGCVATQNPKRIQRMNSSFSVKPFEKTDVATGFDPLSLLVAETEQQQKEEEEEDEDDSKSISTPSARRDLAEEIVMYMNNMSSPLTSRTPSIDLQRACDDKLNKKSPPLVKACRRSSLPPNSPKPVRLTKSKSYTKSEEKPRDRLWSSPAFSPTCPFREESQDTLTHSSPSFNLDTLLVPKLDVLRNSMFTAGKGVAEKASKWYSRFTMYTTSSKDQSSDRTSLSSVGAQDSESTSLTDEDVCHELEGPISSQETSATSGTKRIDLSRISLESSASLEGSLSKFALPGKSEVTSSFNASNTNIFQNYAMEVLISSCSRCRTCDCLVHDEEIMAGWTADDSNLNTTCPFCGNIFLPFLNIEIRDLRRPGRYFLKSSPSTENMHFPSSISSQTRQSCISTSASGLDTSALSVQGNFDLNSKSKLQENFCTRSIQIPANRSKTAMSKCPIFPMARSISTSGPLDKEDTGRQKLISTGSLPATLQGATDSLGLEWHLPSPDPVTVPYLSPLVVWKELESLLENEGDHAITVADFVDHHPIVFWNLVWYFRRLDLPSNLPGLILSSEHCNKYSKIPRHCMSEDSKYVLIQMLWDNMKLHQDPGQPLYILWNAHTQKYPMVHLLQKSDNSFNQELLKSMVKSIKMNDVYGPMSQILETLNKCPHFKRQRSLYREILFLSLVALGRENIDIDAFDKEYKMAYDRLTPSQVKSTHNCDRPPSTGVMECRKTFGEPYL

SEQ ID NO: 24799 - DNA, 8192 bp, Homo sapiens
ggagaaagaggcggaggcagtggcggccgcgaggggagggggagtcccgtctgactgagacggcaggcctgggcgggcgggcgggggtgccgcgaagggcggagcgccgggctggggatgagctaagcgggctcagagcgccgcggcattcagcccctcgtgttccgctaccgcgcgtgcgggattccggcgccgctctccgagctcgatccgctgctcgcacgggagccagctgggtgttatttctcaaactctgaggctgcggagttcacacattgaaatctgtcatctttttcagagagaaactttcggtaatgtatgtaaccttctgtaatggaagatgattgaagacaaggggcctcgtgttgctgactactttgttgtagcaggattaactgatgtttcaaagcctctagaagaagaaattcacttcaatgatgcttgtcataaagtagctaaaccaaaagaacctattacagatgtttcagttattatcaaatctcttggggaggaagtcccacaggattatatctgtattgatgttaccccaactggattgtcagctgatcttaataatggaagtcttgtggggccacagatttacctttgctatagaagaggaagagataagcctccacttacagatctgggggttttatatgactggaaagaaagattgaaacagggttgtgaaattattcagagtactccctatgggcgccccgcaaatattagtgggagtacctcatcacaaagaatttatatcacttaccgaagagcctctgaaaacatgactcagaatacgttggctgtcactgacatatgtattattatacccagtaaaggagaaagcccaccacacacgttctgcaaagtcgacaagaatctcaataacagtatgtggggatcagcagtatacttgtgttataaaaaatcggtggcaaagacgaacactgtatcttacaaagctggcctaatttgtagatatcctcaagaagattatgagtcattctcactaccggaatctgttcctctattttgtttaccaatgggtgcaaccattgaatgttggccatcaaatagcaaataccctctgcctgtattttctacttttgttttaactggagcctcagctgaaaaggtttatggtgctgctattcagttttatgaaccatactctgaggagaatctcacagaaaagcagagacttcttttgggtttaacatcagcagatgggaagtctgatagttccaaaacaattcatactaacaaatgcatctgtcttctttctcactggcctttttttgatgcattcaggaagtttctgacttttctgtatcgttattccatctctgggcctcatgtccttccaattgagaagcatatttctcattttatgcataaagttccttttccatctcctcagagaccacggattttagttcagttatcaccacatgataatctgattctcagtcagcctgtgtcttcacctcttccactaagtggtggcaagttttcaacactactgcagaatttaggccctgaaaatgctgtgacactactggtgtttgcagtaacagaacataaaattcttatccattccctacggccatccgtgcttactagtgtgacagaagcattagtgtctatgattttccctttccactggccatgcccgtatgttcctctctgcccactggctttagcagatgtcttgagtgcaccatgtccattcatagtagggattgattcaagatactttgatctctatgatcctccaccagatgtcagttgtgttgatgtagataccaacactatttctcaaattggtgacaagaaaaatgtagcctggaagatacttccaaagaagccatgtaaaaatctgatgaacacactgaataatttgcatcagcaattggcaaaattgcagcagagaccgagagatgatggactcatggatttagcaataaatgactatgattttaattctggaaagaggttgcacatgatagatttggaaatccaagaggcatttttgtttttcatggcctctattttaaaaggttacagatcatacttaaggccaataacacaagccccatctgagacagccacagatgcagcctctctctttgccctacaagctttcttaagaagccgggaccggtcacatcaaaaattctataacatgatgaccaaaacacaaatgtttattcgcttcattgaagaatgttcttttgttagtgacaaagatgcaagcctggcattttttgatgattgtgtagataaagtggatatggacaagagcggtgaagtacgacttatagaactggatgaatctttcaaaagtgaacacactgtttttgtaacaccacctgagatcccccacctacccaatggtgaagaaccccctttacagtacagctataatggatttccagttcttaggaacaatttatttgaaagacctgaaggatttctacaagcaaagaagaacaaattgccttcaaaatcaagtagtcctaatagccctttgcccatgttcagaagaacaaaacaggaaattaaatcagcccataaaattgcaaagaggtactcttccatccctcagatgtggtctaggtgtctactgcgccactgttatggactgtggtttatttgtctcccagcttatgtgaaagtctgtcattcaaaagtcagggctctgaaaacagcatatgatgtgcttaaaaaaatgcagtcaaagaagatggatccacctgatgaggtatgctaccgcattcttatgcaactctgtggacaatatgatcagccagtgcttgcagttcgagtgctttttgaaatgcagaaagctggtattgaccccaatgccattacttatggttattataataaggctgttttggaaagtacctggccttcaagaagtcgtagtggctattttctttggacaaaagtaagaaatgttgttttaggagtaacacagttcaaaagagctttaaagaagcatgcacacttatcacaaacaactctctcaggtggccagtctgatcttggatataattcattatctaaagatgaagttagaagaggggatacatctactgaagacattcaagaagaaaaagataaaaaagggagtgattgtagttccttgtcagagagtgagagtacaaaaggaagtgctgattgccttcctaagctcagttatcaaaattcttccagtatcgttcgcctcactggtacaagtaacaacagtgctggtaaaatatcaggagaaagcatggaaagcacacctgagctgctcttaatatcatctcttgaagatacaaatgaaacacgaaacattcaaagtagatgcttcaggaaaagacataaaagtgacaatgaaactaatttgcagcagcaagtggtctggggaaatagaaaccgtaatcttagtggaggggtactgatgggatttatgctcaatagaattaaccaggaagcaacccctggagatatagttgaaaaattgggagctgatgcaaaaattctttcaaatgttatctcaaaaagcacgagaccaaatactcttgatattgggaagccacctttaagatcaaaaagagacagtctagaaaaggaatctagtgatgatgatacaccttttgatggttctaactatttggcagataaagtggattctcctgttatttttgacttagaagacttagacagtgaaacagatgtatcaaaagcaggatgtgttgctacacaaaatcccaagaggattcaacgtatgaacagcagcttttcagtaaaaccttttgaaaaaactgatgtcgcaacaggatttgatcccctctctcttttggttgctgagactgaacagcagcaaaaagaagaagaggaggaggatgaagatgatagcaaaagcatttcaacaccatctgctaggcgtgatttagctgaagaaattgtgatgtatatgaataacatgagcagtcctttgacaagtcgtacaccaagcattgatttacaacgggcatgtgatgataaattaaataagaaaagtccaccattggtcaaggcatgcagaagatctagtctgcctcctaattctcctaagccagtgagacttaccaaatctaaaagttacacaaaaagtgaggagaaaccaagggatagactttggtcttctccagccttctcacctacttgcccatttagggaagaatctcaggatacattaacccactcatcaccttcatttaacttagatacactactagtacctaaactagatgttctaagaaacagtatgttcactgctggaaaaggagttgcagagaaagcaagcaaatggtattcaagattcaccatgtacaccacatcatctaaggatcaaagttctgatcgtaccagtctttcttcagtgggagcccaggattctgaatctacctctttaacagatgaagatgtctgccatgagttggaaggacctatctcctctcaagagaccagtgctacttcagggactaagagaattgatctcagccgaataagcctggaaagttctgcatccttggaaggatctctgtcgaagtttgccttacctgggaaatcagaagtgacatcttccttcaacgcgagtaatacaaatatcttccagaactatgcaatggaggttctcatctcaagttgctctcggtgtagaacttgtgattgtcttgtccatgatgaggaaatcatggctggctggacagcagatgattcaaatctcaatactacatgcccattctgtggcaatatcttcttaccctttctgaatatagaaataagagatttaagacgacctggaagatactttctaaagtcaagcccatcaacagaaaatatgcactttccatcctccatttcaagtcagacgaggcagtcttgcatttcaacatcagcctctggtcttgacacatctgctctctctgttcaagggaattttgatctaaatagcaaatctaaactgcaggaaaatttttgcacccgaagtattcagatccctgctaatagatcaaaaacagctatgtctaaatgtccaatatttccaatggccaggagtattagtacttctggccccttggataaggaagatactggaagacagaagctcatttctacaggcagcctgccagctactttacaaggagctacagattctttaggtttagaatggcaccttccaagtcccgatcctgtcactgttccgtatcttagtcctttagtggtatggaaagaacttgaaagcttattggaaaatgaaggtgatcatgcaataacagtagcagactttgtggaccatcatccaattgttttttggaacctggtatggtatttcagacgtcttgacttgcccagtaacttacctggattgattctttcttctgagcactgtaacaagtattcaaagattccccgccactgtatgtctgaagatagcaaatatgttttaatacaaatgttatgggacaatatgaagttacatcaggatccgggacagcccttgtacattctctggaatgcacacacccaaaaatatccaatggtccatttattgcaaaaaagtgataactcatttaaccaggaactgttgaaaagtatggtaaaaagcattaaaatgaatgatgtctatggaccaatgagtcagattttagagacactgaataagtgtccacattttaaaagacagaggagtttatacagagaaatactatttctctcacttgtggcactgggaagagaaaacattgatatagatgcttttgataaagagtacaagatggcatacgatcgtctcacacctagtcaagtcaagagtacacacaactgtgatagaccaccaagtacaggggtgatggaatgtcgaaaaacctttggagaaccttatctttaagatgtatttgtatgtgtaaacattcaatgtatattgtatagtcagtgtataaaataacacttttagactctaaatattttttcttcaatttttgaaaatacaatttgtaaatggttcaaaagactcagacagcttatgtacagaatgtttgaagaagagaatagtgacaagtggggagaaagccactttgtttctcatttcttttttcttcttctttaactcccctgtaataggaaataaagtatttttgtgatgaggaaatccctaaacaaaattagttgccataaaatatgacaactgctttatggtttcttttggaagagacagattgaaaaatcatgaatggaatctaaacagaaatgtcagatgaacgtatttcctgttttcatagactattcaaatgttttgaccatgaagttgtattatacatattttaaattgtttatagtaagttgatatttttttaatttttaaatttaatatagcaaacttaaaatgaatttaaacttaagcaagcaagcgtgtattttccttgtctgctgctatttgaagtaattagtacagctgcagatctctctgtgtatatctatctatatatatattttttattacttgggagaatgaattttaaaatgtcagtgctagtgtcaagtgttgtcctaggattgcatgttagtacccctaagcctgagtgtggggagtgagttatgcaagggtagcgtgcactgcccagactgactcatggagccttgtgcaaggagagccagagaggttcactataccatgactccaaaattgtctctattgctaatagatacgtatagtatacagggaaaacagcttataaatccaaatatcaatttaaattttaatattctacatgaaaacttacattgggaaatatgcagacaagtgattatattccaaattttacccttattttaatatctaaaatattgggtatgatgcaaattatactatagaatatttatctgaaatatgacttactggggtattctgttaatactatatataaatattcagaatttttttcaaaagtagaaaaattcccctctaaaagtacagccagatagattttcatccatattgaggaacttagctttttcaacaagcttcagaatctgaagtctgtagaatctaaaatacagaaatatccagaaatcagacaataaattgaaagtttagacatcatgagtattaaatagctttaaaaatatatttttagtcatattatttctaatgtaactttctttgggtaatttctggtaaggaaaaacatcttttggctgctagaattagttatagattttcaatatgtgtgtgtgtttgcacacattatcattagtgaaggaattccctagccagctttaaagaaggaaaaaatggatagtcccaaattaggtgtataaagccagtagagtccacgacacttggactggaggtatcttggagtcctgagacttagaatcagttcagctgcagaaaacccaccttttgagttcacaccattagtgaatagcaccatgctgaaacatttcacagcttccaactctgggaaataatggagagagtttaaaaatgtaaaacttcagttagtttggggctgaacttgcttacttgaaaaatctggtgctaggcacatatatctgcctctcctttgtaaataccactccaatattattctttactattcagatccaagcttcatgttctacttgttcttcatgttctttaaatcatttgaaagttgtcaactgagagaaacatttcagaggggggaggcttttggcactggtgataaacatccctccaagagaaccgtctggggttctcttctatttgtggttggtggtttttattcttttaaaaacagctttcattgttgtttactttttgtgtaatacaaacaaaatgtaggaatcatagtttattgatttcaaatggctgacaaagaatgagtaaaaccattctttatggttttacgattcagactcatttggaaaagcgaatgtaatttttacctcctctttccaccccaagttttgtttctgcttttggagagggttgtatttcccctacttttaatccctagggaatattattgcacagatttagtcttaaaacctaaaacacaaatacaaagtggtaaacctgttcaaaagaaaattaaaatgtgaatcattcttgagctgggcgtggttgctcatggaggcctgtaatcccagcactttgggaggct

SEQ ID NO: 24800 - protein, 1863 aa, Homo sapiens
MIEDKGPRVADYFVVAGLTDVSKPLEEEIHFNDACHKVAKPKEPITDVSVIIKSLGEEVPQDYICIDVTPTGLSADLNNGSLVGPQIYLCYRRGRDKPPLTDLGVLYDWKERLKQGCEIIQSTPYGRPANISGSTSSQRIYITYRRASENMTQNTLAVTDICIIIPSKGESPPHTFCKVDKNLNNSMWGSAVYLCYKKSVAKTNTVSYKAGLICRYPQEDYESFSLPESVPLFCLPMGATIECWPSNSKYPLPVFSTFVLTGASAEKVYGAAIQFYEPYSEENLTEKQRLLLGLTSADGKSDSSKTIHTNKCICLLSHWPFFDAFRKFLTFLYRYSISGPHVLPIEKHISHFMHKVPFPSPQRPRILVQLSPHDNLILSQPVSSPLPLSGGKFSTLLQNLGPENAVTLLVFAVTEHKILIHSLRPSVLTSVTEALVSMIFPFHWPCPYVPLCPLALADVLSAPCPFIVGIDSRYFDLYDPPPDVSCVDVDTNTISQIGDKKNVAWKILPKKPCKNLMNTLNNLHQQLAKLQQRPRDDGLMDLAINDYDFNSGKRLHMIDLEIQEAFLFFMASILKGYRSYLRPITQAPSETATDAASLFALQAFLRSRDRSHQKFYNMMTKTQMFIRFIEECSFVSDKDASLAFFDDCVDKVDMDKSGEVRLIELDESFKSEHTVFVTPPEIPHLPNGEEPPLQYSYNGFPVLRNNLFERPEGFLQAKKNKLPSKSSSPNSPLPMFRRTKQEIKSAHKIAKRYSSIPQMWSRCLLRHCYGLWFICLPAYVKVCHSKVRALKTAYDVLKKMQSKKMDPPDEVCYRILMQLCGQYDQPVLAVRVLFEMQKAGIDPNAITYGYYNKAVLESTWPSRSRSGYFLWTKVRNVVLGVTQFKRALKKHAHLSQTTLSGGQSDLGYNSLSKDEVRRGDTSTEDIQEEKDKKGSDCSSLSESESTKGSADCLPKLSYQNSSSIVRLTGTSNNSAGKISGESMESTPELLLISSLEDTNETRNIQSRCFRKRHKSDNETNLQQQVVWGNRNRNLSGGVLMGFMLNRINQEATPGDIVEKLGADAKILSNVISKSTRPNTLDIGKPPLRSKRDSLEKESSDDDTPFDGSNYLADKVDSPVIFDLEDLDSETDVSKAGCVATQNPKRIQRMNSSFSVKPFEKTDVATGFDPLSLLVAETEQQQKEEEEEDEDDSKSISTPSARRDLAEEIVMYMNNMSSPLTSRTPSIDLQRACDDKLNKKSPPLVKACRRSSLPPNSPKPVRLTKSKSYTKSEEKPRDRLWSSPAFSPTCPFREESQDTLTHSSPSFNLDTLLVPKLDVLRNSMFTAGKGVAEKASKWYSRFTMYTTSSKDQSSDRTSLSSVGAQDSESTSLTDEDVCHELEGPISSQETSATSGTKRIDLSRISLESSASLEGSLSKFALPGKSEVTSSFNASNTNIFQNYAMEVLISSCSRCRTCDCLVHDEEIMAGWTADDSNLNTTCPFCGNIFLPFLNIEIRDLRRPGRYFLKSSPSTENMHFPSSISSQTRQSCISTSASGLDTSALSVQGNFDLNSKSKLQENFCTRSIQIPANRSKTAMSKCPIFPMARSISTSGPLDKEDTGRQKLISTGSLPATLQGATDSLGLEWHLPSPDPVTVPYLSPLVVWKELESLLENEGDHAITVADFVDHHPIVFWNLVWYFRRLDLPSNLPGLILSSEHCNKYSKIPRHCMSEDSKYVLIQMLWDNMKLHQDPGQPLYILWNAHTQKYPMVHLLQKSDNSFNQELLKSMVKSIKMNDVYGPMSQILETLNKCPHFKRQRSLYREILFLSLVALGRENIDIDAFDKEYKMAYDRLTPSQVKSTHNCDRPPSTGVMECRKTFGEPYL

SEQ ID NO: 24801 - DNA, 7269 bp, Homo sapiens
gcggccgcgaggggagggggagtcccgtctgactgagacggcaggcctgggcgggcgggcgggggtgccgcgaagggcggagcgccgggctggggatgagctaagcgggctcagagcgccgcggcattcagcccctcgtgttccgctaccgcgcgtgcgggattccggcgccgctctccgagctcgatccgctgctcgcacgggagccagctgggtgttatttctcaaactctgaggctgcggagttcacacattgaaatctgtcatctttttcagagagaaactttcggtaatgtatgtaaccttctgtaatggaagatgattgaagacaaggggcctcgtgttgctgactactttgttgtagcaggattaactgatgtttcaaagcctctagaagaagaaattcacttcaatgatgcttgtcataaagtagctaaaccaaaagaacctattacagatgtttcagttattatcaaatctcttggggaggaagtcccacaggattatatctgtattgatgttaccccaactggattgtcagctgatcttaataatggaagtcttgtggggccacagatttacctttgctatagaagaggaagagataagcctccacttacagatctgggggttttatatgactggaaagaaagattgaaacagggttgtgaaattattcagagtactccctatgggcgccccgcaaatattagtgggagtacctcatcacaaagaatttatatcacttaccgaagagcctctgaaaacatgactcagaatacgttggctgtcactgacatatgtattattatacccagtaaaggagaaagcccaccacacacgttctgcaaagtcgacaagaatctcaataacagtatgtggggatcagcagtatacttgtgttataaaaaatcggtggcaaagacgaacactgtatcttacaaagctggcctaatttgtagatatcctcaagaagattatgagtcattctcactaccggaatctgttcctctattttgtttaccaatgggtgcaaccattgaatgttggccatcaaatagcaaataccctctgcctgtattttctacttttgttttaactggagcctcagctgaaaaggtttatggtgctgctattcagttttatgaaccatactctgaggagaatctcacagaaaagcagagacttcttttgggtttaacatcagcagatgggaagtctgatagttccaaaacaattcatactaacaaatgcatctgtcttctttctcactggcctttttttgatgcattcaggaagtttctgacttttctgtatcgttattccatctctgggcctcatgtccttccaattgagaagcatatttctcattttatgcataaagttccttttccatctcctcagagaccacggattttagttcagttatcaccacatgataatctgattctcagtcagcctgtgtcttcacctcttccactaagtggtggcaagttttcaacactactgcagaatttaggccctgaaaatgctgtgacactactggtgtttgcagtaacagaacataaaattcttatccattccctacggccatccgtgcttactagtgtgacagaagcattagtgtctatgattttccctttccactggccatgcccgtatgttcctctctgcccactggctttagcagatgtcttgagtgcaccatgtccattcatagtagggattgattcaagatactttgatctctatgatcctccaccagatgtcagttgtgttgatgtagataccaacactatttctcaaattggtgacaagaaaaatgtagcctggaagatacttccaaagaagccatgtaaaaatctgatgaacacactgaataatttgcatcagcaattggcaaaattgcagcagagaccgagagatgatggactcatggatttagcaataaatgactatgattttaattctggaaagaggttgcacatgatagatttggaaatccaagaggcatttttgtttttcatggcctctattttaaaaggttacagatcatacttaaggccaataacacaagccccatctgagacagccacagatgcagcctctctctttgccctacaagctttcttaagaagccgggaccggtcacatcaaaaattctataacatgatgaccaaaacacaaatgtttattcgcttcattgaagaatgttcttttgttagtgacaaagatgcaagcctggcattttttgatgattgtgtagataaagtggatatggacaagagcggtgaagtacgacttatagaactggatgaatctttcaaaagtgaacacactgtttttgtaacaccacctgagatcccccacctacccaatggtgaagaaccccctttacagtacagctataatggatttccagttcttaggaacaatttatttgaaagacctgaaggatttctacaagcaaagaagaacaaattgccttcaaaatcaagtagtcctaatagccctttgcccatgttcagaagaacaaaacaggaaattaaatcagcccataaaattgcaaagaggtactcttccatccctcagatgtggtctaggtgtctactgcgccactgttatggactgtggtttatttgtctcccagcttatgtgaaagtctgtcattcaaaagtcagggctctgaaaacagcatatgatgtgcttaaaaaaatgcagtcaaagaagatggatccacctgatgaggtatgctaccgcattcttatgcaactctgtggacaatatgatcagccagtgcttgcagttcgagtgctttttgaaatgcagaaagctggtattgaccccaatgccattacttatggttattataataaggctgttttggaaagtacctggccttcaagaagtcgtagtggctattttctttggacaaaagtaagaaatgttgttttaggagtaacacagttcaaaagagctttaaagaagcatgcacacttatcacaaacaactctctcagatggcagtgacctggatgctgttagtcatggcagcatggatagtggtcatgggacacacactgtggagcaggcaccttttaatacgggtttaatcaaagtatatgctactgatgatagatctagtacaggtggccagtctgatcttggatataattcattatctaaagatgaagttagaagaggggatacatctactgaagacattcaagaagaaaaagataaaaaagggagtgattgtagttccttgtcagagagtgagagtacaaaaggaagtgctgattgccttcctaagctcagttatcaaaattcttccagtatcgttcgcctcactggtacaagtaacaacagtgctggtaaaatatcaggagaaagcatggaaagcacacctgagctgctcttaatatcatctcttgaagatacaaatgaaacacgaaacattcaaagtagatgcttcaggaaaagacataaaagtgacaatgaaactaatttgcagcagcaagtggtctggggaaatagaaaccgtaatcttagtggaggggtactgatgggatttatgctcaatagaattaaccaggaagcaacccctggagatatagttgaaaaattgggagctgatgcaaaaattctttcaaatgttatctcaaaaagcacgagaccaaatactcttgatattgggaagccacctttaagatcaaaaagagacagtctagaaaaggaatctagtgatgatgatacaccttttgatggttctaactatttggcagataaagtggattctcctgttatttttgacttagaagacttagacagtgaaacagatgtatcaaaagcaggatgtgttgctacacaaaatcccaagaggattcaacgtatgaacagcagcttttcagtaaaaccttttgaaaaaactgatgtcgcaacaggatttgatcccctctctcttttggttgctgagactgaacagcagcaaaaagaagaagaggaggaggatgaagatgatagcaaaagcatttcaacaccatctgctaggcgtgatttagctgaagaaattgtgatgtatatgaataacatgagcagtcctttgacaagtcgtacaccaagcattgatttacaacgggcatgtgatgataaattaaataagaaaagtccaccattggtcaaggcatgcagaagatctagtctgcctcctaattctcctaagccagtgagacttaccaaatctaaaagttacacaaaaagtgaggagaaaccaagggatagactttggtcttctccagccttctcacctacttgcccatttagggaagaatctcaggatacattaacccactcatcaccttcatttaacttagatacactactagtacctaaactagatgttctaagaaacagtatgttcactgctggaaaaggagttgcagagaaagcaagcaaatggtattcaagattcaccatgtacaccacatcatctaaggatcaaagttctgatcgtaccagtctttcttcagtgggagcccaggattctgaatctacctctttaacagatgaagatgtctgccatgagttggaaggacctatctcctctcaagagaccagtgctacttcagggactaagagaattgatctcagccgaataagcctggaaagttctgcatccttggaaggatctctgtcgaagtttgccttacctgggaaatcagaagtgacatcttccttcaacgcgagtaatacaaatatcttccagaactatgcaatggaggttctcatctcaagttgctctcggtgtagaacttgtgattgtcttgtccatgatgaggaaatcatggctggctggacagcagatgattcaaatctcaatactacatgcccattctgtggcaatatcttcttaccctttctgaatatagaaataagagatttaagacgacctggaagatactttctaaagtcaagcccatcaacagaaaatatgcactttccatcctccatttcaagtcagacgaggcagtcttgcatttcaacatcagcctctggtcttgacacatctgctctctctgttcaagggaattttgatctaaatagcaaatctaaactgcaggaaaatttttgcacccgaagtattcagatccctgctaatagatcaaaaacagctatgtctaaatgtccaatatttccaatggccaggagtattagtacttctggccccttggataaggaagatactggaagacagaagctcatttctacaggcagcctgccagctactttacaaggagctacagattctttaggtttagaatggcaccttccaagtcccgatcctgtcactgttccgtatcttagtcctttagtggtatggaaagaacttgaaagcttattggaaaatgaaggtgatcatgcaataacagtagcagactttgtggaccatcatccaattgttttttggaacctggtatggtatttcagacgtcttgacttgcccagtaacttacctggattgattctttcttctgagcactgtaacaagtattcaaagattccccgccactgtatgtctgaagatagcaaatatgttttaatacaaatgttatgggacaatatgaagttacatcaggatccgggacagcccttgtacattctctggaatgcacacacccaaaaatatccaatggtccatttattgcaaaaaagtgataactcatttaaccaggaactgttgaaaagtatggtaaaaagcattaaaatgaatgatgtctatggaccaatgagtcagattttagagacactgaataagtgtccacattttaaaagacagaggagtttatacagagaaatactatttctctcacttgtggcactgggaagagaaaacattgatatagatgcttttgataaagagtacaagatggcatacgatcgtctcacacctagtcaagtcaagagtacacacaactgtgatagaccaccaagtacaggggtgatggaatgtcgaaaaacctttggagaaccttatctttaagatgtatttgtatgtgtaaacattcaatgtatattgtatagtcagtgtataaaataacacttttagactctaaatattttttcttcaatttttgaaaatacaatttgtaaatggttcaaaagactcagacagcttatgtacagaatgtttgaagaagagaatagtgacaagtggggagaaagccactttgtttctcatttcttttttcttcttctttaactcccctgtaataggaaataaagtatttttgtgatgaggaaatccctaaacaaaattagttgccataaaatatgacaactgctttatggtttcttttggaagagacagattgaaaaatcatgaatggaatctaaacagaaatgtcagatgaacgtatttcctgttttcatagactattcaaatgttttgaccatgaagttgtattatacatattttaaattgtttatagtaagttgatatttttttaatttttaaatttaatatagcaaacttaaaatgaatttaaacttaagcaagcaagcgtgtattttccttgtctgctgctatttgaagtaattagtacagctgcagatctctctgtgtatatctatctatatatatattttttattacttgggagaatgaattttaaaatgtcagtgctagtgtcaagtgttgtcctaggattgcatgttagtacccctaagcctgagtgtggggagtgagttatgcaagggtagcgtgcactgcccagactgactcatggagccttgtgcaaggagagccagagaggttcactataccatgactccaaaattgtctctattgctaatagatacgtatagtatacagggaaaacagcttataaatccaaatatcaatttaaattttaatattctacatgaaaacttacattgggaaatatgcagacaagtgattatattccaaattttacccttattttaatatctaaaatattgggtatgatgcaaattatactatagaatatttatctgaaatatgacttactggggtattctgttaatactatatataaatattcagaatttttttcaaaagtagaaaaattcccctctaaaagtacagccagatagattttcatccatattgaggaacttagctttttcaacaagcttcagaatctgaagtctgtagaatctaaaatacagaaatatccagaaatcagacaataaattgaaagtttagacatcatgagtattaaatagcttt

SEQ ID NO: 24802 - protein, 1906 aa, Homo sapiens
MIEDKGPRVADYFVVAGLTDVSKPLEEEIHFNDACHKVAKPKEPITDVSVIIKSLGEEVPQDYICIDVTPTGLSADLNNGSLVGPQIYLCYRRGRDKPPLTDLGVLYDWKERLKQGCEIIQSTPYGRPANISGSTSSQRIYITYRRASENMTQNTLAVTDICIIIPSKGESPPHTFCKVDKNLNNSMWGSAVYLCYKKSVAKTNTVSYKAGLICRYPQEDYESFSLPESVPLFCLPMGATIECWPSNSKYPLPVFSTFVLTGASAEKVYGAAIQFYEPYSEENLTEKQRLLLGLTSADGKSDSSKTIHTNKCICLLSHWPFFDAFRKFLTFLYRYSISGPHVLPIEKHISHFMHKVPFPSPQRPRILVQLSPHDNLILSQPVSSPLPLSGGKFSTLLQNLGPENAVTLLVFAVTEHKILIHSLRPSVLTSVTEALVSMIFPFHWPCPYVPLCPLALADVLSAPCPFIVGIDSRYFDLYDPPPDVSCVDVDTNTISQIGDKKNVAWKILPKKPCKNLMNTLNNLHQQLAKLQQRPRDDGLMDLAINDYDFNSGKRLHMIDLEIQEAFLFFMASILKGYRSYLRPITQAPSETATDAASLFALQAFLRSRDRSHQKFYNMMTKTQMFIRFIEECSFVSDKDASLAFFDDCVDKVDMDKSGEVRLIELDESFKSEHTVFVTPPEIPHLPNGEEPPLQYSYNGFPVLRNNLFERPEGFLQAKKNKLPSKSSSPNSPLPMFRRTKQEIKSAHKIAKRYSSIPQMWSRCLLRHCYGLWFICLPAYVKVCHSKVRALKTAYDVLKKMQSKKMDPPDEVCYRILMQLCGQYDQPVLAVRVLFEMQKAGIDPNAITYGYYNKAVLESTWPSRSRSGYFLWTKVRNVVLGVTQFKRALKKHAHLSQTTLSDGSDLDAVSHGSMDSGHGTHTVEQAPFNTGLIKVYATDDRSSTGGQSDLGYNSLSKDEVRRGDTSTEDIQEEKDKKGSDCSSLSESESTKGSADCLPKLSYQNSSSIVRLTGTSNNSAGKISGESMESTPELLLISSLEDTNETRNIQSRCFRKRHKSDNETNLQQQVVWGNRNRNLSGGVLMGFMLNRINQEATPGDIVEKLGADAKILSNVISKSTRPNTLDIGKPPLRSKRDSLEKESSDDDTPFDGSNYLADKVDSPVIFDLEDLDSETDVSKAGCVATQNPKRIQRMNSSFSVKPFEKTDVATGFDPLSLLVAETEQQQKEEEEEDEDDSKSISTPSARRDLAEEIVMYMNNMSSPLTSRTPSIDLQRACDDKLNKKSPPLVKACRRSSLPPNSPKPVRLTKSKSYTKSEEKPRDRLWSSPAFSPTCPFREESQDTLTHSSPSFNLDTLLVPKLDVLRNSMFTAGKGVAEKASKWYSRFTMYTTSSKDQSSDRTSLSSVGAQDSESTSLTDEDVCHELEGPISSQETSATSGTKRIDLSRISLESSASLEGSLSKFALPGKSEVTSSFNASNTNIFQNYAMEVLISSCSRCRTCDCLVHDEEIMAGWTADDSNLNTTCPFCGNIFLPFLNIEIRDLRRPGRYFLKSSPSTENMHFPSSISSQTRQSCISTSASGLDTSALSVQGNFDLNSKSKLQENFCTRSIQIPANRSKTAMSKCPIFPMARSISTSGPLDKEDTGRQKLISTGSLPATLQGATDSLGLEWHLPSPDPVTVPYLSPLVVWKELESLLENEGDHAITVADFVDHHPIVFWNLVWYFRRLDLPSNLPGLILSSEHCNKYSKIPRHCMSEDSKYVLIQMLWDNMKLHQDPGQPLYILWNAHTQKYPMVHLLQKSDNSFNQELLKSMVKSIKMNDVYGPMSQILETLNKCPHFKRQRSLYREILFLSLVALGRENIDIDAFDKEYKMAYDRLTPSQVKSTHNCDRPPSTGVMECRKTFGEPYL

SEQ ID NO: 24803 - DNA, 1114 bp, Homo sapiens
agggaaacaatattcttagttattgtctatttaagaccacagaaagctttagacctttttttgtcattatttgtcttattttttgctttcttcattcttggattcctatttctttatctattgcccttaatttatttttagtgctttgtaacttaatatctgtcagttgctgcttaatttctttctcctttctacacagaacattttccttcatctgttcttttgttcgtttacagcccaaaaatatccaatggtccatttattgcaaaaaagtgataactcatttaaccaggaactgttgaaaagtatggtaaaaagcattaaaatgaatgatgtctatggaccaatgagtcagattttagagacactgaataagtgtccacattttaaaagacagaggagtttatacagagaaatactatttctctcacttgtggcactgggaagagaaaacattgatatagatgcttttgataaagagtacaagatggcatacgatcgtctcacacctagtcaagtcaagagtacacacaactgtgatagaccaccaagtacaggggtgatggaatgtcgaaaaacctttggagaaccttatctttaagatgtatttgtatgtgtaaacattcaatgtatattgtatagtcagtgtataaaataacacttttagactctaaatattttttcttcaatttttgaaaatacaatttgtaaatggttcaaaagactcagacagcttatgtacagaatgtttgaagaagagaatagtgacaagtggggagaaagccactttgtttctcatttcttttttcttcttctttaactcccctgtaataggaaataaagtatttttgtgatgaggaaatccctaaacaaaattagttgccataaaatatgacaactgctttatggtttcttttggaagagacagattgaaaaatcatgaatggaatctaaacagaaatgtcagatgaacgtatttcctgttttcatagactattcaaatgttttgaccatgaagttgtattatacatattttaaattgtttatagtaagttgatatttttttaatttttaaatttaatatagcaaacttaaaatgaatttaaacttaagc

SEQ ID NO: 24804 - protein, 116 aa, Homo sapiens; identical to SEQ ID NO: 24796

SEQ ID NO: 24805 - DNA, 867 bp, Homo sapiens
agggaaacaatattcttagttattgtctatttaagaccacagaaagctttagacctttttttgtcattatttgtcttattttttgctttcttcattcttggattcctatttctttatctattgcccttaatttatttttagtgctttgtaacttaatatctgtcagttgctgcttaatttctttctcctttctacacagaacattttccttcatctgttcttttgttcgtttacagcccaaaaatatccaatggtccatttattgcaaaaaagtgataactcatttaaccaggaactgttgaaaagtatggtaaaaagcattaaaatgaatgatgtctatggaccaatgagtcagattttagagacactgaataagtgtccacattttaaaagacagaggagtttatacagagaaatactatttctctcacttgtggcactgggaagagaaaacattgatatagatgcttttgataaagagtacaagatggcatacgatcgtctcacacctagtcaagtcaagagtacacacaactgtgatagaccaccaagtacaggggtgatggaatgtcgaaaaacctttggagaaccttatctttaagatgtatttgtatgtgtaaacattcaatgtatattgtatagtcagtgtataaaataacacttttagactctaaatattttttcttcaatttttgaaaatacaatttgtaaatggttcaaaagactcagacagcttatgtacagaatgtttgaagaagagaatagtgacaagtggggagaaagccactttgtttctcatttcttttttcttcttctttaactcccctgtaataggaaataaagtatttttgtgatgaggaaatccct

SEQ ID NO: 24806 - protein, 116 aa, Homo sapiens; identical to SEQ ID NO: 24796

SEQ ID NO: 24807 - DNA, 6003 bp, Homo sapiens
ggagaaagaggcggaggcagtggcggccgcgaggggagggggagtcccgtctgactgagacggcaggcctgggcgggcgggcgggggtgccgcgaagggcggagcgccgggctggggatgagctaagcgggctcagagcgccgcggcattcagcccctcgtgttccgctaccgcgcgtgcgggattccggcgccgctctccgagctcgatccgctgctcgcacgggagccagctgggtgttatttctcaaactctgaggctgcggagttcacacattgaaatctgtcatctttttcagagagaaactttcggtaatgtatgtaaccttctgtaatggaagatgattgaagacaaggggcctcgtgttgctgactactttgttgtagcaggattaactgatgtttcaaagcctctagaagaagaaattcacttcaatgatgcttgtcataaagtagctaaaccaaaagaacctattacagatgtttcagttattatcaaatctcttggggaggaagtcccacaggattatatctgtattgatgttaccccaactggattgtcagctgatcttaataatggaagtcttgtggggccacagatttacctttgctatagaagaggaagagataagcctccacttacagatctgggggttttatatgactggaaagaaagattgaaacagggttgtgaaattattcagagtactccctatgggcgccccgcaaatattagtgggagtacctcatcacaaagaatttatatcacttaccgaagagcctctgaaaacatgactcagaatacgttggctgtcactgacatatgtattattatacccagtaaaggagaaagcccaccacacacgttctgcaaagtcgacaagaatctcaataacagtatgtggggatcagcagtatacttgtgttataaaaaatcggtggcaaagacgaacactgtatcttacaaagctggcctaatttgtagatatcctcaagaagattatgagtcattctcactaccggaatctgttcctctattttgtttaccaatgggtgcaaccattgaatgttggccatcaaatagcaaataccctctgcctgtattttctacttttgttttaactggagcctcagctgaaaaggtttatggtgctgctattcagttttatgaaccatactctgaggagaatctcacagaaaagcagagacttcttttgggtttaacatcagcagatgggaagtctgatagttccaaaacaattcatactaacaaatgcatctgtcttctttctcactggcctttttttgatgcattcaggaagtttctgacttttctgtatcgttattccatctctgggcctcatgtccttccaattgagaagcatatttctcattttatgcataaagttccttttccatctcctcagagaccacggattttagttcagttatcaccacatgataatctgattctcagtcagcctgtgtcttcacctcttccactaagtggtggcaagttttcaacactactgcagaatttaggccctgaaaatgctgtgacactactggtgtttgcagtaacagaacataaaattcttatccattccctacggccatccgtgcttactagtgtgacagaagcattagtgtctatgattttccctttccactggccatgcccgtatgttcctctctgcccactggctttagcagatgtcttgagtgcaccatgtccattcatagtagggattgattcaagatactttgatctctatgatcctccaccagatgtcagttgtgttgatgtagataccaacactatttctcaaattggtgacaagaaaaatgtagcctggaagatacttccaaagaagccatgtaaaaatctgatgaacacactgaataatttgcatcagcaattggcaaaattgcagcagagaccgagagatgatggactcatggatttagcaataaatgactatgattttaattctggaaagaggttgcacatgatagatttggaaatccaagaggcatttttgtttttcatggcctctattttaaaaggttacagatcatacttaaggccaataacacaagccccatctgagacagccacagatgcagcctctctctttgccctacaagctttcttaagaagccgggaccggtcacatcaaaaattctataacatgatgaccaaaacacaaatgtttattcgcttcattgaagaatgttcttttgttagtgacaaagatgcaagcctggcattttttgatgattgtgtagataaagtggatatggacaagagcggtgaagtacgacttatagaactggatgaatctttcaaaagtgaacacactgtttttgtaacaccacctgagatcccccacctacccaatggtgaagaaccccctttacagtacagctataatggatttccagttcttaggaacaatttatttgaaagacctgaaggatttctacaagcaaagaagaacaaattgccttcaaaatcaagtagtcctaatagccctttgcccatgttcagaagaacaaaacaggaaattaaatcagcccataaaattgcaaagaggtactcttccatccctcagatgtggtctaggtgtctactgcgccactgttatggactgtggtttatttgtctcccagcttatgtgaaagtctgtcattcaaaagtcagggctctgaaaacagcatatgatgtgcttaaaaaaatgcagtcaaagaagatggatccacctgatgaggtatgctaccgcattcttatgcaactctgtggacaatatgatcagccagtgcttgcagttcgagtgctttttgaaatgcagaaagctggtattgaccccaatgccattacttatggttattataataaggctgttttggaaagtacctggccttcaagaagtcgtagtggctattttctttggacaaaagtaagaaatgttgttttaggagtaacacagttcaaaagagctttaaagaagcatgcacacttatcacaaacaactctctcaggtggccagtctgatcttggatataattcattatctaaagatgaagttagaagaggggatacatctactgaagacattcaagaagaaaaagataaaaaagggagtgattgtagttccttgtcagagagtgagagtacaaaaggaagtgctgattgccttcctaagctcagttatcaaaattcttccagtatcgttcgcctcactggtacaagtaacaacagtgctggtaaaatatcaggagaaagcatggaaagcacacctgagctgctcttaatatcatctcttgaagatacaaatgaaacacgaaacattcaaagtagatgcttcaggaaaagacataaaagtgacaatgaaactaatttgcagcagcaagtggtctggggaaatagaaaccgtaatcttagtggaggggtactgatgggatttatgctcaatagaattaaccaggaagcaacccctggagatatagttgaaaaattgggagctgatgcaaaaattctttcaaatgttatctcaaaaagcacgagaccaaatactcttgatattgggaagccacctttaagatcaaaaagagacagtctagaaaaggaatctagtgatgatgatacaccttttgatggttctaactatttggcagataaagtggattctcctgttatttttgacttagaagacttagacagtgaaacagatgtatcaaaagcaggatgtgttgctacacaaaatcccaagaggattcaacgtatgaacagcagcttttcagtaaaaccttttgaaaaaactgatgtcgcaacaggatttgatcccctctctcttttggttgctgagactgaacagcagcaaaaagaagaagaggaggaggatgaagatgatagcaaaagcatttcaacaccatctgctaggcgtgatttagctgaagaaattgtgatgtatatgaataacatgagcagtcctttgacaagtcgtacaccaagcattgatttacaacgggcatgtgatgataaattaaataagaaaagtccaccattggtcaaggcatgcagaagatctagtctgcctcctaattctcctaagccagtgagacttaccaaatctaaaagttacacaaaaagtgaggagaaaccaagggatagactttggtcttctccagccttctcacctacttgcccatttagggaagaatctcaggatacattaacccactcatcaccttcatttaacttagatacactactagtacctaaactagatgttctaagaaacagtatgttcactgctggaaaaggagttgcagagaaagcaagcaaatggtattcaagattcaccatgtacaccacatcatctaaggatcaaagttctgatcgtaccagtctttcttcagtgggagcccaggattctgaatctacctctttaacagatgaagatgtctgccatgagttggaaggacctatctcctctcaagagaccagtgctacttcagggactaagagaattgatctcagccgaataagcctggaaagttctgcatccttggaaggatctctgtcgaagtttgccttacctgggaaatcagaagtgacatcttccttcaacgcgagtaatacaaatatcttccagaactatgcaatggaggttctcatctcaagttgctctcggtgtagaacttgtgattgtcttgtccatgatgaggaaatcatggctggctggacagcagatgattcaaatctcaatactacatgcccattctgtggcaatatcttcttaccctttctgaatatagaaataagagatttaagacgacctggaagatactttctaaagtcaagcccatcaacagaaaatatgcactttccatcctccatttcaagtcagacgaggcagtcttgcatttcaacatcagcctctggtcttgacacatctgctctctctgttcaagggaattttgatctaaatagcaaatctaaactgcaggaaaatttttgcacccgaagtattcagatccctgctaatagatcaaaaacagctatgtctaaatgtccaatatttccaatggccaggagtattagtacttctggccccttggataaggaagatactggaagacagaagctcatttctacaggcagcctgccagctactttacaaggagctacagattctttaggtttagaatggcaccttccaagtcccgatcctgtcactgttccgtatcttagtcctttagtggtatggaaagaacttgaaagcttattggaaaatgaaggtgatcatgcaataacagtagcagactttgtggaccatcatccaattgttttttggaacctggtatggtatttcagacgtcttgacttgcccagtaacttacctggattgattctttcttctgagcactgtaacaagtattcaaagattccccgccactgtatgtctgaagatagcaaatatgttttaatacaaatgttatgggacaatatgaagttacatcaggatccgggacagcccttgtacattctctggaatgcacacacccaaaaatatccaatggtccatttattgcaaaaaagtgataactcatttaaccaggaactgttgaaaagtatggtaaaaagcattaaaatgaatgatgtctatggaccaatgagtcagattttagagacactgaataagtgtccacattttaaaagacagaggagtttatacagagaaatactatttctctcacttgtggcactgggaagagaaaacattgatatagatgcttttgataaagagtacaagatggcatacgatcgtctcacacctagtcaagtcaagagtacacacaactgtgatagaccaccaagtacaggggtgatggaatgtcgaaaaacctttggagaaccttatctttaagatgtatttgtatgtgtaaacattcaatgtatattgtatagtcagtgtataaaataacacttttagactct

SEQ ID NO: 24808 - protein, 1863 aa, Homo sapiens; identical to SEQ ID NO: 24800

SEQ ID NO: 24809 - DNA, 1088 bp, Homo sapiens
cgtatgaacagcagcttttcagtaaaaccttttgaaaaaactgatgtcgcaacaggatttgatcccctctctcttttggttgctgagactgaacagcagcaaaaagaagaagaggaggaggatgaagatgatagcaaaagcatttcaacaccatctgctaggcgtgatttagctgaagaaattgtgatgtatatgaataacatgagcagtcctttgacaagtcgtacaccaagcattgatttacaacgggcatgtgatgataaattaaataagaaaagtccaccattggtcaaggcatgcagaagatctagtctgcctcctaattctcctaagccagtgagacttaccaaatctaaaagttacacaaaaagtgaggagaaaccaagggatagactttggtcttctccagccttctcacctacttgcccatttagggaagaatctcaggatacattaacccactcatcaccttcatttaacttagatacactactagtacctaaactagatgttctaagaaacagtatgttcactgctggaaaaggagttgcagagaaagcaagcaaatggtattcaagattcaccatgtacaccacatcatctaaggaggagatcaaaatggcaacattaactggagtttggaagaaatagattccagttctcaaggatgattttgaggggttcaggacttcagtggaggaattatgcagatatggtgaaaatagcaaaaacccctagaattagaagtggagccttgaggatgtgacttaattgctgcaatcaaataataaaacttgaagggatgaggagttgcttctaatggatgagcaaagaaagttgtcagacagcatcacatgctacagagaaatctttcttgaaaggaagagtcaatggagcaaacttcattattatcctcttttttaccacagccactcaaccttcagcagccaccactctgttcagtcaccagccatcaatatccaggcaaaaccctcaaccagcaaaaagattaccacttgctgaaggttcacataattgttagcaatttttagtaataaggtattttaaaatttatgtgcattttttag

SEQ ID NO: 24810 - protein, 215 aa, Homo sapiens
MNSSFSVKPFEKTDVATGFDPLSLLVAETEQQQKEEEEEDEDDSKSISTPSARRDLAEEIVMYMNNMSSPLTSRTPSIDLQRACDDKLNKKSPPLVKACRRSSLPPNSPKPVRLTKSKSYTKSEEKPRDRLWSSPAFSPTCPFREESQDTLTHSSPSFNLDTLLVPKLDVLRNSMFTAGKGVAEKASKWYSRFTMYTTSSKEEIKMATLTGVWKK

SEQ ID NO: 24811 - DNA, 604 bp, Homo sapiens
gtaagtacattttagtgattctacatgtatattttacaactttgtagcatatgtatgtaactgtatattttatgattgttaagtaggattcttttaagatatattgttttccttgttatgtggggtaatcaccgtctttgaatcagaccttattatgcgtcaatggagtagatttagagtattaaagaaggttttgttggaaggactatacctttcatcctcaggctttcaatatttaagaaacattttaatgttaggcttgcttagaaatttagccaaaggggccaccgcgcccagccgaggtagttcttattaacccttctgacaaggaaaccaaagcttagatttttaagcgatttatcaaagggcatatagcttatgttgtcagaactgcattttaaagccattactgtttgactccaaaactaatgcttctaccactaattattgggtaactatataatatgtgtatgtcataaaataatgtagtaatcttgtaagtggaagtcatcatgagtaaatatacatttactcataagatgatcttttttataagaagatgatcatagaccaaactcaagtacttcaaaaaattcccttaccc

SEQ ID NO: 24812 - protein, 53 aa, Homo sapiens [sequence omitted]

SEQ ID NO: 24813 - DNA, 274 bp, Homo sapiens
gctgaagtgcaatggcatgatcttcgctcactgcaacctccgcctccttcagagatttaccgcattgtttctcagaagcaaatgtcagacagacgcgaaaatgacatgtctccaagcaacaatgtggttcctattcatgttccaccaaccactgaaaacaagccaaaggtgcagtgctgtcagaacatctaaggcatttctcttctcccctagaaggctgtgtatagtccatttcccaggtctgagatttaaatatatttgtaattcttgtgtc

SEQ ID NO: 24814 - protein, 85 aa, Homo sapiens
MIFAHCNLRLLQRFTALFLRSKCQTDAKMTCLQATMWFLFMFHQPLKTSQRCSAVRTSKAFLFSPRRLCIVHFPGLRFKYICNSC

SEQ ID NO: 24815 - DNA, 428 bp, Homo sapiens
ctaggtgctggttatgcagcagtgaataaaacagaaaaatctgtaccctcatggaacttacaatcttgtggaaagagagagaataaataagacatatggtatgttagacaggataggaaaatttatctcagaatttagtagattggttttcattgggatttaatggatgatcactctctgccctccttatcttttgtgtgcctatatatgtctgtgtgtagtatccctcactgtctgctggggaccagttccaggaccacctgtggattccaaaatccactcaagccccacagttgcctgttgagaacttgtggatacaaaaagctggcctatttttgcagctttcgtgtcccacaataccatatttttgatccaagttggttgcagatgcaaaattgcccatactgagggctgacatatttattgca

SEQ ID NO: 24816 - protein, 81 aa, Homo sapiens
MDDHSLPSLSFVCLYMSVCSIPHCLLGTSSRTTCGFQNPLKPHSCLLRTCGYKKLAYFCSFRVPQYHIFDPSWLQMQNCPY

SEQ ID NO: 24817 - DNA, 866 bp, Homo sapiens
ggcgcagcggcagggaggggctcttcacccagtccggcagttgaagctcggcgctcgggttacccctgcagcgacgccccctggtcccacagataccactgctgctcccgccctttcgctcctcggccgcgcaatgggcacccgcgacgacgagtacgactacctctttaaagttgtccttattggagattctggtgttggaaagagtaatctcctgtctcgatttactcgaaatgagtttaatctggaaagcaagagcaccattggagtagagtttgcaacaagaagcatccaggttgatggaaaaacaataaaggcacagatatgggacacagcagggcaagagcgatatcgagctataacatcagcatattatcgtggagctgtaggtgccttattggtttatgacattgctaaacatctcacatatgaaaatgtagagcgatggctgaaagaactgagagatcatgctgatagtaacattgttatcatgcttgtgggcaataagagtgatctacgtcatctcagggcagttcctacagatgaagcaagagcttttgcagaaaagaatggtttgtcattcattgaaacttcggccctagactctacaaatgtagaagctgcttttcagacaattttaacagagatttaccgcattgtttctcagaagcaaatgtcagacagacgcgaaaatgacatgtctccaagcaacaatgtggttcctattcatgttccaccaaccactgaaaacaagccaaaggtgcagtgctgtcagaacatctaaggcatttctcttctcccctagaaggctgtgtatagtccatttcccaggtctgagatttaaatatatttgtaattcttgtgtc

SEQ ID NO: 24818 - protein, 216 aa, Homo sapiens; identical to SEQ ID NO: 3313

SEQ ID NO: 24819 - DNA, 1027 bp, Homo sapiens
ggcgcagcggcagggaggggctcttcacccagtccggcagttgaagctcggcgctcgggttacccctgcagcgacgccccctggtcccacagataccactgctgctcccgccctttcgctcctcggccgcgcaatgggcacccgcgacgacgagtacgactacctctttaaagttgtccttattggagattctggtgttggaaagagtaatctcctgtctcgatttactcgaaatgagtttaatctggaaagcaagagcaccattggagtagagtttgcaacaagaagcatccaggttgatggaaaaacaataaaggcacagatatgggacacagcagggcaagagcgatatcgagctataacatcagcatattatcgtggagctgtaggtgccttattggtttatgacattgctaaacatctcacatatgaaaatgtagagcgatggctgaaagaactgagagatcatgctgatagtaacattgttatcatgcttgtgggcaataagagtgatctacgtcatctcagggcagttcctacagatgaagcaagagcttttgcagaaaagaatggtttgtcattcattgaaacttcggccctagactctacaaatgtagaagctgcttttcagacaattttaacagagatttaccgcattgtttctcagaagcaaatgtcagacagacgcgaaaatgacatgtctccaagcaacaatgtggttcctattcatgttccaccaaccactgaaaacaagccaaaggtgcagtgctgtcagaacatctaaggcatttctcttctcccctagaaggctgtgtatagtccatttcccaggtctgagatttaaatatatttgtaattcttgtgtcacttttgtgttttattacttcatacttatgaatttttccatgtcctaagtcttttgattttagctttataaaatcatccacttgtcccgaatgactgcagctttttttcatgctatggcttcactagccttagtttaataaactgaatgtttggattcctc

SEQ ID NO: 24820 - protein, 216 aa, Homo sapiens; identical to SEQ ID NO: 3313

SEQ ID NO: 24821 - DNA, 2400 bp, Homo sapiens
ggcgcagcggcagggaggggctcttcacccagtccggcagttgaagctcggcgctcgggttacccctgcagcgacgccccctggtcccacagataccactgctgctcccgccctttcgctcctcggccgcgcaatgggcacccgcgacgacgagtacgactacctctttaaagttgtccttattggagattctggtgttggaaagagtaatctcctgtctcgatttactcgaaatgagtttaatctggaaagcaagagcaccattggagtagagtttgcaacaagaagcatccaggttgatggaaaaacaataaaggcacagatatgggacacagcagggcaagagcgatatcgagctataacatcagcatattatcgtggagctgtaggtgccttattggtttatgacattgctaaacatctcacatatgaaaatgtagagcgatggctgaaagaactgagagatcatgctgatagtaacattgttatcatgcttgtgggcaataagagtgatctacgtcatctcagggcagttcctacagatgaagcaagagcttttgcagaaaagaatggtttgtcattcattgaaacttcggccctagactctacaaatgtagaagctgcttttcagacaattttaacagagatttaccgcattgtttctcagaagcaaatgtcagacagacgcgaaaatgacatgtctccaagcaacaatgtggttcctattcatgttccaccaaccactgaaaacaagccaaaggtgcagtgctgtcagaacatctaaggcatttctcttctcccctagaaggctgtgtatagtccatttcccaggtctgagatttaaatatatttgtaattcttgtgtcacttttgtgttttattacttcatacttatgaatttttccatgtcctaagtcttttgattttagctttataaaatcatccacttgtcccgaatgactgcagctttttttcatgctatggcttcactagccttagtttaataaactgaatgtttggattcctcagttattgtttacttttcatcatggaagcctgtcactgtatgtaggacataatagaacttgatcacttgaagctcagacctattggtcttgatcaaatcaaactaagaagaccttagaaataagctaccattttgccacagagcagcttataggtaatacactcttctctcagtgcagtgtacatttccacaaatctaagaattgccctataaacatagcaggattttgagagcttgaaaattttccattattctggacatgaatttctaaaatgccttaataggtttatgtagttgagtaaattttgttttttaatttttgtaagcatcaaagttgattagagaggggggcactttttctggagaattctcttagtaaacacaaaagattgttacggtttcattagtagtatggttgtggggccataagttaaacagtgctgcctggtaggctgggaactgaagagacttgtggtattccatctcgggtgcctctgttggcaatgatcaggcagcccaaaagatttaaatgatctataataatttccaagcggtagattatgtggcattttattgctcaggcaataattggtttaatgctggtagtgtcaaattttgaagtgttaattttgtcttagaaccttccagtaagtgaaatacaacctagttttatcaccatatccaccagcaggcatggataattattttaacaatgctaatatttgagttttgcagtatattatagaatatagtccagttaaatctttggtttcagtatgtctgaagagtacagtgagaggttaatttctgctcaagtggtaccacttaaaggcatgtattcttttagtatgtaaaatgaaatagtaccttgagtttaaatagaatgcatttaggcattgtagagatctgaaatagttttcttccactacattgttgaaatcaatgaagcaattagtttctcattcagaaatgtgcacactaatatttagttttgctttctcgtggataatattaagcacttactctgcagtttcctggaagttgtgtcaactgcagtgatactattcaggatggtgggaaatccccaaaaatatgtatgtgtgggcttgcttagattactatatttcatagttaatcttttgtctcttgcggtgctcatgatgtgtggggcacacggaaggcattgctgtagtcagtcattttggttttcttctatagccattttattattttagtgtattagttatgaagataatattatctatttgtaaattgctactttgtattttatgcatgctctgtaatttgatttttttttagttattgatttggattatattcacattctaataaacagttatagggggattatt

SEQ ID NO: 24822 - protein, 216 aa, Homo sapiens; identical to SEQ ID NO: 3313

SEQ ID NO: 24823 - DNA, 2513 bp, Homo sapiens
ggcgcagcggcagggaggggctcttcacccagtccggcagttgaagctcggcgctcgggttacccctgcagcgacgccccctggtcccacagataccactgctgctcccgccctttcgctcctcggccgcgcaatgggcacccgcgacgacgagtacgactacctctttaaagttgtccttattggagattctggtgttggaaagagtaatctcctgtctcgatttactcgaaatgagtttaatctggaaagcaagagcaccattggagtagagtttgcaacaagaagcatccaggttgatggaaaaacaataaaggcacagatatgggacacagcagggcaagagcgatatcgagctataacatcagcatattatcgtggagctgtaggtgccttattggtttatgacattgctaaacatctcacatatgaaaatgtagagcgatggctgaaagaactgagagatcatgctgatagtaacattgttatcatgcttgtgggcaataagagtgatctacgtcatctcagggcagttcctacagatgaagcaagagcttttgcagaaaagaatggtttgtcattcattgaaacttcggccctagactctacaaatgtagaagctgcttttcagacaattttaacagagatttaccgcattgtttctcagaagcaaatgtcagacagacgcgaaaatgacatgtctccaagcaacaatgtggttcctattcatgttccaccaaccactgaaaacaagccaaaggtgcagtgctgtcagaacatctaaggcatttctcttctcccctagaaggctgtgtatagtccatttcccaggtctgagatttaaatatatttgtaattcttgtgtcacttttgtgttttattacttcatacttatgaatttttccatgtcctaagtcttttgattttagctttataaaatcatccacttgtcccgaatgactgcagctttttttcatgctatggcttcactagccttagtttaataaactgaatgtttggattcctcagttattgtttacttttcatcatggaagcctgtcactgtatgtaggacataatagaacttgatcacttgaagctcagacctattggtcttgatcaaatcaaactaagaagaccttagaaataagctaccattttgccacagagcagcttataggtaatacactcttctctcagtgcagtgtacatttccacaaatctaagaattgccctataaacatagcaggattttgagagcttgaaaattttccattattctggacatgaatttctaaaatgccttaataggtttatgtagttgagtaaattttgttttttaatttttgtaagcatcaaagttgattagagaggggggcactttttctggagaattctcttagtaaacacaaaagattgttacggtttcattagtagtatggttgtggggccataagttaaacagtgctgcctggtaggctgggaactgaagagacttgtggtattccatctcgggtgcctctgttggcaatgatcaggcagcccaaaagatttaaatgatctataataatttccaagcggtagattatgtggcattttattgctcaggcaataattggtttaatgctggtagtgtcaaattttgaagtgttaattttgtcttagaaccttccagtaagtgaaatacaacctagttttatcaccatatccaccagcaggcatggataattattttaacaatgctaatatttgagttttgcagtatattatagaatatagtccagttaaatctttggtttcagtatgtctgaagagtacagtgagaggttaatttctgctcaagtggtaccacttaaaggcatgtattcttttagtatgtaaaatgaaatagtaccttgagtttaaatagaatgcatttaggcattgtagagatctgaaatagttttcttccactacattgttgaaatcaatgaagcaattagtttctcattcagaaatgtgcacactaatatttagttttgctttctcgtggataatattaagcacttactctgcagtttcctggaagttgtgtcaactgcagtgatactattcaggatggtgggaaatccccaaaaatatgtatgtgtgggcttgcttagattactatatttcatagttaatcttttgtctcttgcggtgctcatgatgtgtggggcacacggaaggcattgctgtagtcagtcattttggttttcttctatagccattttattattttagtgtattagttatgaagataatattatctatttgtaaattgctactttgtattttatgcatgctctgtaatttgatttttttttagttattgatttggattatattcacattctaataaacagttatagggggattatttcttatgctgtcagattacatttttcctttgagtgctttgggtgcagccgtggaatcctgatgtaaaagcataggttcttgcattactgagtaaacattgaattgggagcatc

SEQ ID NO: 24824 - protein, 216 aa, Homo sapiens; identical to SEQ ID NO: 3313

SEQ ID NO: 24825 - DNA, 4935 bp, Homo sapiens
ggcgcagcggcagggaggggctcttcacccagtccggcagttgaagctcggcgctcgggttacccctgcagcgacgccccctggtcccacagataccactgctgctcccgccctttcgctcctcggccgcgcaatgggcacccgcgacgacgagtacgactacctctttaaagttgtccttattggagattctggtgttggaaagagtaatctcctgtctcgatttactcgaaatgagtttaatctggaaagcaagagcaccattggagtagagtttgcaacaagaagcatccaggttgatggaaaaacaataaaggcacagatatgggacacagcagggcaagagcgatatcgagctataacatcagcatattatcgtggagctgtaggtgccttattggtttatgacattgctaaacatctcacatatgaaaatgtagagcgatggctgaaagaactgagagatcatgctgatagtaacattgttatcatgcttgtgggcaataagagtgatctacgtcatctcagggcagttcctacagatgaagcaagagcttttgcagaaaagaatggtttgtcattcattgaaacttcggccctagactctacaaatgtagaagctgcttttcagacaattttaacagagatttaccgcattgtttctcagaagcaaatgtcagacagacgcgaaaatgacatgtctccaagcaacaatgtggttcctattcatgttccaccaaccactgaaaacaagccaaaggtgcagtgctgtcagaacatctaaggcatttctcttctcccctagaaggctgtgtatagtccatttcccaggtctgagatttaaatatatttgtaattcttgtgtcacttttgtgttttattacttcatacttatgaatttttccatgtcctaagtcttttgattttagctttataaaatcatccacttgtcccgaatgactgcagctttttttcatgctatggcttcactagccttagtttaataaactgaatgtttggattcctcagttattgtttacttttcatcatggaagcctgtcactgtatgtaggacataatagaacttgatcacttgaagctcagacctattggtcttgatcaaatcaaactaagaagaccttagaaataagctaccattttgccacagagcagcttataggtaatacactcttctctcagtgcagtgtacatttccacaaatctaagaattgccctataaacatagcaggattttgagagcttgaaaattttccattattctggacatgaatttctaaaatgccttaataggtttatgtagttgagtaaattttgttttttaatttttgtaagcatcaaagttgattagagaggggggcactttttctggagaattctcttagtaaacacaaaagattgttacggtttcattagtagtatggttgtggggccataagttaaacagtgctgcctggtaggctgggaactgaagagacttgtggtattccatctcgggtgcctctgttggcaatgatcaggcagcccaaaagatttaaatgatctataataatttccaagcggtagattatgtggcattttattgctcaggcaataattggtttaatgctggtagtgtcaaattttgaagtgttaattttgtcttagaaccttccagtaagtgaaatacaacctagttttatcaccatatccaccagcaggcatggataattattttaacaatgctaatatttgagttttgcagtatattatagaatatagtccagttaaatctttggtttcagtatgtctgaagagtacagtgagaggttaatttctgctcaagtggtaccacttaaaggcatgtattcttttagtatgtaaaatgaaatagtaccttgagtttaaatagaatgcatttaggcattgtagagatctgaaatagttttcttccactacattgttgaaatcaatgaagcaattagtttctcattcagaaatgtgcacactaatatttagttttgctttctcgtggataatattaagcacttactctgcagtttcctggaagttgtgtcaactgcagtgatactattcaggatggtgggaaatccccaaaaatatgtatgtgtgggcttgcttagattactatatttcatagttaatcttttgtctcttgcggtgctcatgatgtgtggggcacacggaaggcattgctgtagtcagtcattttggttttcttctatagccattttattattttagtgtattagttatgaagataatattatctatttgtaaattgctactttgtattttatgcatgctctgtaatttgatttttttttagttattgatttggattatattcacattctaataaacagttatagggggattatttcttatgctgtcagattacatttttcctttgagtgctttgggtgcagccgtggaatcctgatgtaaaagcataggttcttgcattactgagtaaacattgaattgggagcatcagtgtgtgaattcagctttgattttagaactgcagttcaattatgctttccttggaaaaagtatgtccaaaaacattaggaaagtagtgtgtattttcatatataacagtgtcaccagacccaggaaaagaaaccatctctattttattgaaagttggtggtagattttttacaaagtaaggagaaaagagaaaaactaaatagtgaattgaaaatgaataaagtaaacttagaatttttacccaagtgtagacttaaatgttgctttgagtatggctggatcttgggagaattccaggaaatattaggtattagaaaatgactttgattgcatttcagcaggtgtctttattctgagtagtatcttaggagacaaactgtctcaagcaagaaacaataaatttttaaatattatgacagttcagggcttaaggcagtttagaagtattttgctacttgaccttgattttcagttattttaactttgaatttttttttttttttttgagacggagtcttgctctgttgcccaggctggagtacaatggcaccatctcagctcactgcaagctccacctccagggttcatgccattctcctgcctcagcctcccgagtagctgggattataggcgccagccaccacgactggctaattttttgtatttttagtagagacggggtttcaccatgttagccagggtggtctcgatctcctgacctggtgatacacccacctcggcctcccaaagtgctgggattaaaggcgtgagccaccgtgcctggccttgaatttttttttaacctgttatatagtctcctgaatagttagccatggtgccttgatttaatcttatgtcattgttctcaaatgccatgatttctctttaatagtagttgtcattatgtaagggtaagttattgcccatttaattgtaattataagaagaggtgccagctagtgaccttacatcagtgatcttttaagttctgaagggttctgcagaaaagttacacttcttgagtttgggttgcccatcagagctggtcacatttctttgatcattgaaaaaatgaatatcttaatttttgtctttgctgactggtatttataaaatacaaatgcttttagtgggttgagctgttgtgataatctcttccatctaccttagagaagaagctgtactatttagacagttttggccaacactagaagcaaaagaattcaaaggctgggtggatatttaagaacttattctaacctgtcaggtttcaatttgtggggcttggtttaacagaggaaaaaaatataaattgattttctgatgtctcacaaatatcacatacctggaaaaaaattaaaacaaaaaatgaattttgtaaaaggttatgtatgacttccatttgctctgtaaaaaaatgaacaaagattgtgaaaggatcctcttccaccacatcatttaatgggttagcggaacagatagggagctatgacactagcaccaaagagagatttttcttctggttgggtggtgctggtgccacgcccctttctgggatttgacaagtctttcccactcacctatacaatatgccaaatcaactggagttgtcattctaatgttttaaagaatgattgggttcccccaaactgtaggaggtcgatggtaacaataaagtgatacaaaatgcttatgtcattataatttatgtaagggagaccattaggctgagaatcaatatgattgaggttatctattctcctgaaaagtgaattggagaataaagaaagaatatttgaaaggatgttgtgtactaggcaatatactagcatgtattagaaaatacggtaaactgtgggttagaagagtgaaagtagctggtatgatagagcactggactgagtaacgaagagattctagtcatggctcttgtggtcatttcatttttgagcctcacattcttccaattaatgagggtaccagattaaataaactctggggattcatcccaattcgaactctgtaattctctgaatgaactctctcttcaattaaagccaaattattaacattttaactcaagtttaaatttaatagagaagtcaaaatgaggtatgcactttgtggaatgtttttggtcttatcacaataacctgattaaaatggtgcctttatttccatgtttactcctttaaataagatgaaagctttcagaacatttatttgcaaaatgactgtcaatatcaacaatatgcatcaaagtaccatatatgctaagggagaggagcacttgatgggctgctatgttaactgtaaattgagaactgcttgttttatggcttttgctgttaaaaaaaaactgctggcttttaatatgtactttaaaatatactcatgtctgggagagaacttttaaaaaca

SEQ ID NO: 24826 - protein, 216 aa, Homo sapiens; identical to SEQ ID NO: 3313

SEQ ID NO: 24827 - DNA, 809 bp, Homo sapiens
gcagcggcagggaggggctcttcacccagtccggcagttgaagctcggcgctcgggttacccctgcagcgacgccccctggtcccacagataccactgctgctcccgccctttcgctcctcggccgcgcaatgggcacccgcgacgacgagtacgactacctctttaaagttgtccttattggagattctggtgttggaaagagtaatctcctgtctcgatttactcgaaatgagtttaatctggaaagcaagagcaccattggagtagagtttgcaacaagaagcatccaggttgatggaaaaacaataaaggcacagatatgggacacagcagggcaagagcgatatcgagctataacatcagcatattatcgtggagctgtaggtgccttattggtttatgacattgctaaacatctcacatatgaaaatgtagagcgatggctgaaagaactgagagatcatgctgatagtaacattgttatcatgcttgtgggcaataagagtgatctacgtcatctcagggcagttcctacagatgaagcaagagcttttgcagaagctgcttttcagacaattttaacagagatttaccgcattgtttctcagaagcaaatgtcagacagacgcgaaaatgacatgtctccaagcaacaatgtggttcctattcatgttccaccaaccactgaaaacaagccaaaggtgcagtgctgtcagaacatctaaggcatttctcttctcccctagaaggctgtgtatagtccatttcccaggtctgagatttaaatatatttgtaattcttgtgtc

SEQ ID NO: 24828 - protein, 198 aa, Homo sapiens
MGTRDDEYDYLFKVVLIGDSGVGKSNLLSRFTRNEFNLESKSTIGVEFATRSIQVDGKTIKAQIWDTAGQERYRAITSAYYRGAVGALLVYDIAKHLTYENVERWLKELRDHADSNIVIMLVGNKSDLRHLRAVPTDEARAFAEAAFQTILTEIYRIVSQKQMSDRRENDMSPSNNVVPIHVPPTTENKPKVQCCQNI

SEQ ID NO: 24829 - DNA, 970 bp, Homo sapiens
gcagcggcagggaggggctcttcacccagtccggcagttgaagctcggcgctcgggttacccctgcagcgacgccccctggtcccacagataccactgctgctcccgccctttcgctcctcggccgcgcaatgggcacccgcgacgacgagtacgactacctctttaaagttgtccttattggagattctggtgttggaaagagtaatctcctgtctcgatttactcgaaatgagtttaatctggaaagcaagagcaccattggagtagagtttgcaacaagaagcatccaggttgatggaaaaacaataaaggcacagatatgggacacagcagggcaagagcgatatcgagctataacatcagcatattatcgtggagctgtaggtgccttattggtttatgacattgctaaacatctcacatatgaaaatgtagagcgatggctgaaagaactgagagatcatgctgatagtaacattgttatcatgcttgtgggcaataagagtgatctacgtcatctcagggcagttcctacagatgaagcaagagcttttgcagaagctgcttttcagacaattttaacagagatttaccgcattgtttctcagaagcaaatgtcagacagacgcgaaaatgacatgtctccaagcaacaatgtggttcctattcatgttccaccaaccactgaaaacaagccaaaggtgcagtgctgtcagaacatctaaggcatttctcttctcccctagaaggctgtgtatagtccatttcccaggtctgagatttaaatatatttgtaattcttgtgtcacttttgtgttttattacttcatacttatgaatttttccatgtcctaagtcttttgattttagctttataaaatcatccacttgtcccgaatgactgcagctttttttcatgctatggcttcactagccttagtttaataaactgaatgtttggattcctc

SEQ ID NO: 24830 - protein, 198 aa, Homo sapiens; identical to SEQ ID NO: 24828

SEQ ID NO: 24831 - DNA, 2343 bp, Homo sapiens
gcagcggcagggaggggctcttcacccagtccggcagttgaagctcggcgctcgggttacccctgcagcgacgccccctggtcccacagataccactgctgctcccgccctttcgctcctcggccgcgcaatgggcacccgcgacgacgagtacgactacctctttaaagttgtccttattggagattctggtgttggaaagagtaatctcctgtctcgatttactcgaaatgagtttaatctggaaagcaagagcaccattggagtagagtttgcaacaagaagcatccaggttgatggaaaaacaataaaggcacagatatgggacacagcagggcaagagcgatatcgagctataacatcagcatattatcgtggagctgtaggtgccttattggtttatgacattgctaaacatctcacatatgaaaatgtagagcgatggctgaaagaactgagagatcatgctgatagtaacattgttatcatgcttgtgggcaataagagtgatctacgtcatctcagggcagttcctacagatgaagcaagagcttttgcagaagctgcttttcagacaattttaacagagatttaccgcattgtttctcagaagcaaatgtcagacagacgcgaaaatgacatgtctccaagcaacaatgtggttcctattcatgttccaccaaccactgaaaacaagccaaaggtgcagtgctgtcagaacatctaaggcatttctcttctcccctagaaggctgtgtatagtccatttcccaggtctgagatttaaatatatttgtaattcttgtgtcacttttgtgttttattacttcatacttatgaatttttccatgtcctaagtcttttgattttagctttataaaatcatccacttgtcccgaatgactgcagctttttttcatgctatggcttcactagccttagtttaataaactgaatgtttggattcctcagttattgtttacttttcatcatggaagcctgtcactgtatgtaggacataatagaacttgatcacttgaagctcagacctattggtcttgatcaaatcaaactaagaagaccttagaaataagctaccattttgccacagagcagcttataggtaatacactcttctctcagtgcagtgtacatttccacaaatctaagaattgccctataaacatagcaggattttgagagcttgaaaattttccattattctggacatgaatttctaaaatgccttaataggtttatgtagttgagtaaattttgttttttaatttttgtaagcatcaaagttgattagagaggggggcactttttctggagaattctcttagtaaacacaaaagattgttacggtttcattagtagtatggttgtggggccataagttaaacagtgctgcctggtaggctgggaactgaagagacttgtggtattccatctcgggtgcctctgttggcaatgatcaggcagcccaaaagatttaaatgatctataataatttccaagcggtagattatgtggcattttattgctcaggcaataattggtttaatgctggtagtgtcaaattttgaagtgttaattttgtcttagaaccttccagtaagtgaaatacaacctagttttatcaccatatccaccagcaggcatggataattattttaacaatgctaatatttgagttttgcagtatattatagaatatagtccagttaaatctttggtttcagtatgtctgaagagtacagtgagaggttaatttctgctcaagtggtaccacttaaaggcatgtattcttttagtatgtaaaatgaaatagtaccttgagtttaaatagaatgcatttaggcattgtagagatctgaaatagttttcttccactacattgttgaaatcaatgaagcaattagtttctcattcagaaatgtgcacactaatatttagttttgctttctcgtggataatattaagcacttactctgcagtttcctggaagttgtgtcaactgcagtgatactattcaggatggtgggaaatccccaaaaatatgtatgtgtgggcttgcttagattactatatttcatagttaatcttttgtctcttgcggtgctcatgatgtgtggggcacacggaaggcattgctgtagtcagtcattttggttttcttctatagccattttattattttagtgtattagttatgaagataatattatctatttgtaaattgctactttgtattttatgcatgctctgtaatttgatttttttttagttattgatttggattatattcacattctaataaacagttatagggggattatt

SEQ ID NO: 24832 - protein, 198 aa, Homo sapiens; identical to SEQ ID NO: 24828

SEQ ID NO: 24833 - DNA, 2456 bp, Homo sapiens
gcagcggcagggaggggctcttcacccagtccggcagttgaagctcggcgctcgggttacccctgcagcgacgccccctggtcccacagataccactgctgctcccgccctttcgctcctcggccgcgcaatgggcacccgcgacgacgagtacgactacctctttaaagttgtccttattggagattctggtgttggaaagagtaatctcctgtctcgatttactcgaaatgagtttaatctggaaagcaagagcaccattggagtagagtttgcaacaagaagcatccaggttgatggaaaaacaataaaggcacagatatgggacacagcagggcaagagcgatatcgagctataacatcagcatattatcgtggagctgtaggtgccttattggtttatgacattgctaaacatctcacatatgaaaatgtagagcgatggctgaaagaactgagagatcatgctgatagtaacattgttatcatgcttgtgggcaataagagtgatctacgtcatctcagggcagttcctacagatgaagcaagagcttttgcagaagctgcttttcagacaattttaacagagatttaccgcattgtttctcagaagcaaatgtcagacagacgcgaaaatgacatgtctccaagcaacaatgtggttcctattcatgttccaccaaccactgaaaacaagccaaaggtgcagtgctgtcagaacatctaaggcatttctcttctcccctagaaggctgtgtatagtccatttcccaggtctgagatttaaatatatttgtaattcttgtgtcacttttgtgttttattacttcatacttatgaatttttccatgtcctaagtcttttgattttagctttataaaatcatccacttgtcccgaatgactgcagctttttttcatgctatggcttcactagccttagtttaataaactgaatgtttggattcctcagttattgtttacttttcatcatggaagcctgtcactgtatgtaggacataatagaacttgatcacttgaagctcagacctattggtcttgatcaaatcaaactaagaagaccttagaaataagctaccattttgccacagagcagcttataggtaatacactcttctctcagtgcagtgtacatttccacaaatctaagaattgccctataaacatagcaggattttgagagcttgaaaattttccattattctggacatgaatttctaaaatgccttaataggtttatgtagttgagtaaattttgttttttaatttttgtaagcatcaaagttgattagagaggggggcactttttctggagaattctcttagtaaacacaaaagattgttacggtttcattagtagtatggttgtggggccataagttaaacagtgctgcctggtaggctgggaactgaagagacttgtggtattccatctcgggtgcctctgttggcaatgatcaggcagcccaaaagatttaaatgatctataataatttccaagcggtagattatgtggcattttattgctcaggcaataattggtttaatgctggtagtgtcaaattttgaagtgttaattttgtcttagaaccttccagtaagtgaaatacaacctagttttatcaccatatccaccagcaggcatggataattattttaacaatgctaatatttgagttttgcagtatattatagaatatagtccagttaaatctttggtttcagtatgtctgaagagtacagtgagaggttaatttctgctcaagtggtaccacttaaaggcatgtattcttttagtatgtaaaatgaaatagtaccttgagtttaaatagaatgcatttaggcattgtagagatctgaaatagttttcttccactacattgttgaaatcaatgaagcaattagtttctcattcagaaatgtgcacactaatatttagttttgctttctcgtggataatattaagcacttactctgcagtttcctggaagttgtgtcaactgcagtgatactattcaggatggtgggaaatccccaaaaatatgtatgtgtgggcttgcttagattactatatttcatagttaatcttttgtctcttgcggtgctcatgatgtgtggggcacacggaaggcattgctgtagtcagtcattttggttttcttctatagccattttattattttagtgtattagttatgaagataatattatctatttgtaaattgctactttgtattttatgcatgctctgtaatttgatttttttttagttattgatttggattatattcacattctaataaacagttatagggggattatttcttatgctgtcagattacatttttcctttgagtgctttgggtgcagccgtggaatcctgatgtaaaagcataggttcttgcattactgagtaaacattgaattgggagcatc

SEQ ID NO: 24834 - protein, 198 aa, Homo sapiens; identical to SEQ ID NO: 24828

SEQ ID NO: 24835 - DNA, 4878 bp, Homo sapiens
gcagcggcagggaggggctcttcacccagtccggcagttgaagctcggcgctcgggttacccctgcagcgacgccccctggtcccacagataccactgctgctcccgccctttcgctcctcggccgcgcaatgggcacccgcgacgacgagtacgactacctctttaaagttgtccttattggagattctggtgttggaaagagtaatctcctgtctcgatttactcgaaatgagtttaatctggaaagcaagagcaccattggagtagagtttgcaacaagaagcatccaggttgatggaaaaacaataaaggcacagatatgggacacagcagggcaagagcgatatcgagctataacatcagcatattatcgtggagctgtaggtgccttattggtttatgacattgctaaacatctcacatatgaaaatgtagagcgatggctgaaagaactgagagatcatgctgatagtaacattgttatcatgcttgtgggcaataagagtgatctacgtcatctcagggcagttcctacagatgaagcaagagcttttgcagaagctgcttttcagacaattttaacagagatttaccgcattgtttctcagaagcaaatgtcagacagacgcgaaaatgacatgtctccaagcaacaatgtggttcctattcatgttccaccaaccactgaaaacaagccaaaggtgcagtgctgtcagaacatctaaggcatttctcttctcccctagaaggctgtgtatagtccatttcccaggtctgagatttaaatatatttgtaattcttgtgtcacttttgtgttttattacttcatacttatgaatttttccatgtcctaagtcttttgattttagctttataaaatcatccacttgtcccgaatgactgcagctttttttcatgctatggcttcactagccttagtttaataaactgaatgtttggattcctcagttattgtttacttttcatcatggaagcctgtcactgtatgtaggacataatagaacttgatcacttgaagctcagacctattggtcttgatcaaatcaaactaagaagaccttagaaataagctaccattttgccacagagcagcttataggtaatacactcttctctcagtgcagtgtacatttccacaaatctaagaattgccctataaacatagcaggattttgagagcttgaaaattttccattattctggacatgaatttctaaaatgccttaataggtttatgtagttgagtaaattttgttttttaatttttgtaagcatcaaagttgattagagaggggggcactttttctggagaattctcttagtaaacacaaaagattgttacggtttcattagtagtatggttgtggggccataagttaaacagtgctgcctggtaggctgggaactgaagagacttgtggtattccatctcgggtgcctctgttggcaatgatcaggcagcccaaaagatttaaatgatctataataatttccaagcggtagattatgtggcattttattgctcaggcaataattggtttaatgctggtagtgtcaaattttgaagtgttaattttgtcttagaaccttccagtaagtgaaatacaacctagttttatcaccatatccaccagcaggcatggataattattttaacaatgctaatatttgagttttgcagtatattatagaatatagtccagttaaatctttggtttcagtatgtctgaagagtacagtgagaggttaatttctgctcaagtggtaccacttaaaggcatgtattcttttagtatgtaaaatgaaatagtaccttgagtttaaatagaatgcatttaggcattgtagagatctgaaatagttttcttccactacattgttgaaatcaatgaagcaattagtttctcattcagaaatgtgcacactaatatttagttttgctttctcgtggataatattaagcacttactctgcagtttcctggaagttgtgtcaactgcagtgatactattcaggatggtgggaaatccccaaaaatatgtatgtgtgggcttgcttagattactatatttcatagttaatcttttgtctcttgcggtgctcatgatgtgtggggcacacggaaggcattgctgtagtcagtcattttggttttcttctatagccattttattattttagtgtattagttatgaagataatattatctatttgtaaattgctactttgtattttatgcatgctctgtaatttgatttttttttagttattgatttggattatattcacattctaataaacagttatagggggattatttcttatgctgtcagattacatttttcctttgagtgctttgggtgcagccgtggaatcctgatgtaaaagcataggttcttgcattactgagtaaacattgaattgggagcatcagtgtgtgaattcagctttgattttagaactgcagttcaattatgctttccttggaaaaagtatgtccaaaaacattaggaaagtagtgtgtattttcatatataacagtgtcaccagacccaggaaaagaaaccatctctattttattgaaagttggtggtagattttttacaaagtaaggagaaaagagaaaaactaaatagtgaattgaaaatgaataaagtaaacttagaatttttacccaagtgtagacttaaatgttgctttgagtatggctggatcttgggagaattccaggaaatattaggtattagaaaatgactttgattgcatttcagcaggtgtctttattctgagtagtatcttaggagacaaactgtctcaagcaagaaacaataaatttttaaatattatgacagttcagggcttaaggcagtttagaagtattttgctacttgaccttgattttcagttattttaactttgaatttttttttttttttttgagacggagtcttgctctgttgcccaggctggagtacaatggcaccatctcagctcactgcaagctccacctccagggttcatgccattctcctgcctcagcctcccgagtagctgggattataggcgccagccaccacgactggctaattttttgtatttttagtagagacggggtttcaccatgttagccagggtggtctcgatctcctgacctggtgatacacccacctcggcctcccaaagtgctgggattaaaggcgtgagccaccgtgcctggccttgaatttttttttaacctgttatatagtctcctgaatagttagccatggtgccttgatttaatcttatgtcattgttctcaaatgccatgatttctctttaatagtagttgtcattatgtaagggtaagttattgcccatttaattgtaattataagaagaggtgccagctagtgaccttacatcagtgatcttttaagttctgaagggttctgcagaaaagttacacttcttgagtttgggttgcccatcagagctggtcacatttctttgatcattgaaaaaatgaatatcttaatttttgtctttgctgactggtatttataaaatacaaatgcttttagtgggttgagctgttgtgataatctcttccatctaccttagagaagaagctgtactatttagacagttttggccaacactagaagcaaaagaattcaaaggctgggtggatatttaagaacttattctaacctgtcaggtttcaatttgtggggcttggtttaacagaggaaaaaaatataaattgattttctgatgtctcacaaatatcacatacctggaaaaaaattaaaacaaaaaatgaattttgtaaaaggttatgtatgacttccatttgctctgtaaaaaaatgaacaaagattgtgaaaggatcctcttccaccacatcatttaatgggttagcggaacagatagggagctatgacactagcaccaaagagagatttttcttctggttgggtggtgctggtgccacgcccctttctgggatttgacaagtctttcccactcacctatacaatatgccaaatcaactggagttgtcattctaatgttttaaagaatgattgggttcccccaaactgtaggaggtcgatggtaacaataaagtgatacaaaatgcttatgtcattataatttatgtaagggagaccattaggctgagaatcaatatgattgaggttatctattctcctgaaaagtgaattggagaataaagaaagaatatttgaaaggatgttgtgtactaggcaatatactagcatgtattagaaaatacggtaaactgtgggttagaagagtgaaagtagctggtatgatagagcactggactgagtaacgaagagattctagtcatggctcttgtggtcatttcatttttgagcctcacattcttccaattaatgagggtaccagattaaataaactctggggattcatcccaattcgaactctgtaattctctgaatgaactctctcttcaattaaagccaaattattaacattttaactcaagtttaaatttaatagagaagtcaaaatgaggtatgcactttgtggaatgtttttggtcttatcacaataacctgattaaaatggtgcctttatttccatgtttactcctttaaataagatgaaagctttcagaacatttatttgcaaaatgactgtcaatatcaacaatatgcatcaaagtaccatatatgctaagggagaggagcacttgatgggctgctatgttaactgtaaattgagaactgcttgttttatggcttttgctgttaaaaaaaaactgctggcttttaatatgtactttaaaatatactcatgtctgggagagaacttttaaaaaca

SEQ ID NO: 24836 - protein, 198 aa, Homo sapiens; identical to SEQ ID NO: 24828

SEQ ID NO: 24837 - DNA, 767 bp, Homo sapiens
ccggcagttgaagctcggcgctcgggttacccctgcagcgacgccccctggtcccacagataccactgctgctcccgccctttcgctcctcggccgcgcaatgggcacccgcgacgacgagtacgactacctctttaaagttgtccttattggagattctggtgttggaaagaagtttgcaacaagaagcatccaggttgatggaaaaacaataaaggcacagatatgggacacagcagggcaagagcgatatcgagctataacatcagcatattatcgtggagctgtaggtgccttattggtttatgacattgctaaacatctcacatatgaaaatgtagagcgatggctgaaagaactgagagatcatgctgatagtaacattgttatcatgcttgtgggcaataagagtgatctacgtcatctcagggcagttcctacagatgaagcaagagcttttgcagaaaagaatggtttgtcattcattgaaacttcggccctagactctacaaatgtagaagctgcttttcagacaattttaacagagatttaccgcattgtttctcagaagcaaatgtcagacagacgcgaaaatgacatgtctccaagcaacaatgtggttcctattcatgttccaccaaccactgaaaacaagccaaaggtgcagtgctgtcagaacatctaaggcatttctcttctcccctagaaggctgtgtatagtccatttcccaggtctgagatttaaatatatttgtaattcttgtgtc

SEQ ID NO: 24838 - protein, 194 aa, Homo sapiens
MGTRDDEYDYLFKVVLIGDSGVGKKFATRSIQVDGKTIKAQIWDTAGQERYRAITSAYYRGAVGALLVYDIAKHLTYENVERWLKELRDHADSNIVIMLVGNKSDLRHLRAVPTDEARAFAEKNGLSFIETSALDSTNVEAAFQTILTEIYRIVSQKQMSDRRENDMSPSNNVVPIHVPPTTENKPKVQCCQNI

SEQ ID NO: 24839 - DNA, 928 bp, Homo sapiens
ccggcagttgaagctcggcgctcgggttacccctgcagcgacgccccctggtcccacagataccactgctgctcccgccctttcgctcctcggccgcgcaatgggcacccgcgacgacgagtacgactacctctttaaagttgtccttattggagattctggtgttggaaagaagtttgcaacaagaagcatccaggttgatggaaaaacaataaaggcacagatatgggacacagcagggcaagagcgatatcgagctataacatcagcatattatcgtggagctgtaggtgccttattggtttatgacattgctaaacatctcacatatgaaaatgtagagcgatggctgaaagaactgagagatcatgctgatagtaacattgttatcatgcttgtgggcaataagagtgatctacgtcatctcagggcagttcctacagatgaagcaagagcttttgcagaaaagaatggtttgtcattcattgaaacttcggccctagactctacaaatgtagaagctgcttttcagacaattttaacagagatttaccgcattgtttctcagaagcaaatgtcagacagacgcgaaaatgacatgtctccaagcaacaatgtggttcctattcatgttccaccaaccactgaaaacaagccaaaggtgcagtgctgtcagaacatctaaggcatttctcttctcccctagaaggctgtgtatagtccatttcccaggtctgagatttaaatatatttgtaattcttgtgtcacttttgtgttttattacttcatacttatgaatttttccatgtcctaagtcttttgattttagctttataaaatcatccacttgtcccgaatgactgcagctttttttcatgctatggcttcactagccttagtttaataaactgaatgtttggattcctc

SEQ ID NO: 24840 - protein, 194 aa, Homo sapiens; identical to SEQ ID NO: 24838

SEQ ID NO: 24841 - DNA, 2301 bp, Homo sapiens
ccggcagttgaagctcggcgctcgggttacccctgcagcgacgccccctggtcccacagataccactgctgctcccgccctttcgctcctcggccgcgcaatgggcacccgcgacgacgagtacgactacctctttaaagttgtccttattggagattctggtgttggaaagaagtttgcaacaagaagcatccaggttgatggaaaaacaataaaggcacagatatgggacacagcagggcaagagcgatatcgagctataacatcagcatattatcgtggagctgtaggtgccttattggtttatgacattgctaaacatctcacatatgaaaatgtagagcgatggctgaaagaactgagagatcatgctgatagtaacattgttatcatgcttgtgggcaataagagtgatctacgtcatctcagggcagttcctacagatgaagcaagagcttttgcagaaaagaatggtttgtcattcattgaaacttcggccctagactctacaaatgtagaagctgcttttcagacaattttaacagagatttaccgcattgtttctcagaagcaaatgtcagacagacgcgaaaatgacatgtctccaagcaacaatgtggttcctattcatgttccaccaaccactgaaaacaagccaaaggtgcagtgctgtcagaacatctaaggcatttctcttctcccctagaaggctgtgtatagtccatttcccaggtctgagatttaaatatatttgtaattcttgtgtcacttttgtgttttattacttcatacttatgaatttttccatgtcctaagtcttttgattttagctttataaaatcatccacttgtcccgaatgactgcagctttttttcatgctatggcttcactagccttagtttaataaactgaatgtttggattcctcagttattgtttacttttcatcatggaagcctgtcactgtatgtaggacataatagaacttgatcacttgaagctcagacctattggtcttgatcaaatcaaactaagaagaccttagaaataagctaccattttgccacagagcagcttataggtaatacactcttctctcagtgcagtgtacatttccacaaatctaagaattgccctataaacatagcaggattttgagagcttgaaaattttccattattctggacatgaatttctaaaatgccttaataggtttatgtagttgagtaaattttgttttttaatttttgtaagcatcaaagttgattagagaggggggcactttttctggagaattctcttagtaaacacaaaagattgttacggtttcattagtagtatggttgtggggccataagttaaacagtgctgcctggtaggctgggaactgaagagacttgtggtattccatctcgggtgcctctgttggcaatgatcaggcagcccaaaagatttaaatgatctataataatttccaagcggtagattatgtggcattttattgctcaggcaataattggtttaatgctggtagtgtcaaattttgaagtgttaattttgtcttagaaccttccagtaagtgaaatacaacctagttttatcaccatatccaccagcaggcatggataattattttaacaatgctaatatttgagttttgcagtatattatagaatatagtccagttaaatctttggtttcagtatgtctgaagagtacagtgagaggttaatttctgctcaagtggtaccacttaaaggcatgtattcttttagtatgtaaaatgaaatagtaccttgagtttaaatagaatgcatttaggcattgtagagatctgaaatagttttcttccactacattgttgaaatcaatgaagcaattagtttctcattcagaaatgtgcacactaatatttagttttgctttctcgtggataatattaagcacttactctgcagtttcctggaagttgtgtcaactgcagtgatactattcaggatggtgggaaatccccaaaaatatgtatgtgtgggcttgcttagattactatatttcatagttaatcttttgtctcttgcggtgctcatgatgtgtggggcacacggaaggcattgctgtagtcagtcattttggttttcttctatagccattttattattttagtgtattagttatgaagataatattatctatttgtaaattgctactttgtattttatgcatgctctgtaatttgatttttttttagttattgatttggattatattcacattctaataaacagttatagggggattatt

SEQ ID NO: 24842 - protein, 194 aa, Homo sapiens; identical to SEQ ID NO: 24838

SEQ ID NO: 24843 - DNA, 2414 bp, Homo sapiens
ccggcagttgaagctcggcgctcgggttacccctgcagcgacgccccctggtcccacagataccactgctgctcccgccctttcgctcctcggccgcgcaatgggcacccgcgacgacgagtacgactacctctttaaagttgtccttattggagattctggtgttggaaagaagtttgcaacaagaagcatccaggttgatggaaaaacaataaaggcacagatatgggacacagcagggcaagagcgatatcgagctataacatcagcatattatcgtggagctgtaggtgccttattggtttatgacattgctaaacatctcacatatgaaaatgtagagcgatggctgaaagaactgagagatcatgctgatagtaacattgttatcatgcttgtgggcaataagagtgatctacgtcatctcagggcagttcctacagatgaagcaagagcttttgcagaaaagaatggtttgtcattcattgaaacttcggccctagactctacaaatgtagaagctgcttttcagacaattttaacagagatttaccgcattgtttctcagaagcaaatgtcagacagacgcgaaaatgacatgtctccaagcaacaatgtggttcctattcatgttccaccaaccactgaaaacaagccaaaggtgcagtgctgtcagaacatctaaggcatttctcttctcccctagaaggctgtgtatagtccatttcccaggtctgagatttaaatatatttgtaattcttgtgtcacttttgtgttttattacttcatacttatgaatttttccatgtcctaagtcttttgattttagctttataaaatcatccacttgtcccgaatgactgcagctttttttcatgctatggcttcactagccttagtttaataaactgaatgtttggattcctcagttattgtttacttttcatcatggaagcctgtcactgtatgtaggacataatagaacttgatcacttgaagctcagacctattggtcttgatcaaatcaaactaagaagaccttagaaataagctaccattttgccacagagcagcttataggtaatacactcttctctcagtgcagtgtacatttccacaaatctaagaattgccctataaacatagcaggattttgagagcttgaaaattttccattattctggacatgaatttctaaaatgccttaataggtttatgtagttgagtaaattttgttttttaatttttgtaagcatcaaagttgattagagaggggggcactttttctggagaattctcttagtaaacacaaaagattgttacggtttcattagtagtatggttgtggggccataagttaaacagtgctgcctggtaggctgggaactgaagagacttgtggtattccatctcgggtgcctctgttggcaatgatcaggcagcccaaaagatttaaatgatctataataatttccaagcggtagattatgtggcattttattgctcaggcaataattggtttaatgctggtagtgtcaaattttgaagtgttaattttgtcttagaaccttccagtaagtgaaatacaacctagttttatcaccatatccaccagcaggcatggataattattttaacaatgctaatatttgagttttgcagtatattatagaatatagtccagttaaatctttggtttcagtatgtctgaagagtacagtgagaggttaatttctgctcaagtggtaccacttaaaggcatgtattcttttagtatgtaaaatgaaatagtaccttgagtttaaatagaatgcatttaggcattgtagagatctgaaatagttttcttccactacattgttgaaatcaatgaagcaattagtttctcattcagaaatgtgcacactaatatttagttttgctttctcgtggataatattaagcacttactctgcagtttcctggaagttgtgtcaactgcagtgatactattcaggatggtgggaaatccccaaaaatatgtatgtgtgggcttgcttagattactatatttcatagttaatcttttgtctcttgcggtgctcatgatgtgtggggcacacggaaggcattgctgtagtcagtcattttggttttcttctatagccattttattattttagtgtattagttatgaagataatattatctatttgtaaattgctactttgtattttatgcatgctctgtaatttgatttttttttagttattgatttggattatattcacattctaataaacagttatagggggattatttcttatgctgtcagattacatttttcctttgagtgctttgggtgcagccgtggaatcctgatgtaaaagcataggttcttgcattactgagtaaacattgaattgggagcatc

SEQ ID NO: 24844 - protein, 194 aa, Homo sapiens; identical to SEQ ID NO: 24838

SEQ ID NO: 24845 - DNA, 4836 bp, Homo sapiens
ccggcagttgaagctcggcgctcgggttacccctgcagcgacgccccctggtcccacagataccactgctgctcccgccctttcgctcctcggccgcgcaatgggcacccgcgacgacgagtacgactacctctttaaagttgtccttattggagattctggtgttggaaagaagtttgcaacaagaagcatccaggttgatggaaaaacaataaaggcacagatatgggacacagcagggcaagagcgatatcgagctataacatcagcatattatcgtggagctgtaggtgccttattggtttatgacattgctaaacatctcacatatgaaaatgtagagcgatggctgaaagaactgagagatcatgctgatagtaacattgttatcatgcttgtgggcaataagagtgatctacgtcatctcagggcagttcctacagatgaagcaagagcttttgcagaaaagaatggtttgtcattcattgaaacttcggccctagactctacaaatgtagaagctgcttttcagacaattttaacagagatttaccgcattgtttctcagaagcaaatgtcagacagacgcgaaaatgacatgtctccaagcaacaatgtggttcctattcatgttccaccaaccactgaaaacaagccaaaggtgcagtgctgtcagaacatctaaggcatttctcttctcccctagaaggctgtgtatagtccatttcccaggtctgagatttaaatatatttgtaattcttgtgtcacttttgtgttttattacttcatacttatgaatttttccatgtcctaagtcttttgattttagctttataaaatcatccacttgtcccgaatgactgcagctttttttcatgctatggcttcactagccttagtttaataaactgaatgtttggattcctcagttattgtttacttttcatcatggaagcctgtcactgtatgtaggacataatagaacttgatcacttgaagctcagacctattggtcttgatcaaatcaaactaagaagaccttagaaataagctaccattttgccacagagcagcttataggtaatacactcttctctcagtgcagtgtacatttccacaaatctaagaattgccctataaacatagcaggattttgagagcttgaaaattttccattattctggacatgaatttctaaaatgccttaataggtttatgtagttgagtaaattttgttttttaatttttgtaagcatcaaagttgattagagaggggggcactttttctggagaattctcttagtaaacacaaaagattgttacggtttcattagtagtatggttgtggggccataagttaaacagtgctgcctggtaggctgggaactgaagagacttgtggtattccatctcgggtgcctctgttggcaatgatcaggcagcccaaaagatttaaatgatctataataatttccaagcggtagattatgtggcattttattgctcaggcaataattggtttaatgctggtagtgtcaaattttgaagtgttaattttgtcttagaaccttccagtaagtgaaatacaacctagttttatcaccatatccaccagcaggcatggataattattttaacaatgctaatatttgagttttgcagtatattatagaatatagtccagttaaatctttggtttcagtatgtctgaagagtacagtgagaggttaatttctgctcaagtggtaccacttaaaggcatgtattcttttagtatgtaaaatgaaatagtaccttgagtttaaatagaatgcatttaggcattgtagagatctgaaatagttttcttccactacattgttgaaatcaatgaagcaattagtttctcattcagaaatgtgcacactaatatttagttttgctttctcgtggataatattaagcacttactctgcagtttcctggaagttgtgtcaactgcagtgatactattcaggatggtgggaaatccccaaaaatatgtatgtgtgggcttgcttagattactatatttcatagttaatcttttgtctcttgcggtgctcatgatgtgtggggcacacggaaggcattgctgtagtcagtcattttggttttcttctatagccattttattattttagtgtattagttatgaagataatattatctatttgtaaattgctactttgtattttatgcatgctctgtaatttgatttttttttagttattgatttggattatattcacattctaataaacagttatagggggattatttcttatgctgtcagattacatttttcctttgagtgctttgggtgcagccgtggaatcctgatgtaaaagcataggttcttgcattactgagtaaacattgaattgggagcatcagtgtgtgaattcagctttgattttagaactgcagttcaattatgctttccttggaaaaagtatgtccaaaaacattaggaaagtagtgtgtattttcatatataacagtgtcaccagacccaggaaaagaaaccatctctattttattgaaagttggtggtagattttttacaaagtaaggagaaaagagaaaaactaaatagtgaattgaaaatgaataaagtaaacttagaatttttacccaagtgtagacttaaatgttgctttgagtatggctggatcttgggagaattccaggaaatattaggtattagaaaatgactttgattgcatttcagcaggtgtctttattctgagtagtatcttaggagacaaactgtctcaagcaagaaacaataaatttttaaatattatgacagttcagggcttaaggcagtttagaagtattttgctacttgaccttgattttcagttattttaactttgaatttttttttttttttttgagacggagtcttgctctgttgcccaggctggagtacaatggcaccatctcagctcactgcaagctccacctccagggttcatgccattctcctgcctcagcctcccgagtagctgggattataggcgccagccaccacgactggctaattttttgtatttttagtagagacggggtttcaccatgttagccagggtggtctcgatctcctgacctggtgatacacccacctcggcctcccaaagtgctgggattaaaggcgtgagccaccgtgcctggccttgaatttttttttaacctgttatatagtctcctgaatagttagccatggtgccttgatttaatcttatgtcattgttctcaaatgccatgatttctctttaatagtagttgtcattatgtaagggtaagttattgcccatttaattgtaattataagaagaggtgccagctagtgaccttacatcagtgatcttttaagttctgaagggttctgcagaaaagttacacttcttgagtttgggttgcccatcagagctggtcacatttctttgatcattgaaaaaatgaatatcttaatttttgtctttgctgactggtatttataaaatacaaatgcttttagtgggttgagctgttgtgataatctcttccatctaccttagagaagaagctgtactatttagacagttttggccaacactagaagcaaaagaattcaaaggctgggtggatatttaagaacttattctaacctgtcaggtttcaatttgtggggcttggtttaacagaggaaaaaaatataaattgattttctgatgtctcacaaatatcacatacctggaaaaaaattaaaacaaaaaatgaattttgtaaaaggttatgtatgacttccatttgctctgtaaaaaaatgaacaaagattgtgaaaggatcctcttccaccacatcatttaatgggttagcggaacagatagggagctatgacactagcaccaaagagagatttttcttctggttgggtggtgctggtgccacgcccctttctgggatttgacaagtctttcccactcacctatacaatatgccaaatcaactggagttgtcattctaatgttttaaagaatgattgggttcccccaaactgtaggaggtcgatggtaacaataaagtgatacaaaatgcttatgtcattataatttatgtaagggagaccattaggctgagaatcaatatgattgaggttatctattctcctgaaaagtgaattggagaataaagaaagaatatttgaaaggatgttgtgtactaggcaatatactagcatgtattagaaaatacggtaaactgtgggttagaagagtgaaagtagctggtatgatagagcactggactgagtaacgaagagattctagtcatggctcttgtggtcatttcatttttgagcctcacattcttccaattaatgagggtaccagattaaataaactctggggattcatcccaattcgaactctgtaattctctgaatgaactctctcttcaattaaagccaaattattaacattttaactcaagtttaaatttaatagagaagtcaaaatgaggtatgcactttgtggaatgtttttggtcttatcacaataacctgattaaaatggtgcctttatttccatgtttactcctttaaataagatgaaagctttcagaacatttatttgcaaaatgactgtcaatatcaacaatatgcatcaaagtaccatatatgctaagggagaggagcacttgatgggctgctatgttaactgtaaattgagaactgcttgttttatggcttttgctgttaaaaaaaaactgctggcttttaatatgtactttaaaatatactcatgtctgggagagaacttttaaaaaca

SEQ ID NO: 24846 - protein, 194 aa, Homo sapiens; identical to SEQ ID NO: 24838

SEQ ID NO: 24847 - DNA, 767 bp, Homo sapiens
cctctcccgaagcccctctgacgggttcttcgcttccctcttggccttgccttcggtgcagactcccattacagttgtccttattggagattctggtgttggaaagagtaatctcctgtctcgatttactcgaaatgagtttaatctggaaagcaagagcaccattggagtagagtttgcaacaagaagcatccaggttgatggaaaaacaataaaggcacagatatgggacacagcagggcaagagcgatatcgagctataacatcagcatattatcgtggagctgtaggtgccttattggtttatgacattgctaaacatctcacatatgaaaatgtagagcgatggctgaaagaactgagagatcatgctgatagtaacattgttatcatgcttgtgggcaataagagtgatctacgtcatctcagggcagttcctacagatgaagcaagagcttttgcagaaaagaatggtttgtcattcattgaaacttcggccctagactctacaaatgtagaagctgcttttcagacaattttaacagagatttaccgcattgtttctcagaagcaaatgtcagacagacgcgaaaatgacatgtctccaagcaacaatgtggttcctattcatgttccaccaaccactgaaaacaagccaaaggtgcagtgctgtcagaacatctaaggcatttctcttctcccctagaaggctgtgtatagtccatttcccaggtctgagatttaaatatatttgtaattcttgtgtc

SEQ ID NO: 24848 - protein, 97 aa, Homo sapiens
MLVGNKSDLRHLRAVPTDEARAFAEKNGLSFIETSALDSTNVEAAFQTILTEIYRIVSQKQMSDRRENDMSPSNNVVPIHVPPTTENKPKVQCCQNI

SEQ ID NO: 24849 - DNA, 928 bp, Homo sapiens
cctctcccgaagcccctctgacgggttcttcgcttccctcttggccttgccttcggtgcagactcccattacagttgtccttattggagattctggtgttggaaagagtaatctcctgtctcgatttactcgaaatgagtttaatctggaaagcaagagcaccattggagtagagtttgcaacaagaagcatccaggttgatggaaaaacaataaaggcacagatatgggacacagcagggcaagagcgatatcgagctataacatcagcatattatcgtggagctgtaggtgccttattggtttatgacattgctaaacatctcacatatgaaaatgtagagcgatggctgaaagaactgagagatcatgctgatagtaacattgttatcatgcttgtgggcaataagagtgatctacgtcatctcagggcagttcctacagatgaagcaagagcttttgcagaaaagaatggtttgtcattcattgaaacttcggccctagactctacaaatgtagaagctgcttttcagacaattttaacagagatttaccgcattgtttctcagaagcaaatgtcagacagacgcgaaaatgacatgtctccaagcaacaatgtggttcctattcatgttccaccaaccactgaaaacaagccaaaggtgcagtgctgtcagaacatctaaggcatttctcttctcccctagaaggctgtgtatagtccatttcccaggtctgagatttaaatatatttgtaattcttgtgtcacttttgtgttttattacttcatacttatgaatttttccatgtcctaagtcttttgattttagctttataaaatcatccacttgtcccgaatgactgcagctttttttcatgctatggcttcactagccttagtttaataaactgaatgtttggattcctc

SEQ ID NO: 24850 - protein, 97 aa, Homo sapiens; identical to SEQ ID NO: 24848

SEQ ID NO: 24851 - DNA, 2301 bp, Homo sapiens
cctctcccgaagcccctctgacgggttcttcgcttccctcttggccttgccttcggtgcagactcccattacagttgtccttattggagattctggtgttggaaagagtaatctcctgtctcgatttactcgaaatgagtttaatctggaaagcaagagcaccattggagtagagtttgcaacaagaagcatccaggttgatggaaaaacaataaaggcacagatatgggacacagcagggcaagagcgatatcgagctataacatcagcatattatcgtggagctgtaggtgccttattggtttatgacattgctaaacatctcacatatgaaaatgtagagcgatggctgaaagaactgagagatcatgctgatagtaacattgttatcatgcttgtgggcaataagagtgatctacgtcatctcagggcagttcctacagatgaagcaagagcttttgcagaaaagaatggtttgtcattcattgaaacttcggccctagactctacaaatgtagaagctgcttttcagacaattttaacagagatttaccgcattgtttctcagaagcaaatgtcagacagacgcgaaaatgacatgtctccaagcaacaatgtggttcctattcatgttccaccaaccactgaaaacaagccaaaggtgcagtgctgtcagaacatctaaggcatttctcttctcccctagaaggctgtgtatagtccatttcccaggtctgagatttaaatatatttgtaattcttgtgtcacttttgtgttttattacttcatacttatgaatttttccatgtcctaagtcttttgattttagctttataaaatcatccacttgtcccgaatgactgcagctttttttcatgctatggcttcactagccttagtttaataaactgaatgtttggattcctcagttattgtttacttttcatcatggaagcctgtcactgtatgtaggacataatagaacttgatcacttgaagctcagacctattggtcttgatcaaatcaaactaagaagaccttagaaataagctaccattttgccacagagcagcttataggtaatacactcttctctcagtgcagtgtacatttccacaaatctaagaattgccctataaacatagcaggattttgagagcttgaaaattttccattattctggacatgaatttctaaaatgccttaataggtttatgtagttgagtaaattttgttttttaatttttgtaagcatcaaagttgattagagaggggggcactttttctggagaattctcttagtaaacacaaaagattgttacggtttcattagtagtatggttgtggggccataagttaaacagtgctgcctggtaggctgggaactgaagagacttgtggtattccatctcgggtgcctctgttggcaatgatcaggcagcccaaaagatttaaatgatctataataatttccaagcggtagattatgtggcattttattgctcaggcaataattggtttaatgctggtagtgtcaaattttgaagtgttaattttgtcttagaaccttccagtaagtgaaatacaacctagttttatcaccatatccaccagcaggcatggataattattttaacaatgctaatatttgagttttgcagtatattatagaatatagtccagttaaatctttggtttcagtatgtctgaagagtacagtgagaggttaatttctgctcaagtggtaccacttaaaggcatgtattcttttagtatgtaaaatgaaatagtaccttgagtttaaatagaatgcatttaggcattgtagagatctgaaatagttttcttccactacattgttgaaatcaatgaagcaattagtttctcattcagaaatgtgcacactaatatttagttttgctttctcgtggataatattaagcacttactctgcagtttcctggaagttgtgtcaactgcagtgatactattcaggatggtgggaaatccccaaaaatatgtatgtgtgggcttgcttagattactatatttcatagttaatcttttgtctcttgcggtgctcatgatgtgtggggcacacggaaggcattgctgtagtcagtcattttggttttcttctatagccattttattattttagtgtattagttatgaagataatattatctatttgtaaattgctactttgtattttatgcatgctctgtaatttgatttttttttagttattgatttggattatattcacattctaataaacagttatagggggattatt

SEQ ID NO: 24852 - protein, 97 aa, Homo sapiens; identical to SEQ ID NO: 24848

SEQ ID NO: 24853 - DNA, 2414 bp, Homo sapiens
cctctcccgaagcccctctgacgggttcttcgcttccctcttggccttgccttcggtgcagactcccattacagttgtccttattggagattctggtgttggaaagagtaatctcctgtctcgatttactcgaaatgagtttaatctggaaagcaagagcaccattggagtagagtttgcaacaagaagcatccaggttgatggaaaaacaataaaggcacagatatgggacacagcagggcaagagcgatatcgagctataacatcagcatattatcgtggagctgtaggtgccttattggtttatgacattgctaaacatctcacatatgaaaatgtagagcgatggctgaaagaactgagagatcatgctgatagtaacattgttatcatgcttgtgggcaataagagtgatctacgtcatctcagggcagttcctacagatgaagcaagagcttttgcagaaaagaatggtttgtcattcattgaaacttcggccctagactctacaaatgtagaagctgcttttcagacaattttaacagagatttaccgcattgtttctcagaagcaaatgtcagacagacgcgaaaatgacatgtctccaagcaacaatgtggttcctattcatgttccaccaaccactgaaaacaagccaaaggtgcagtgctgtcagaacatctaaggcatttctcttctcccctagaaggctgtgtatagtccatttcccaggtctgagatttaaatatatttgtaattcttgtgtcacttttgtgttttattacttcatacttatgaatttttccatgtcctaagtcttttgattttagctttataaaatcatccacttgtcccgaatgactgcagctttttttcatgctatggcttcactagccttagtttaataaactgaatgtttggattcctcagttattgtttacttttcatcatggaagcctgtcactgtatgtaggacataatagaacttgatcacttgaagctcagacctattggtcttgatcaaatcaaactaagaagaccttagaaataagctaccattttgccacagagcagcttataggtaatacactcttctctcagtgcagtgtacatttccacaaatctaagaattgccctataaacatagcaggattttgagagcttgaaaattttccattattctggacatgaatttctaaaatgccttaataggtttatgtagttgagtaaattttgttttttaatttttgtaagcatcaaagttgattagagaggggggcactttttctggagaattctcttagtaaacacaaaagattgttacggtttcattagtagtatggttgtggggccataagttaaacagtgctgcctggtaggctgggaactgaagagacttgtggtattccatctcgggtgcctctgttggcaatgatcaggcagcccaaaagatttaaatgatctataataatttccaagcggtagattatgtggcattttattgctcaggcaataattggtttaatgctggtagtgtcaaattttgaagtgttaattttgtcttagaaccttccagtaagtgaaatacaacctagttttatcaccatatccaccagcaggcatggataattattttaacaatgctaatatttgagttttgcagtatattatagaatatagtccagttaaatctttggtttcagtatgtctgaagagtacagtgagaggttaatttctgctcaagtggtaccacttaaaggcatgtattcttttagtatgtaaaatgaaatagtaccttgagtttaaatagaatgcatttaggcattgtagagatctgaaatagttttcttccactacattgttgaaatcaatgaagcaattagtttctcattcagaaatgtgcacactaatatttagttttgctttctcgtggataatattaagcacttactctgcagtttcctggaagttgtgtcaactgcagtgatactattcaggatggtgggaaatccccaaaaatatgtatgtgtgggcttgcttagattactatatttcatagttaatcttttgtctcttgcggtgctcatgatgtgtggggcacacggaaggcattgctgtagtcagtcattttggttttcttctatagccattttattattttagtgtattagttatgaagataatattatctatttgtaaattgctactttgtattttatgcatgctctgtaatttgatttttttttagttattgatttggattatattcacattctaataaacagttatagggggattatttcttatgctgtcagattacatttttcctttgagtgctttgggtgcagccgtggaatcctgatgtaaaagcataggttcttgcattactgagtaaacattgaattgggagcatc

SEQ ID NO: 24854 - protein, 97 aa, Homo sapiens; identical to SEQ ID NO: 24848

SEQ ID NO: 24855 - DNA, 4836 bp, Homo sapiens
cctctcccgaagcccctctgacgggttcttcgcttccctcttggccttgccttcggtgcagactcccattacagttgtccttattggagattctggtgttggaaagagtaatctcctgtctcgatttactcgaaatgagtttaatctggaaagcaagagcaccattggagtagagtttgcaacaagaagcatccaggttgatggaaaaacaataaaggcacagatatgggacacagcagggcaagagcgatatcgagctataacatcagcatattatcgtggagctgtaggtgccttattggtttatgacattgctaaacatctcacatatgaaaatgtagagcgatggctgaaagaactgagagatcatgctgatagtaacattgttatcatgcttgtgggcaataagagtgatctacgtcatctcagggcagttcctacagatgaagcaagagcttttgcagaaaagaatggtttgtcattcattgaaacttcggccctagactctacaaatgtagaagctgcttttcagacaattttaacagagatttaccgcattgtttctcagaagcaaatgtcagacagacgcgaaaatgacatgtctccaagcaacaatgtggttcctattcatgttccaccaaccactgaaaacaagccaaaggtgcagtgctgtcagaacatctaaggcatttctcttctcccctagaaggctgtgtatagtccatttcccaggtctgagatttaaatatatttgtaattcttgtgtcacttttgtgttttattacttcatacttatgaatttttccatgtcctaagtcttttgattttagctttataaaatcatccacttgtcccgaatgactgcagctttttttcatgctatggcttcactagccttagtttaataaactgaatgtttggattcctcagttattgtttacttttcatcatggaagcctgtcactgtatgtaggacataatagaacttgatcacttgaagctcagacctattggtcttgatcaaatcaaactaagaagaccttagaaataagctaccattttgccacagagcagcttataggtaatacactcttctctcagtgcagtgtacatttccacaaatctaagaattgccctataaacatagcaggattttgagagcttgaaaattttccattattctggacatgaatttctaaaatgccttaataggtttatgtagttgagtaaattttgttttttaatttttgtaagcatcaaagttgattagagaggggggcactttttctggagaattctcttagtaaacacaaaagattgttacggtttcattagtagtatggttgtggggccataagttaaacagtgctgcctggtaggctgggaactgaagagacttgtggtattccatctcgggtgcctctgttggcaatgatcaggcagcccaaaagatttaaatgatctataataatttccaagcggtagattatgtggcattttattgctcaggcaataattggtttaatgctggtagtgtcaaattttgaagtgttaattttgtcttagaaccttccagtaagtgaaatacaacctagttttatcaccatatccaccagcaggcatggataattattttaacaatgctaatatttgagttttgcagtatattatagaatatagtccagttaaatctttggtttcagtatgtctgaagagtacagtgagaggttaatttctgctcaagtggtaccacttaaaggcatgtattcttttagtatgtaaaatgaaatagtaccttgagtttaaatagaatgcatttaggcattgtagagatctgaaatagttttcttccactacattgttgaaatcaatgaagcaattagtttctcattcagaaatgtgcacactaatatttagttttgctttctcgtggataatattaagcacttactctgcagtttcctggaagttgtgtcaactgcagtgatactattcaggatggtgggaaatccccaaaaatatgtatgtgtgggcttgcttagattactatatttcatagttaatcttttgtctcttgcggtgctcatgatgtgtggggcacacggaaggcattgctgtagtcagtcattttggttttcttctatagccattttattattttagtgtattagttatgaagataatattatctatttgtaaattgctactttgtattttatgcatgctctgtaatttgatttttttttagttattgatttggattatattcacattctaataaacagttatagggggattatttcttatgctgtcagattacatttttcctttgagtgctttgggtgcagccgtggaatcctgatgtaaaagcataggttcttgcattactgagtaaacattgaattgggagcatcagtgtgtgaattcagctttgattttagaactgcagttcaattatgctttccttggaaaaagtatgtccaaaaacattaggaaagtagtgtgtattttcatatataacagtgtcaccagacccaggaaaagaaaccatctctattttattgaaagttggtggtagattttttacaaagtaaggagaaaagagaaaaactaaatagtgaattgaaaatgaataaagtaaacttagaatttttacccaagtgtagacttaaatgttgctttgagtatggctggatcttgggagaattccaggaaatattaggtattagaaaatgactttgattgcatttcagcaggtgtctttattctgagtagtatcttaggagacaaactgtctcaagcaagaaacaataaatttttaaatattatgacagttcagggcttaaggcagtttagaagtattttgctacttgaccttgattttcagttattttaactttgaatttttttttttttttttgagacggagtcttgctctgttgcccaggctggagtacaatggcaccatctcagctcactgcaagctccacctccagggttcatgccattctcctgcctcagcctcccgagtagctgggattataggcgccagccaccacgactggctaattttttgtatttttagtagagacggggtttcaccatgttagccagggtggtctcgatctcctgacctggtgatacacccacctcggcctcccaaagtgctgggattaaaggcgtgagccaccgtgcctggccttgaatttttttttaacctgttatatagtctcctgaatagttagccatggtgccttgatttaatcttatgtcattgttctcaaatgccatgatttctctttaatagtagttgtcattatgtaagggtaagttattgcccatttaattgtaattataagaagaggtgccagctagtgaccttacatcagtgatcttttaagttctgaagggttctgcagaaaagttacacttcttgagtttgggttgcccatcagagctggtcacatttctttgatcattgaaaaaatgaatatcttaatttttgtctttgctgactggtatttataaaatacaaatgcttttagtgggttgagctgttgtgataatctcttccatctaccttagagaagaagctgtactatttagacagttttggccaacactagaagcaaaagaattcaaaggctgggtggatatttaagaacttattctaacctgtcaggtttcaatttgtggggcttggtttaacagaggaaaaaaatataaattgattttctgatgtctcacaaatatcacatacctggaaaaaaattaaaacaaaaaatgaattttgtaaaaggttatgtatgacttccatttgctctgtaaaaaaatgaacaaagattgtgaaaggatcctcttccaccacatcatttaatgggttagcggaacagatagggagctatgacactagcaccaaagagagatttttcttctggttgggtggtgctggtgccacgcccctttctgggatttgacaagtctttcccactcacctatacaatatgccaaatcaactggagttgtcattctaatgttttaaagaatgattgggttcccccaaactgtaggaggtcgatggtaacaataaagtgatacaaaatgcttatgtcattataatttatgtaagggagaccattaggctgagaatcaatatgattgaggttatctattctcctgaaaagtgaattggagaataaagaaagaatatttgaaaggatgttgtgtactaggcaatatactagcatgtattagaaaatacggtaaactgtgggttagaagagtgaaagtagctggtatgatagagcactggactgagtaacgaagagattctagtcatggctcttgtggtcatttcatttttgagcctcacattcttccaattaatgagggtaccagattaaataaactctggggattcatcccaattcgaactctgtaattctctgaatgaactctctcttcaattaaagccaaattattaacattttaactcaagtttaaatttaatagagaagtcaaaatgaggtatgcactttgtggaatgtttttggtcttatcacaataacctgattaaaatggtgcctttatttccatgtttactcctttaaataagatgaaagctttcagaacatttatttgcaaaatgactgtcaatatcaacaatatgcatcaaagtaccatatatgctaagggagaggagcacttgatgggctgctatgttaactgtaaattgagaactgcttgttttatggcttttgctgttaaaaaaaaactgctggcttttaatatgtactttaaaatatactcatgtctgggagagaacttttaaaaaca

SEQ ID NO: 24856 - protein, 97 aa, Homo sapiens; identical to SEQ ID NO: 24848

SEQ ID NO: 24857 - DNA, 733 bp, Homo sapiens
agttgtccttattggagattctggtgttggaaagagtaatctcctgtctcgatttactcgaaatgagtttaatctggaaagcaagagcaccattggagtagagtttgcaacaagaagcatccaggttgatggaaaaacaataaaggcacagatatgggacacagcagggcaagagcgatatcgagctataacatcagcatattatcgtggagctgtaggtgccttattggtttatgacattgctaaacatctcacatatgaaaatgtagagcgatggctgaaagaactgagagatcatgctgatagtaacattgttatcatgcttgtgggcaataagagtgatctacgtcatctcagggcagttcctacagatgaacaaatgtcagacagacgcgaaaatgacatgtctccaagcaacaatgtggttcctattcatgttccaccaaccactgaaaacaagccaaaggtgcagtgctgtcagaacatctaaggcatttctcttctcccctagaaggctgtgtatagtccatttcccaggtctgagatttaaatatatttgtaattcttgtgtcacttttgtgttttattacttcatacttatgaatttttccatgtcctaagtcttttgattttagctttataaaatcatccacttgtcccgaatgactgcagctttttttcatgctatggcttcactagccttagtttaataaactgaatgtttggattcctc

SEQ ID NO: 24858 - protein, 107 aa, Homo sapiens [sequence omitted]

SEQ ID NO: 24859 - DNA, 5702 bp, Homo sapiens
gcccgctgcccgccgcccggctcccggctgctcgcggccccctgctcctgcctggcgctctggccaggctcgggctccggaggacaggaccgcgcgactggccggccgatccctgggccggccgcgggagcagctatgctgtgactgtccaggaatcgtatgcacaccccttcgatcagatctattacacacgatgcacagacatcctcaactggttcaagtgcaccaggcaccgccctgtgtacggaggagtgtgtgcacggccgctgcgtttccccggacacctgccactgcgagcctggctggggagggcccgactgctccagcggctgcgacagcgaccactgggggccccactgcagcaaccggtgccagtgccagaacggcgccctgtgtaaccccatcacaggcgcctgcgtgtgcgccgccggcttccgtggatggcgctgcgaggagctctgcgcacctggcacccacggcaagggatgccagctgccgtgccagtgccgacacggtgccagctgcgacccccgcgccggcgagtgcctctgcgcacctggctacaccggcgtctactgcgaggagctgtgccctcctgggagccatggagctcactgtgagctgcgctgcccctgtcagaatgggggcacctgccaccacatcactggcgagtgtgcctgccccccaggctggacgggagcagtgtgtgcccagccctgcccaccagggacatttggccagaactgcagccaggattgtccttgccaccatggagggcagtgtgaccacgtgactggacagtgccactgtacagctggatacatgggggacaggtgccaagaggagtgccccttcgggtccttcggcttccagtgctcacagcactgtgactgccacaatggggggcagtgttcacccaccacgggtgcctgcgagtgtgagcctggctacaagggcccacgctgccaggagcgactgtgcccggagggcctgcatggcccaggctgcaccctgccctgcccctgtgacgctgacaacaccatcagctgccacccagtaactggagcttgtacctgccagccaggctggtctggtcaccactgcaatgaatcctgccctgttggctactatggcgatggctgccagctgccttgcacctgtcagaatggcgccgactgccacagcatcactgggggctgcacttgtgctccgggcttcatgggagaggtctgtgccgtttcctgtgcagcagggacctatggccccaactgctcgtccatctgtagctgtaacaatggtggcacctgctccccagtagatggctcctgtacctgcaaggaagggtggcagggcctggactgcaccctgccatgtcccagtgggacgtggggcctgaactgcaacgagagctgcacctgtgccaatggggcagcctgcagccccatagacggctcctgctcctgcactcctggctggctgggagacacctgtgagctgccttgcccggatggcacatttgggctgaactgcagtgaacactgtgactgcagccatgctgatggatgtgaccccgtcacaggccactgctgctgcctggccggatggacaggcatccgctgtgacagcacgtgtccacctggccgctggggccccaactgctctgtctcctgcagctgtgagaatggaggctcctgctccccagaggatgggagctgcgagtgtgcccctggcttccgaggacccttatgccagagaatctgcccccctgggttctatggccacggctgcgcccagccatgccccctctgcgtgcacagcagcaggccctgccaccacatcagcggcatctgtgagtgcctcccaggattctctggagctctctgcaaccaagtgtgtgctggaggatactttgggcaggactgtgcccagctctgctcctgtgccaacaacgggacctgcagccctatcgatggctcctgccagtgctttcctggatggattggcaaggactgctcacaggcttgcccacccgggttctggggccccgcctgcttccacgcatgcagctgccacaacggggcgagctgcagcgccgaggacggggcctgccactgcacccctggctggactggactcttctgcacacagcgctgcccagcagcattttttgggaaggactgtgggcgcgtatgccagtgtcagaatggcgccagctgtgaccacatcagtggcaagtgcacctgccgcacaggcttcaccgggcaacactgtgagcagagatgtgccccaggaacctttggctatgggtgtcagcagctatgtgagtgcatgaacaactccacctgtgaccatgtcaccggcacctgttactgcagccctggcttcaaaggaatcaggtgtgaccaagctgccctcatgatggaggagctgaatccctacaccaagatcagcccagcactgggtgcagagcggcactcggtgggtgctgtcacaggcatcatgctcctgttattcctcattgtggtgctgctgggcctatttgcctggcatcggcggcggcagaaagagaagggccgagacctggctccccgtgtctcctacacacctgccatgaggatgaccagcaccgactactccctctcaggtgcttgtggaatggatagacgtcagaacacatacattatggacaaaggcttcaaagattacatgaaagaatccgtgtgcagttctagtacttgttccttgaatagcagtgaaaacccttacgccacaattaaggacccacccatcctcacctgcaagcttccagaaagcagctatgtagaaatgaagtcgcctgtgcacatggggtctccgtacacagatgtgccatccttgtcgacatctaataaaaatatatatgaagttgagcccacagtcagtgtggtccaagaaggttgcggtcataactccagctatatccagaatgcatacgacctacctaggaacagccatattcctggtcattatgacctcctcccagtaagacagagccctgccaatgggccgtcccaggacaagcaatcttaagagggataagcttctctcttgcagtgtgctctactgaatattctgactctgaaagaagacagtcccttgacttgaagtaatggtacagactggctccagctgcatgttagttattacgttcacctggaactaaagaagagcgtccaggtgggactgggataattgttcaaggaattgtgttctcaaaggcaaatcctatcacccactcagccccaaatgccctggattatatgatttttaaaacattttaagatacagctactcatcaacatcagctaaatatagctgatatatatatatatatttatctgaaacgtgatattttaaaaacatgtaggtttaacaaaccttcctaggacaaaaaggagactggggagggaagaggattactttaaagcacctgaaacgtatatgtacttttggttgctgttaccatcaacatctgttttattaccgaagacaattagtacacagacatgaactgttcttaaacagaacagtcttaaaatgtctgtacatatctgtctggtccatcaaattacaacagccaagattacagaatctatatagtctaatgctgacaacttctattttaaaaaacaagactttactttcttctgccccctaagtgataggtttaaacacacagagacacacacacacgtttccaaagtgcagcagtgtctctttcagtctacaataagattcctagggcagctttatcaaattttgccaattcaaagttcaaggacattacaagttagtcctggctttgtcatatctacttagtccatccgacacctgaatcattccatgtaaaacagagctctaagatgatcctttaagcaagcagtcatagactggtcgggattaagtaaaagacggctagttggcctcctcattttatttggtcagcatcccttgactcaagagtacttgctttcaagttcttcataaatcttgagattgacgtagtatgaaacctaaaagtatacaggaaattggacaaatgtggatacagcaagtttacactgcttaaagtacattatgctttttaatggaactaaatgatcaaaaaaagaatggactgtaaccagttgctgtaacgtgatgtaaaaacgttactgtaaacagcatgaggatatgaagtccttccaccttctatcttaaaactactacttactgagctagcccaatatgcattacaatgagctaatgctccagatcccagtattcagatgtgtctataccttccactatgaacacagataaactgaggctcagataagtccaaatgaaatgaaatcaactcccaagccctaaagagaaccttctcacaagaattaaaaacaaaaagggcaaacctaggaagctaacggctactcctgtaccactctattcactggtacagtccagccagtaaaaaacacttccaaaaagatacacagaagaggaactaaatgactgcgaagctggaatactgctacaggaagtatgagagttctgaaacccttgatagaaactggaagcctgccatggaacacaatactttgggcaataatcagaaaaagcaaaaaaataaataaatgagtacatctccccttcccacatcactcaaggcataagcagattttactgttagaggaaaatatgtaatacttacatgaatgttgcatgtgtgcatgggagcaactgagtagcaatagtaaatttactttccaaaaaagccttattaaaatataaatattagaaaattactttggagacccaagtaaatatttctcatacatatgtagaaagaaatataggtaagcagcttacctcagtatttcagggcagcaagtgtttgtgaagcaaggatgagcagcatgaagatgtcagatcagcaaggagaaacttcaactcaatcccaggttttctcttcttcccttatcctgcatgtacaataactgctgcctggcaaactgcaaacaagcagcatcactcaagtttgaagtttcgccgcttttgtcaactatcctctgggcaaaggtattcagcaagaggtggaatggctagacactgaatcaagagatttcagtgttactctggtcaagttagtcgccctctctgggctcccttttttcctatgcataaaaaggggagaagcagagagtgggaagacagctctactaacccttcagctctagcagtccatgactttttaaggaaatgtaatacaagtcaaaccaggcaatacagaggagaagggaaaggcagagggtgtgattatggtgacaatagctgccttcccctatcgaacagttatcagtaaaagacatttcaatcttacaaagcaactgttagaaacttctgtctaacaccatcacaaataggttcatggtcagcctaaacatgtatactgtgcattttatgggtgactttgaaagatctgttcaattatttttcagaaactaaattttcaaaaaattaatatgtgtacaattaaaatgaatgaaagaaaaaccattattgtacagaggtattaatgagactatgaaacggcaatacttttttaaatcacagatttgtaatatatgttcactgtgcagagggattgtaccttgtacaaaataaaacaaatttctcaaact

SEQ ID NO: 24860 - protein, 969 aa, Homo sapiens
MHTPSIRSITHDAQTSSTGSSAPGTALCTEECVHGRCVSPDTCHCEPGWGGPDCSSGCDSDHWGPHCSNRCQCQNGALCNPITGACVCAAGFRGWRCEELCAPGTHGKGCQLPCQCRHGASCDPRAGECLCAPGYTGVYCEELCPPGSHGAHCELRCPCQNGGTCHHITGECACPPGWTGAVCAQPCPPGTFGQNCSQDCPCHHGGQCDHVTGQCHCTAGYMGDRCQEECPFGSFGFQCSQHCDCHNGGQCSPTTGACECEPGYKGPRCQERLCPEGLHGPGCTLPCPCDADNTISCHPVTGACTCQPGWSGHHCNESCPVGYYGDGCQLPCTCQNGADCHSITGGCTCAPGFMGEVCAVSCAAGTYGPNCSSICSCNNGGTCSPVDGSCTCKEGWQGLDCTLPCPSGTWGLNCNESCTCANGAACSPIDGSCSCTPGWLGDTCELPCPDGTFGLNCSEHCDCSHADGCDPVTGHCCCLAGWTGIRCDSTCPPGRWGPNCSVSCSCENGGSCSPEDGSCECAPGFRGPLCQRICPPGFYGHGCAQPCPLCVHSSRPCHHISGICECLPGFSGALCNQVCAGGYFGQDCAQLCSCANNGTCSPIDGSCQCFPGWIGKDCSQACPPGFWGPACFHACSCHNGASCSAEDGACHCTPGWTGLFCTQRCPAAFFGKDCGRVCQCQNGASCDHISGKCTCRTGFTGQHCEQRCAPGTFGYGCQQLCECMNNSTCDHVTGTCYCSPGFKGIRCDQAALMMEELNPYTKISPALGAERHSVGAVTGIMLLLFLIVVLLGLFAWHRRRQKEKGRDLAPRVSYTPAMRMTSTDYSLSGACGMDRRQNTYIMDKGFKDYMKESVCSSSTCSLNSSENPYATIKDPPILTCKLPESSYVEMKSPVHMGSPYTDVPSLSTSNKNIYEVEPTVSVVQEGCGHNSSYIQNAYDLPRNSHIPGHYDLLPVRQSPANGPSQDKQS

SEQ ID NO: 24861 - DNA, 536 bp, Homo sapiens
tgccaactaaatgtcttcggaaatgtaaagcgtcattatccaaccaattagtacgagttaaattgattataaaatctgaaataaagttgatctacctgccccagaggcctcctgtcgttgcactagcaaggaatgccaccctgcacctgctggctttctgggggcacaaggaatgaaaatgatacgcagtgttaatattgtatggcactccaacctcaagagatctctgcctccaagagcagagaagccaagacaaatccctaacacatgggaactgcaagttggatcatccctctaggaagtctacaggtgaagccaaagatgaaagattacatgaaagaatccgtgtgcagttctagtacttgttccttgaatagcagtgaaaacccttacgccacaattaaggacccacccatcctcacctgcaagcttccagaaagcagctatgtagaaatgaagtcgcctgtgcacatggggtctccgtacacagatgtgccatccttgtcgacatctaataaaaatatatatgaagttgg

SEQ ID NO: 24862 - protein, 88 aa, Homo sapiens
MGTASWIIPLGSLQVKPKMKDYMKESVCSSSTCSLNSSENPYATIKDPPILTCKLPESSYVEMKSPVHMGSPYTDVPSLSTSNKNIYE

SEQ ID NO: 24863 - DNA, 3146 bp, Homo sapiens
cgctcccggtgcccgctgcccgccgcccggctcccggctgctcgcggccccctgctcctgcctggcgctctggccaggctcgggctccggaggacaggaccgcgcgactggccggccgatccctgggccggccgcgggagcagcctcctttgttctcctgtgcagggcccgggatggtgctctccctgacggggctcattgccttctccttcctgcaagccacccttgccctgaaccccgaggaccccaacgtgtgcagccactgggagagctatgctgtgactgtccaggaatcgtatgcacaccccttcgatcagatctattacacacgatgcacagacatcctcaactggttcaagtgcaccaggcaccggatcagttataagacggcgtatcggagaggcctccggaccatgtaccggcggaggtcccagtgctgccctggctactatgagagcggagacttctgcatacccctgtgtacggaggagtgtgtgcacggccgctgcgtttccccggacacctgccactgcgagcctggctggggagggcccgactgctccagcggctgcgacagcgaccactgggggccccactgcagcaaccggtgccagtgccagaacggcgccctgtgtaaccccatcacaggcgcctgcgtgtgcgccgccggcttccgtggatggcgctgcgaggagctctgcgcacctggcacccacggcaagggatgccagctgccgtgccagtgccgacacggtgccagctgcgacccccgcgccggcgagtgcctctgcgcacctggctacaccggcgtctactgcgaggagctgtgccctcctgggagccatggagctcactgtgagctgcgctgcccctgtcagaatgggggcacctgccaccacatcactggcgagtgtgcctgccccccaggctggacgggagcagtgtgtgcccagccctgcccaccagggacatttggccagaactgcagccaggattgtccttgccaccatggagggcagtgtgaccacgtgactggacagtgccactgtacagctggatacatgggggacaggtgccaagaggagtgccccttcgggtccttcggcttccagtgctcacagcactgtgactgccacaatggggggcagtgttcacccaccacgggtgcctgcgagtgtgagcctggctacaagggcccacgctgccaggagcgactgtgcccggagggcctgcatggcccaggctgcaccctgccctgcccctgtgacgctgacaacaccatcagctgccacccagtaactggagcttgtacctgccagccaggctggtctggtcaccactgcaatgaatcctgccctgttggctactatggcgatggctgccagctgccttgcacctgtcagaatggcgccgactgccacagcatcactgggggctgcacttgtgctccgggcttcatgggagaggtctgtgccgtttcctgtgcagcagggacctatggccccaactgctcgtccatctgtagctgtaacaatggtggcacctgctccccagtagatggctcctgtacctgcaaggaagggtggcagggcctggactgcaccctgccatgtcccagtgggacgtggggcctgaactgcaacgagagctgcacctgtgccaatggggcagcctgcagccccatagacggctcctgctcctgcactcctggctggctgggagacacctgtgagctgccttgcccggatggcacatttgggctgaactgcagtgaacactgtgactgcagccatgctgatggatgtgaccccgtcacaggccactgctgctgcctggccggatggacaggcatccgctgtgacagcacgtgtccacctggccgctggggccccaactgctctgtctcctgcagctgtgagaatggaggctcctgctccccagaggatgggagctgcgagtgtgcccctggcttccgaggacccttatgccagagaatctgcccccctgggttctatggccacggctgcgcccagccatgccccctctgcgtgcacagcagcaggccctgccaccacatcagcggcatctgtgagtgcctcccaggattctctggagctctctgcaaccaagtgtgtgctggaggatactttgggcaggactgtgcccagctctgctcctgtgccaacaacgggacctgcagccctatcgatggctcctgccagtgctttcctggatggattggcaaggactgctcacaggcttgcccacccgggttctggggccccgcctgcttccacgcatgcagctgccacaacggggcgagctgcagcgccgaggacggggcctgccactgcacccctggctggactggactcttctgcacacagcgctgcccagcagcattttttgggaaggactgtgggcgcgtatgccagtgtcagaatggcgccagctgtgaccacatcagtggcaagtgcacctgccgcacaggcttcaccgggcaacactgtgagcagagatgtgccccaggaacctttggctatgggtgtcagcagctatgtgagtgcatgaacaactccacctgtgaccatgtcaccggcacctgttactgcagccctggcttcaaaggaatcaggtgtgaccaagctgccctcatgatggaggagctgaatccctacaccaagatcagcccagcactgggtgcagagcggcactcggtgggtgctgtcacaggcatcatgctcctgttattcctcattgtggtgctgctgggcctatttgcctggcatcggcggcggcagaaagagaagggccgagacctggctccccgtgtctcctacacacctgccatgaggatgaccagcaccgactactccctctcaggtgcttgtggaatggatagacgtcagaacacatacattatggacaaaggcttcaaagattacatgaaagaatccgtgtgcagttctagtacttgttccttgaatagcagtgaaaacccttacgccacaattaaggacccacccatcctcacctgcaagcttccagaaagcagctatgtagaaatgaagtcgcctgtgcacatggggtctccgtacacagatgtgccatccttgtcgacatctaataaaaatatatatgaagtt

SEQ ID NO: 24864 - protein, 990 aa, Homo sapiens
MVLSLTGLIAFSFLQATLALNPEDPNVCSHWESYAVTVQESYAHPFDQIYYTRCTDILNWFKCTRHRISYKTAYRRGLRTMYRRRSQCCPGYYESGDFCIPLCTEECVHGRCVSPDTCHCEPGWGGPDCSSGCDSDHWGPHCSNRCQCQNGALCNPITGACVCAAGFRGWRCEELCAPGTHGKGCQLPCQCRHGASCDPRAGECLCAPGYTGVYCEELCPPGSHGAHCELRCPCQNGGTCHHITGECACPPGWTGAVCAQPCPPGTFGQNCSQDCPCHHGGQCDHVTGQCHCTAGYMGDRCQEECPFGSFGFQCSQHCDCHNGGQCSPTTGACECEPGYKGPRCQERLCPEGLHGPGCTLPCPCDADNTISCHPVTGACTCQPGWSGHHCNESCPVGYYGDGCQLPCTCQNGADCHSITGGCTCAPGFMGEVCAVSCAAGTYGPNCSSICSCNNGGTCSPVDGSCTCKEGWQGLDCTLPCPSGTWGLNCNESCTCANGAACSPIDGSCSCTPGWLGDTCELPCPDGTFGLNCSEHCDCSHADGCDPVTGHCCCLAGWTGIRCDSTCPPGRWGPNCSVSCSCENGGSCSPEDGSCECAPGFRGPLCQRICPPGFYGHGCAQPCPLCVHSSRPCHHISGICECLPGFSGALCNQVCAGGYFGQDCAQLCSCANNGTCSPIDGSCQCFPGWIGKDCSQACPPGFWGPACFHACSCHNGASCSAEDGACHCTPGWTGLFCTQRCPAAFFGKDCGRVCQCQNGASCDHISGKCTCRTGFTGQHCEQRCAPGTFGYGCQQLCECMNNSTCDHVTGTCYCSPGFKGIRCDQAALMMEELNPYTKISPALGAERHSVGAVTGIMLLLFLIVVLLGLFAWHRRRQKEKGRDLAPRVSYTPAMRMTSTDYSLSGACGMDRRQNTYIMDKGFKDYMKESVCSSSTCSLNSSENPYATIKDPPILTCKLPESSYVEMKSPVHMGSPYTDVPSLSTSNKNIYE

SEQ ID NO: 24865 - DNA, 923 bp, Homo sapiens
tagtcacatagggactcaggaatcgggccaaagccagaaccagatctcctaacattagaggggttacacgcatctgaacccaggcccaggagacctgaagcgcaagaaggccagccccaggctcaggccctccctctgcccgcagctgccctcatgatggaggagctgaatccctacaccaagatcagcccagcactgggtgcagagcggcactcggtgggtgctgtcacaggcatcatgctcctgttattcctcattgtggtgctgctgggcctatttgcctggcatcggcggcggcagaaagagaagggccgagacctggctccccgtgtctcctacacacctgccatgaggatgaccagcaccgactactccctctcagcatcaaccacaccatggtggcctgtcatggaacacctagctcgccctttctctcaacggcctaggacccagctcagtaacaagtcccttgacagagacacagcaggctggaccccctacagctatgtgaacgtgttagactcccatttccagatcagtgccctggaggccaggtacccgcccgaggacttctacattgaacttagacacctcagccgccccgctgagccacactcaccaggtgcttgtggaatggatagacgtcagaacacatacattatggacaaaggcttcaaaggcaggtggatgactcagctggagaacaaagtggcttcctgagattacatgaaagaatccgtgtgcagttctagtacttgttccttgaatagcagtgaaaacccttacgccacaattaaggacccacccatcctcacctgcaagcttccagaaagcagctatgtagaaatgaagtcgcctgtgcacatggggtctccgtacacagatgtgccatccttgtcgacatctaataaaaatatatatga

SEQ ID NO: 24866 - protein, 188 aa, Homo sapiens
MMEELNPYTKISPALGAERHSVGAVTGIMLLLFLIVVLLGLFAWHRRRQKEKGRDLAPRVSYTPAMRMTSTDYSLSASTTPWWPVMEHLARPFSQRPRTQLSNKSLDRDTAGWTPYSYVNVLDSHFQISALEARYPPEDFYIELRHLSRPAEPHSPGACGMDRRQNTYIMDKGFKGRWMTQLENKVAS

SEQ ID NO: 24867 - DNA, 524 bp, Homo sapiens
ccccatccaggctccagttgatagtgcctccccttggcacagatttgtctcaaagtagcagccatgcccactgcttttccaattccagctaccacgcactggcatgtggggggcctgccaccagccaggccagcactctggacaggaacagccccaccaagctcagtaacaagtcccttgacagagacacagcaggctggaccccctacagctatgtgaacgtgttagactcccatttccagatcagtgccctggaggccaggtacccgcccgaggacttctacattgaacttagacacctcagccgccccgctgagccacactcaccagataagccttggatccaggagaggacagacaggaccagagctgagaggtgcttgtggaatggatagacgtcagaacacatacattatggacaaaggcttcaaagttgcacctgcttagcaaatgcttgtgggttttttatagatgccaactaaatgtcttcggaaatgtaaagcgtcattatccaaccaattagt

SEQ ID NO: 24868 - protein, 51 aa, Homo sapiens
MPTAFPIPATTHWHVGGLPPARPALWTGTAPPSSVTSPLTETQQAGPPTAM

SEQ ID NO: 24869 - DNA, 760 bp, Homo sapiens
agttatcactcctccacctgcttttccatcttccagtgtgtgacatcctttgtctcctattcctcttttctttgtgggtttatacctgtacccctttgactctcatgtcagctgggtttgagaaagaagctgagcaaagtgcacgtctccataccagcatgtttactcagcctccttccttatgtcttctcagcactttactgtgtacccatgtgagagtacttactgccttgtacttagcggtttttttggctctttctgtggtagactaggaggacaggaatcaaatcgaatcacccctagtgtctcacacagcacctcgtatacaataggcagttcctaaattgtgctgaataactggatgagcaagttggcctcagtctcccatctcccatctctaagaggagggctttggagccctggtgtccagctgtctgaacttcttctgggaagttgggtggtccctggagccacagcaggtgtgccattcccaggaaagtttggcatttctggagcaccgccatgcatgtcttcccacctttcttttagggagcagtgtgtgcccagccctgcccaccagggacatttggccagaactgcagccaggattgtccttgccaccatggagggcagtgtgaccacgtgactggacagtgccactgtacagctggatacatgggggacaggtgccaagaggagtgccccttcgggtccttcggcttccagtgctcacagcactgtgactgccacaatggggggc

SEQ ID NO: 24870 - protein, 94 aa, Homo sapiens [sequence omitted]

SEQ ID NO: 24871 - DNA, 3569 bp, Homo sapiens
cgggccctctccctctctccctttcttcctgcctcgccttcctgcggcgaaggaggctcatctattataaatgcacattcggggctgacatcagcgacgagcggcgggcgagcgccgacgagcggtccctgcgcgctgcccgcccggagcgcagcccccaggctcggccgagccgccggcggggcgcggggagcgagccgggagctgccggacccccttccgccgccgccccgggccgccgccgccgcccccgcacgccgcgcccgcgcccccgctccgccgcggagtttctgcatgactgtcacaaagatgtcctggcgtccgcaataccgtagctccaagttccggaatgtctacgggaaggtggccaaccgggagcactgcttcgatgggatccccatcaccaagaatgtgcacgacaaccacttctgtgccgtcaacacccgcttcctggccatcgtcaccgagagcgcagggggcggctccttcctcgtcatccccctggagcagacaggcaggattgaacccaactaccccaaggtctgcggccaccagggcaatgtgctggatatcaaatggaaccccttcatcgacaacatcattgcctcgtgctcggaggacacgtcggtgcggatctgggagatccccgagggcgggctgaagcggaacatgacggaggcgctcctggagctgcacgggcacagccggcgtgtggggctggtcgagtggcaccccaccaccaacaacatcctgttcagcgctggctacgactacaaggtcctcatctggaacctggatgtgggtgagccggtgaagatgattgactgccacacggatgtgatcctctgcatgtccttcaacacggacggcagcctgctcaccaccacgtgcaaggacaagaagctgcgtgtgattgagccccgctctggccgtgttctgcaggaggccaactgcaaaaaccacagagtgaaccgggtggtgttcctggggaacatgaagcggctcctcacgacaggggtctccaggtggaacacaagacagattgccctctgggaccaggaggacctctccatgcccctgatcgaagaggaaattgatgggctctctggcctcctgttccccttctatgatgctgacacccacatgctctacctggctggaaagggtgatggaaacatccggtactacgagatcagcactgagaagccctacctgagttacctcatggagttccgctccccagccccgcagaaaggcctaggggtcatgcccaagcacgggctggatgtgtcagcctgcgaggtgttccgcttctacaagctggtgactctcaagggcctgatcgagcccatctccatgatcgtgccccggaggtcagattcctaccaggaagacatttacccaatgacaccaggcacggagccagcactgaccccggatgaatggctgggaggcatcaaccgagatcccgtgctgatgtctttgaaagaaggctataagaagtcctcaaaaatggtatttaaggctcccatcaaagaaaagaagagtgttgtggtcaacggaatagatttattagaaaatgtcccacccaggacagagaatgagctccttcgaatgttcttccggcagcaggatgagattcgacggttgaaagaggagctggcccagaaggacatccgcattcggcagctccagctggaactgaaaaacttgcgcaacagccccaagaactgttagctccccagctgggctgttttctaagccgatctctccgtcgtttctactcatcccttaacttctcccttaccagtgaccccagagacagagccaggacaggagtgggggccagcctgaggacccccgcctaccacctcgagaactggaagccaacctctaacctcctgacctcatgctaataaaagtccccagcttctggagaccccctgccggcagcccctttccctgccaccccaggagccaggcttcccctcagctgggtgaagactacagactccctggggttggcaggggctccatctcagtggaccaggaagcaagaggggaagcgggatcccagctagacttagaacttggacttttcccctgtgaagggggctgccaggacatctcagcactcccgcctggagctctcagcatcactgaaggtaccacagtgtaagtgctggactgcaggctgcagtgatccctctttcgtcccaccccctcttccctcagcagccccggaagcctgcctcacccgacgaggacagcgagcggcccggctcctttctgtctcttcccttcccaccctcttgtcttcagggaattcagaggattgctctccaaggccataatgaccccttgccttccccatgattctctacaaagctcttgcacacccttttcccattcaatttgtgagccaggcagggtagggattagtgtccccctttgacaaatgacagaactgagggttgcaatggggaaatgacttataaagtcacccagcaggtcaacaatgggcccacgaccaagaccctgggtgttcagaccccaaggccagggcctttcccgctgcatcaagatgccaatccctttgtgggcttcaccagtgcccaagtctctatggagaatgagaactggaagccactgctaccgtctacccagcaccagtagtgccgatgtgccacactgcccagttgaggcccctcacgctctgtgcccctagatccttcaggtccccaccctcagctgtcaccaccaccctccccaggggactccatctgagatgaggcctcgtcctcctggaagctgaggctgagaagggtggagcttggccctggggaaggcagaccagggtctgatggcttctagggatgctctgcgtgtgtctcagcaccgctatctcagccactttcagccttatgcacgtagaatgaccacagccactcgcatccgtatagcactttaaagtttctgcagtcctttgacacataggatctcatggagcctcacgtctactcccttctgcagatgaggaaaccgagagaagtggcccaaggtcacgcaactctgagatgccacatttcatttgatcttgtacacattttcttttattccttcttttttcctcctttcatttcccactacgcacaaagagtttataaacactgttctcagaagagtcacagtttggggtgagatctggaaatcaagaaatgggtgtccactcttttctttcattagctaggatctactagatgcattatactccatacctgcttttcccatggccgccctacggaaaatcccatccacagaggccagggctacccaagcccctccaggtgagctgggcctttcctttatgaacctccatcctcccagccagctacagtagggcctcctcaccccgtaccccacagctagacagtgtcagcactcatctcctcctcccacatttctggagcttttttttttccttccccattgacctttgtggtcttctgtgattatttatgctgcctcccaaggatagaattgaaataaaatgttttcaacttatcaaa

SEQ ID NO: 24872 - protein, 480 aa, Homo sapiens
MTVTKMSWRPQYRSSKFRNVYGKVANREHCFDGIPITKNVHDNHFCAVNTRFLAIVTESAGGGSFLVIPLEQTGRIEPNYPKVCGHQGNVLDIKWNPFIDNIIASCSEDTSVRIWEIPEGGLKRNMTEALLELHGHSRRVGLVEWHPTTNNILFSAGYDYKVLIWNLDVGEPVKMIDCHTDVILCMSFNTDGSLLTTTCKDKKLRVIEPRSGRVLQEANCKNHRVNRVVFLGNMKRLLTTGVSRWNTRQIALWDQEDLSMPLIEEEIDGLSGLLFPFYDADTHMLYLAGKGDGNIRYYEISTEKPYLSYLMEFRSPAPQKGLGVMPKHGLDVSACEVFRFYKLVTLKGLIEPISMIVPRRSDSYQEDIYPMTPGTEPALTPDEWLGGINRDPVLMSLKEGYKKSSKMVFKAPIKEKKSVVVNGIDLLENVPPRTENELLRMFFRQQDEIRRLKEELAQKDIRIRQLQLELKNLRNSPKNC

SEQ ID NO: 24873 - DNA, 3789 bp, Homo sapiens
ctctcatgtgatacgtgagaacacttaaccttagcgaagttgggagactcgaatctcacagttccaggaggagctaggattcaaacccagagcccatgccaagcagaaagaatgtttatgaacagagaacccccacctccaattcccaaatggggccatgagcccagggaaggtgaaggtcttctcttgggctacacttttttggtggagctagaactagagttcagagtgtgtgacgccagcctgaatatgtgcactgccccattggcctcttttctgacttgctgccaacttacctgatgccgaggactgttgtgtgttaggaggaaatcaagtgtcacgagccagtgggcaggaaaggaggcccaagacagctcagttaaggaggcactccctgatgaggcaagctgtgaagcagtgatgggcatgagtctcttgtcctcctgagcctcagtttcctcaccctcaaaatggggataatgatttcttccgatagatattgttatggggatgaaaagcaatgcccctggtgagagctcctgaagtggtgtagcccccaactggacttggtggacgttggctcccctctcgctccctgttccccacattctctgggaaatggcagagaaggcatctgtggagccattgctgcacagtgcttagaacagtgtcctatggctgctgtaacaaatgcccacaaactaggtggctgaaaacaacagaaatgtattctctcaccattccagaggccagatgtcccacatcaaggtgtcagcaggactgtactccctacagatgctctaggagaaaacccattccttgcctcttctgggggttgccggctcccgtggctggtggccacatcactccagtctctgcctccagggtcacacaccttctcccctgtgtgtctctgtaatcttacctctctcccacaaggacactcatgatggcatccaggatccacctggataatccagggtaatctcatctccaaatccttagcttaaccacatctgcaaggacccttttccaaataaggaaataattgcaggggccagggctgaggacatgggtgtatcttttcgggaccaccattcatgccactgcagaacccacatgttggggaccctggctcaccacctccctctgttcctactaggaggccaactgcaaaaaccacagagtgaaccgggtggtgttcctggggaacatgaagcggctcctcacgacaggggtctccaggtggaacacaagacagattgccctctgggaccaggaggacctctccatgcccctgatcgaagaggaaattgatgggctctctggcctcctgttccccttctatgatgctgacacccacatgctctacctggctggaaagggtgatggaaacatccggtactacgagatcagcactgagaagccctacctgagttacctcatggagttccgctccccagccccgcagaaaggcctaggggtcatgcccaagcacgggctggatgtgtcagcctgcgaggtgttccgcttctacaagctggtgactctcaagggcctgatcgagcccatctccatgatcgtgccccggaggtcagattcctaccaggaagacatttacccaatgacaccaggcacggagccagcactgaccccggatgaatggctgggaggcatcaaccgagatcccgtgctgatgtctttgaaagaaggctataagaagtcctcaaaaatggtatttaaggctcccatcaaagaaaagaagagtgttgtggtcaacggaatagatttattagaaaatgtcccacccaggacagagaatgagctccttcgaatgttcttccggcagcaggatgagattcgacggttgaaagaggagctggcccagaaggacatccgcattcggcagctccagctggaactgaaaaacttgcgcaacagccccaagaactgttagctccccagctgggctgttttctaagccgatctctccgtcgtttctactcatcccttaacttctcccttaccagtgaccccagagacagagccaggacaggagtgggggccagcctgaggacccccgcctaccacctcgagaactggaagccaacctctaacctcctgacctcatgctaataaaagtccccagcttctggagaccccctgccggcagcccctttccctgccaccccaggagccaggcttcccctcagctgggtgaagactacagactccctggggttggcaggggctccatctcagtggaccaggaagcaagaggggaagcgggatcccagctagacttagaacttggacttttcccctgtgaagggggctgccaggacatctcagcactcccgcctggagctctcagcatcactgaaggtaccacagtgtaagtgctggactgcaggctgcagtgatccctctttcgtcccaccccctcttccctcagcagccccggaagcctgcctcacccgacgaggacagcgagcggcccggctcctttctgtctcttcccttcccaccctcttgtcttcagggaattcagaggattgctctccaaggccataatgaccccttgccttccccatgattctctacaaagctcttgcacacccttttcccattcaatttgtgagccaggcagggtagggattagtgtccccctttgacaaatgacagaactgagggttgcaatggggaaatgacttataaagtcacccagcaggtcaacaatgggcccacgaccaagaccctgggtgttcagaccccaaggccagggcctttcccgctgcatcaagatgccaatccctttgtgggcttcaccagtgcccaagtctctatggagaatgagaactggaagccactgctaccgtctacccagcaccagtagtgccgatgtgccacactgcccagttgaggcccctcacgctctgtgcccctagatccttcaggtccccaccctcagctgtcaccaccaccctccccaggggactccatctgagatgaggcctcgtcctcctggaagctgaggctgagaagggtggagcttggccctggggaaggcagaccagggtctgatggcttctagggatgctctgcgtgtgtctcagcaccgctatctcagccactttcagccttatgcacgtagaatgaccacagccactcgcatccgtatagcactttaaagtttctgcagtcctttgacacataggatctcatggagcctcacgtctactcccttctgcagatgaggaaaccgagagaagtggcccaaggtcacgcaactctgagatgccacatttcatttgatcttgtacacattttcttttattccttcttttttcctcctttcatttcccactacgcacaaagagtttataaacactgttctcagaagagtcacagtttggggtgagatctggaaatcaagaaatgggtgtccactcttttctttcattagctaggatctactagatgcattatactccatacctgcttttcccatggccgccctacggaaaatcccatccacagaggccagggctacccaagcccctccaggtgagctgggcctttcctttatgaacctccatcctcccagccagctacagtagggcctcctcaccccgtaccccacagctagacagtgtcagcactcatctcctcctcccacatttctggagcttttttttttccttccccattgacctttgtggtcttctgtgattatttatgctgcctcccaaggatagaattgaaataaaatgttttcaacttatcaaa

SEQ ID NO: 24874 - protein, 247 aa, Homo sapiens
MKRLLTTGVSRWNTRQIALWDQEDLSMPLIEEEIDGLSGLLFPFYDADTHMLYLAGKGDGNIRYYEISTEKPYLSYLMEFRSPAPQKGLGVMPKHGLDVSACEVFRFYKLVTLKGLIEPISMIVPRRSDSYQEDIYPMTPGTEPALTPDEWLGGINRDPVLMSLKEGYKKSSKMVFKAPIKEKKSVVVNGIDLLENVPPRTENELLRMFFRQQDEIRRLKEELAQKDIRIRQLQLELKNLRNSPKNC

SEQ ID NO: 24875 - DNA, 1846 bp, Homo sapiens
cgaatgaaggcaaactcgaaggcctcacagatgaatttgaagaactggaattcttaagtacaatcaacgtaggcctcacctatgatgaagatgctcaggtagtggaagacgaggaggacgaggatgaggaggaggaaggtgaagaggaggacgtgagtggagaggaggaggaggatgaagaaggttataacgatggagaggtagatgacgaggaagatgaagaagagcttggtgaagaagaaaggggtcagaagcgaaaacgagaacctgaagatgagggagaagatgatgactaagtggaataacctattttgaaaaattcctattgtgatttgactgtttttacccatatcccctctcccccccccctccaatcctgccccctgaaacttatttttttctgattgtaacgttgctgtgggaacgagaggggaagagtgtactgggggttgcggggggagggatggcgggtgggggtggaataaaatactatttttactgccactctttatttttttcccctactttttctttgtgtccggtttttgtccctgtaaatgcgatagctaagtacacactaagtgagcatttgttcctgactctcaaagaggatggtttggagttctcttacgtttcctggtatttcccaagtctcttgggttggttggaaggctgtggctggtctcagtttggttactcaatgcccaggaggggctgagcaccagccatatcttttgctttggttcacatgatgatacctgcttttctcaggcctgctagaggcatccaacgccctggtttgtaaatagcaacctaaaggcgtattttggcactggtctggggacattccccatctctcatcccttttcccccttcacagatggtggtgggcttcgctctacaaagaggactctgatgttactcttgagcttatgagccagagagctgaaaaccgcaggcttgttgtgttaagttacaaggaaaatggatttggtaattaaaattagaagaaacacaccttcaaacttcaacttctttaaaagaaaaaaaaaactgtcctatcttgttctgtaaaatattagaacgctttgttttacaaaaaatgatgagagaattcttccacatgtacttctgtgcttagaacatttttacggacctaagcgctggagacgttgctgcatgtcggctgggttttttttttcatacacccgagcacggaaaaactaacgcaaaattgtattttcttacctagtggaaatctgaaatgactgcaaattcctagtgaatgtacaggtttgctttcgtgtccctcttctggttgctttagaagtgacgtgtaatttctgaacccatgtttcatctgtataaaagaacatctgcaccagtttttctcctgcccctcagaagagccaaactttgagttttatgtctgtttgtcattgataaatttcaataaatctttttatacaatttttttggggatggcttctttgagtccaacaggccattgatcttttcaagatgcattccagatgaactgctaggtgagggggaagcttcatttttgttacctgatagaatagcttttcttatgagatatatataatgtgatactatgtttggatatttttggtcttaaagcaagactcagtggtgtatcttcattaaaagcttcctttaaaaaagttacagagttactaaaaaaacaagtacccaaacaatcaagttgggccaaccttggaaccttgttttgaatatctttcattgttttgtttgtcgtattgtaaaaagaatgtatggttgaaaactcaggaatgtttataaaacaaattatttcacaaaccca

SEQ ID NO: 24876 - protein, 36 aa, Homo sapiens [sequence omitted]

SEQ ID NO: 24877 - DNA, 1806 bp, Homo sapiens
ggcctggcttcctggctctgcgatgctttcctgccctagggcagaaggcctcacaggatttattcccaggcactcttgccatgaccttgagaaggtggcttgacctggacatctggatctcagggactgagggggtgggaaaggactgagcctccccctcccagacccaacaggaaggtgggctttggtgaccatttcctaggctgagagctccttagctccaggagagggctgcgctccctggttctcctgctctgtgggctgtgctagatgaaacccacaaattgctgctgtcccgggcggagtggcatgcctccacccaccagtgaagaatgaaggcagggcagttgcagggccctgcaggactctgagatccagatgtgtaccccagtgctcccctgctctgcccactggcaagaggggatggcgggtgggggtggaataaaatactatttttactgccactctttatttttttcccctactttttctttgtgtccggtttttgtccctgtaaatgcgatagctaagtacacactaagtgagcatttgttcctgactctcaaagaggatggtttggagttctcttacgtttcctggtatttcccaagtctcttgggttggttggaaggctgtggctggtctcagtttggttactcaatgcccaggaggggctgagcaccagccatatcttttgctttggttcacatgatgatacctgcttttctcaggcctgctagaggcatccaacgccctggtttgtaaatagcaacctaaaggcgtattttggcactggtctggggacattccccatctctcatcccttttcccccttcacagatggtggtgggcttcgctctacaaagaggactctgatgttactcttgagcttatgagccagagagctgaaaaccgcaggcttgttgtgttaagttacaaggaaaatggatttggtaattaaaattagaagaaacacaccttcaaacttcaacttctttaaaagaaaaaaaaaactgtcctatcttgttctgtaaaatattagaacgctttgttttacaaaaaatgatgagagaattcttccacatgtacttctgtgcttagaacatttttacggacctaagcgctggagacgttgctgcatgtcggctgggttttttttttcatacacccgagcacggaaaaactaacgcaaaattgtattttcttacctagtggaaatctgaaatgactgcaaattcctagtgaatgtacaggtttgctttcgtgtccctcttctggttgctttagaagtgacgtgtaatttctgaacccatgtttcatctgtataaaagaacatctgcaccagtttttctcctgcccctcagaagagccaaactttgagttttatgtctgtttgtcattgataaatttcaataaatctttttatacaatttttttggggatggcttctttgagtccaacaggccattgatcttttcaagatgcattccagatgaactgctaggtgagggggaagcttcatttttgttacctgatagaatagcttttcttatgagatatatataatgtgatactatgtttggatatttttggtcttaaagcaagactcagtggtgtatcttcattaaaagcttcctttaaaaaagttacagagttactaaaaaaacaagtacccaaacaatcaagttgggccaaccttggaaccttgttttgaatatctttcattgttttgtttgtcgtattgtaaaaagaatgtatggttgaaaactcaggaatgtttataaaacaaattatttcacaaaccca

SEQ ID NO: 24878 - protein, 99 aa, Homo sapiens
MCTPVLPCSAHWQEGMAGGGGIKYYFYCHSLFFSPTFSLCPVFVPVNAIAKYTLSEHLFLTLKEDGLEFSYVSWYFPSLLGWLEGCGWSQFGYSMPRRG

SEQ ID NO: 24879 - DNA, 5252 bp, Homo sapiens
tggtcagtggaattgggaaaaagtctacaaaagtacaaattttcagtttaattttaactttgcgcttcactcacacccaggacttggcaggggaagtgggccttggttttttttttttctttttaaagcagaacacaccctgggtggaaaagggatgttctctttgcatggaagggttagaaccaagtacagaggaaatgggttggtattgtagcaagagttcaggggtgggtctaggctttgaaactagagcactaggaaagtgtggccctcatggaggcaggcagggaagggaatgggatgtctttcacaggcagctgttgggctgacatttttgttttgtcctgtttggtgcatttcagatacttcacagctcacctgctgctctcactgggacccctcttcatctcatgacaaagcagtgggtctttcccccatgtggtttgggctttttggtggtatcagcaacctcaggtctaagccctgtcccctccttcccctctgtgatctcaccctgcatggtgctgaaaccaaccagggaggaaatgcagaaacagtggggattctgaagacaccacctttaaaacgatggggatttcccaagggagtggaagcaacctcttgctatttggggaagagcagggtcccaggcccctctctgtatccttgccccctcctgcagcgtcatctgagccagggcagggttaggctctgtgctttggttgctaaggatgtgtaaccagagcagagacctctaggggtggtgcccacctggctggtggaacagttagaagaggagctgaaaagaaacagttacagctgtaggggcgggaaggtgtgatccctttccttacccgtcgtaagagtcatggccaacacttataacaaaagaaaggctaacaaaagaagagcgtaacaaatttatttaatcaaagttgtaagtgacatgagaaccttcagagaagaagaaccaaagacccagggaaactgcctatttttatacttaggtttgatgaagaatagacagccatgaagaaatgggactggacaaaggggtgtaggctgagagggaacccagcaaggcctgtctgttcagattctttgtggcctctctgtgtagcattccttcctcctagatatggggcaggacttccctggcatgagggtcttcaagggagaagggacaggagagagtaacctttctcggctttgctttgggagagaggaattctagtttctgtgacccgccttggggaagagaagttctggattctgtgacttctggggagagagggtgagagacaggagggcaagagaaattcacagagcttgcttctgaggccttccaatctcctttagttcaaagtacccagcacgccaaagccccttacatttgggtattgtgttctgagccccagcacagccaagaacttgtagaattgacttgggggtctggggagagtcccaagaagccaacaggggcccctcctcatcttgtggctaacactagccacctgagtgcagtagacacccaccctcctgtgaccttcttttgggattttaggataagcagttcggacgtgcctttaaaacggagagaacacaccccaaggagtggttatggggattaaacgagactgtgtatgaagcacctagagtgtgcctagcgagtgcttgagaaagatatgacgattatttttaatcaaagcattaatagtgattgcttgagtattgtcctccagaggagcagccaccagttttggtgttgtggtaggagccagggactggcctcgtcagggctccgaaacctatgtctatctgtagcattcctaggcagcctaccccagcagcagccccttgggctgtgggcaggggtggcaggcagcactgttcctctccaggaaggagaccgacttcctggacgaattccctgggctccccagcactgctctctgaggccctcctctcctcggccaacggcagtaaggagaagccattgacccgtctagaaaaaccgcatgtctgcagtctttgagggtagactggaatctcttctcatatttgccttgctttggtggagcttcaagaattcccaggccttccaaggaaaccaattactaaagaagactgtgggccacgtgactccagtgtttactgcaaacgaaggagatggctcccctcccccaacacagttactctccctccatctgcactggccccctaaggcctggcttcctggctctgcgatgctttcctgccctagggcagaaggcctcacaggatttattcccaggcactcttgccatgaccttgagaaggtggcttgacctggacatctggatctcagggactgagggggtgggaaaggactgagcctccccctcccagacccaacaggaaggtgggctttggtgaccatttcctaggctgagagctccttagctccaggagagggctgcgctccctggttctcctgctctgtgggctgtgctagatgaaacccacaaattgctgctgtcccgggcggagtggcatgcctccacccaccagtgaagaatgaaggcagggcagttgcagggccctgcaggactctgagatccagatgtgtaccccagtgctcccctgctctgcccactggcaagagggggctgaggaggggcatagcaggcctcatgtggactctgtttccacctcctttcccccatatctctacttggcccagagatgcctgagtaagaggggcacctagtcattctgggcccagaaagaagaagctaggcatgttggcctgctcaaaggagcaggagcagccctggacagggacaggttagaaagcctggctgcttatccaagagaagaaaaggccctgaggggcaggagcaaccctttgaacaatgctggactgctgttgagaaggaaggcttgtgccatgtgacccattggtgagaaatcagggcctgtgcatggaagttccagggagggaggcaacaaatccagttgacattggtgaaagaacttgtcctggacaacagtcggtcgaatgaaggcaaactcgaaggcctcacagatgaatttgaagaactggaattcttaagtacaatcaacgtaggcctcacctcaatcgcaaacttaccaaagttaaacaaacttaagaagcttgaactaagcgataacagagtctcagggggcctggaagtattggcagaaaagtgtccgaacctcacgcatctaaatttaagtggcaacaaaattaaagacctcagcacaatagagccactgaaaaagttagaaaacctcaagagcttagaccttttcaattgcgaggtaaccaacctgaacgactaccgagaaaatgtgttcaagctcctcccgcaactcacatatctcgacggctatgaccgggacgacaaggaggcccctgactcggatgctgagggctacgtggagggcctggatgatgaggaggaggatgaggatgaggaggagtatgatgaagatgctcaggtagtggaagacgaggaggacgaggatgaggaggaggaaggtgaagaggaggacgtgagtggagaggaggaggaggatgaagaaggttataacgatggagaggtagatgacgaggaagatgaagaagagcttggtgaagaagaaaggggtcagaagcgaaaacgagaacctgaagatgagggagaagatgatgactaagtggaataacctattttgaaaaattcctattgtgatttgactgtttttacccatatcccctctcccccccccctccaatcctgccccctgaaacttatttttttctgattgtaacgttgctgtgggaacgagaggggaagagtgtactgggggttgcggggggagggatggcgggtgggggtggaataaaatactatttttactgccactctttatttttttcccctactttttctttgtgtccggtttttgtccctgtaaatgcgatagctaagtacacactaagtgagcatttgttcctgactctcaaagaggatggtttggagttctcttacgtttcctggtatttcccaagtctcttgggttggttggaaggctgtggctggtctcagtttggttactcaatgcccaggaggggctgagcaccagccatatcttttgctttggttcacatgatgatacctgcttttctcaggcctgctagaggcatccaacgccctggtttgtaaatagcaacctaaaggcgtattttggcactggtctggggacattccccatctctcatcccttttcccccttcacagatggtggtgggcttcgctctacaaagaggactctgatgttactcttgagcttatgagccagagagctgaaaaccgcaggcttgttgtgttaagttacaaggaaaatggatttggtaattaaaattagaagaaacacaccttcaaacttcaacttctttaaaagaaaaaaaaaactgtcctatcttgttctgtaaaatattagaacgctttgttttacaaaaaatgatgagagaattcttccacatgtacttctgtgcttagaacatttttacggacctaagcgctggagacgttgctgcatgtcggctgggttttttttttcatacacccgagcacggaaaaactaacgcaaaattgtattttcttacctagtggaaatctgaaatgactgcaaattcctagtgaatgtacaggtttgctttcgtgtccctcttctggttgctttagaagtgacgtgtaatttctgaacccatgtttcatctgtataaaagaacatctgcaccagtttttctcctgcccctcagaagagccaaactttgagttttatgtctgtttgtcattgataaatttcaataaatctttttatacaatttttttggggatggcttctttgagtccaacaggccattgatcttttcaagatgcattccagatgaactgctaggtgagggggaagcttcatttttgttacctgatagaatagcttttcttatgagatatatataatgtgatactatgtttggatatttttggtcttaaagcaagactcagtggtgtatcttcattaaaagcttcctttaaaaaagttacagagttactaaaaaaacaagtacccaaacaatcaagttgggccaaccttggaaccttgttttgaatatctttcattgttttgtttgtcgtattgtaaaaagaatgtatggttgaaaactcaggaatgtttataaaacaaattatttcacaaaccca

SEQ ID NO: 24880 - protein, 51 aa, Homo sapiens
MCSSSSRNSHISTAMTGTTRRPLTRMLRATWRAWMMRRRMRMRRSMMKMLR

SEQ ID NO: 24881 - DNA, 2298 bp, Homo sapiens
ttaaggactaaccgatcgctctggtgtttgctctttcggcggaagtgatagagtgaaagaacttgtcctggacaacagtcggtcgaatgaaggcaaactcgaaggcctcacagatgaatttgaagaactggaattcttaagtacaatcaacgtaggcctcacctcaatcgcaaacttaccaaagttaaacaaacttaagaagcttgaactaagcgataacagagtctcagggggcctggaagtattggcagaaaagtgtccgaacctcacgcatctaaatttaagtggcaacaaaattaaagacctcagcacaatagagccactgaaaaagttagaaaacctcaagagcttagaccttttcaattgcgaggtaaccaacctgaacgactaccgagaaaatgtgttcaagctcctcccgcaactcacatatctcgacggctatgaccgggacgacaaggaggcccctgactcggatgctgagggctacgtggagggcctggatgatgaggaggaggatgaggatgaggaggagtatgatgaagatgctcaggtagtggaagacgaggaggacgaggatgaggaggaggaaggtgaagaggaggacgtgagtggagaggaggaggaggatgaagaaggttataacgatggagaggtagatgacgaggaagatgaagaagagcttggtgaagaagaaaggggtcagaagcgaaaacgagaacctgaagatgagggagaagatgatgactaagtggaataacctattttgaaaaattcctattgtgatttgactgtttttacccatatcccctctcccccccccctccaatcctgccccctgaaacttatttttttctgattgtaacgttgctgtgggaacgagaggggaagagtgtactgggggttgcggggggagggatggcgggtgggggtggaataaaatactatttttactgccactctttatttttttcccctactttttctttgtgtccggtttttgtccctgtaaatgcgatagctaagtacacactaagtgagcatttgttcctgactctcaaagaggatggtttggagttctcttacgtttcctggtatttcccaagtctcttgggttggttggaaggctgtggctggtctcagtttggttactcaatgcccaggaggggctgagcaccagccatatcttttgctttggttcacatgatgatacctgcttttctcaggcctgctagaggcatccaacgccctggtttgtaaatagcaacctaaaggcgtattttggcactggtctggggacattccccatctctcatcccttttcccccttcacagatggtggtgggcttcgctctacaaagaggactctgatgttactcttgagcttatgagccagagagctgaaaaccgcaggcttgttgtgttaagttacaaggaaaatggatttggtaattaaaattagaagaaacacaccttcaaacttcaacttctttaaaagaaaaaaaaaactgtcctatcttgttctgtaaaatattagaacgctttgttttacaaaaaatgatgagagaattcttccacatgtacttctgtgcttagaacatttttacggacctaagcgctggagacgttgctgcatgtcggctgggttttttttttcatacacccgagcacggaaaaactaacgcaaaattgtattttcttacctagtggaaatctgaaatgactgcaaattcctagtgaatgtacaggtttgctttcgtgtccctcttctggttgctttagaagtgacgtgtaatttctgaacccatgtttcatctgtataaaagaacatctgcaccagtttttctcctgcccctcagaagagccaaactttgagttttatgtctgtttgtcattgataaatttcaataaatctttttatacaatttttttggggatggcttctttgagtccaacaggccattgatcttttcaagatgcattccagatgaactgctaggtgagggggaagcttcatttttgttacctgatagaatagcttttcttatgagatatatataatgtgatactatgtttggatatttttggtcttaaagcaagactcagtggtgtatcttcattaaaagcttcctttaaaaaagttacagagttactaaaaaaacaagtacccaaacaatcaagttgggccaaccttggaaccttgttttgaatatctttcattgttttgtttgtcgtattgtaaaaagaatgtatggttgaaaactcaggaatgtttataaaacaaattatttcacaaaccca

SEQ ID NO: 24882 - protein, 51 aa, Homo sapiens; identical to SEQ ID NO: 24880

SEQ ID NO: 24883 - DNA, 2453 bp, Homo sapiens
gatcaggttagtgtgcgccgcgggtgctgggggctcgagaaccgagcggagctggttgagccttcaaagtcctaaaacgcgcggccgtgggttcggggtttattgattgaattccgccggcgcgggagcctctgcagagagagagcgcgagagatggagatgggcagacggattcatttagagctgcggaacaggacgccctctgatgtgaaagaacttgtcctggacaacagtcggtcgaatgaaggcaaactcgaaggcctcacagatgaatttgaagaactggaattcttaagtacaatcaacgtaggcctcacctcaatcgcaaacttaccaaagttaaacaaacttaagaagcttgaactaagcgataacagagtctcagggggcctggaagtattggcagaaaagtgtccgaacctcacgcatctaaatttaagtggcaacaaaattaaagacctcagcacaatagagccactgaaaaagttagaaaacctcaagagcttagaccttttcaattgcgaggtaaccaacctgaacgactaccgagaaaatgtgttcaagctcctcccgcaactcacatatctcgacggctatgaccgggacgacaaggaggcccctgactcggatgctgagggctacgtggagggcctggatgatgaggaggaggatgaggatgaggaggagtatgatgaagatgctcaggtagtggaagacgaggaggacgaggatgaggaggaggaaggtgaagaggaggacgtgagtggagaggaggaggaggatgaagaaggttataacgatggagaggtagatgacgaggaagatgaagaagagcttggtgaagaagaaaggggtcagaagcgaaaacgagaacctgaagatgagggagaagatgatgactaagtggaataacctattttgaaaaattcctattgtgatttgactgtttttacccatatcccctctcccccccccctccaatcctgccccctgaaacttatttttttctgattgtaacgttgctgtgggaacgagaggggaagagtgtactgggggttgcggggggagggatggcgggtgggggtggaataaaatactatttttactgccactctttatttttttcccctactttttctttgtgtccggtttttgtccctgtaaatgcgatagctaagtacacactaagtgagcatttgttcctgactctcaaagaggatggtttggagttctcttacgtttcctggtatttcccaagtctcttgggttggttggaaggctgtggctggtctcagtttggttactcaatgcccaggaggggctgagcaccagccatatcttttgctttggttcacatgatgatacctgcttttctcaggcctgctagaggcatccaacgccctggtttgtaaatagcaacctaaaggcgtattttggcactggtctggggacattccccatctctcatcccttttcccccttcacagatggtggtgggcttcgctctacaaagaggactctgatgttactcttgagcttatgagccagagagctgaaaaccgcaggcttgttgtgttaagttacaaggaaaatggatttggtaattaaaattagaagaaacacaccttcaaacttcaacttctttaaaagaaaaaaaaaactgtcctatcttgttctgtaaaatattagaacgctttgttttacaaaaaatgatgagagaattcttccacatgtacttctgtgcttagaacatttttacggacctaagcgctggagacgttgctgcatgtcggctgggttttttttttcatacacccgagcacggaaaaactaacgcaaaattgtattttcttacctagtggaaatctgaaatgactgcaaattcctagtgaatgtacaggtttgctttcgtgtccctcttctggttgctttagaagtgacgtgtaatttctgaacccatgtttcatctgtataaaagaacatctgcaccagtttttctcctgcccctcagaagagccaaactttgagttttatgtctgtttgtcattgataaatttcaataaatctttttatacaatttttttggggatggcttctttgagtccaacaggccattgatcttttcaagatgcattccagatgaactgctaggtgagggggaagcttcatttttgttacctgatagaatagcttttcttatgagatatatataatgtgatactatgtttggatatttttggtcttaaagcaagactcagtggtgtatcttcattaaaagcttcctttaaaaaagttacagagttactaaaaaaacaagtacccaaacaatcaagttgggccaaccttggaaccttgttttgaatatctttcattgttttgtttgtcgtattgtaaaaagaatgtatggttgaaaactcaggaatgtttataaaacaaattatttcacaaaccca

SEQ ID NO: 24884 - protein, 249 aa, Homo sapiens; identical to SEQ ID NO: 3319

SEQ ID NO: 24885 - DNA, 1940 bp, Homo sapiens
gatcaggttagtgtgcgccgcgggtgctgggggctcgagaaccgagcggagctggttgagccttcaaagtcctaaaacgcgcggccgtgggttcggggtttattgattgaattccgccggcgcgggagcctctgcagagagagagcgcgagagatggagatgggcagacggattcatttagagctgcggaacaggacgccctctgatgtgaaagaacttgtcctggacaacagtcggtcgaatgaaggcaaactcgaaggcctcacagatgaatttgaagaactggaattcttaagtacaatcaacgtaggcctcacctcaatcgcaaacttaccaaagttaaacaaacttaagaagcttgaactaagcgataacagagtctcagggggcctggaagtattggcagaaaagtgtccgaacctcacgcatctaaatttaagtggcaacaaaattaaagacctcagcacaatagagccactgaaacttatttttttctgattgtaacgttgctgtgggaacgagaggggaagagtgtactgggggttgcggggggagggatggcgggtgggggtggaataaaatactatttttactgccactctttatttttttcccctactttttctttgtgtccggtttttgtccctgtaaatgcgatagctaagtacacactaagtgagcatttgttcctgactctcaaagaggatggtttggagttctcttacgtttcctggtatttcccaagtctcttgggttggttggaaggctgtggctggtctcagtttggttactcaatgcccaggaggggctgagcaccagccatatcttttgctttggttcacatgatgatacctgcttttctcaggcctgctagaggcatccaacgccctggtttgtaaatagcaacctaaaggcgtattttggcactggtctggggacattccccatctctcatcccttttcccccttcacagatggtggtgggcttcgctctacaaagaggactctgatgttactcttgagcttatgagccagagagctgaaaaccgcaggcttgttgtgttaagttacaaggaaaatggatttggtaattaaaattagaagaaacacaccttcaaacttcaacttctttaaaagaaaaaaaaaactgtcctatcttgttctgtaaaatattagaacgctttgttttacaaaaaatgatgagagaattcttccacatgtacttctgtgcttagaacatttttacggacctaagcgctggagacgttgctgcatgtcggctgggttttttttttcatacacccgagcacggaaaaactaacgcaaaattgtattttcttacctagtggaaatctgaaatgactgcaaattcctagtgaatgtacaggtttgctttcgtgtccctcttctggttgctttagaagtgacgtgtaatttctgaacccatgtttcatctgtataaaagaacatctgcaccagtttttctcctgcccctcagaagagccaaactttgagttttatgtctgtttgtcattgataaatttcaataaatctttttatacaatttttttggggatggcttctttgagtccaacaggccattgatcttttcaagatgcattccagatgaactgctaggtgagggggaagcttcatttttgttacctgatagaatagcttttcttatgagatatatataatgtgatactatgtttggatatttttggtcttaaagcaagactcagtggtgtatcttcattaaaagcttcctttaaaaaagttacagagttactaaaaaaacaagtacccaaacaatcaagttgggccaaccttggaaccttgttttgaatatctttcattgttttgtttgtcgtattgtaaaaagaatgtatggttgaaaactcaggaatgtttataaaacaaattatttcacaaaccca

SEQ ID NO: 24886 - protein, 114 aa, Homo sapiens
MEMGRRIHLELRNRTPSDVKELVLDNSRSNEGKLEGLTDEFEELEFLSTINVGLTSIANLPKLNKLKKLELSDNRVSGGLEVLAEKCPNLTHLNLSGNKIKDLSTIEPLKLIFF

SEQ ID NO: 24887 - DNA, 2375 bp, Homo sapiens
gatcaggttagtgtgcgccgcgggtgctgggggctcgagaaccgagcggagctggttgagccttcaaagtcctaaaacgcgcggccgtgggttcggggtttattgattgaattccgccggcgcgggagcctctgcagagagagagcgcgagagatggagatgggcagacggattcatttagagctgcggaacaggacgccctctgatgtgaaagaacttgtcctggacaacagtcggtcgaatgaaggcaaactcgaaggcctcacagatgaatttgaagaactggaattcttaagtacaatcaacgtaggcctcacctcaatcgcaaacttaccaaagttaaacaaacttaagaagcttgaactaagcgataacagagtctcagggggcctggaagtattggcagaaaagtgtccgaacctcacgcatctaaatttaagtggcaacaaaattaaagacctcagcacaatagagccactgaaaaagttagaaaacctcaagagcttagaccttttcaattgcgaggtaaccaacctgaacgactaccgagaaaatgtgttcaagctcctcccgcaactcacatatctcgacggctatgaccgggacgacaaggaggcccctgactcggatgctgagggctacgtggagggcctggatgatgaggaggaggatgaggatgaggaggagtatgatgaagatgctcaggtagtggaagacgaggaggacgaggatgaggaggaggaaggtgaagaggaggacgtgaaagaagaaaggggtcagaagcgaaaacgagaacctgaagatgagggagaagatgatgactaagtggaataacctattttgaaaaattcctattgtgatttgactgtttttacccatatcccctctcccccccccctccaatcctgccccctgaaacttatttttttctgattgtaacgttgctgtgggaacgagaggggaagagtgtactgggggttgcggggggagggatggcgggtgggggtggaataaaatactatttttactgccactctttatttttttcccctactttttctttgtgtccggtttttgtccctgtaaatgcgatagctaagtacacactaagtgagcatttgttcctgactctcaaagaggatggtttggagttctcttacgtttcctggtatttcccaagtctcttgggttggttggaaggctgtggctggtctcagtttggttactcaatgcccaggaggggctgagcaccagccatatcttttgctttggttcacatgatgatacctgcttttctcaggcctgctagaggcatccaacgccctggtttgtaaatagcaacctaaaggcgtattttggcactggtctggggacattccccatctctcatcccttttcccccttcacagatggtggtgggcttcgctctacaaagaggactctgatgttactcttgagcttatgagccagagagctgaaaaccgcaggcttgttgtgttaagttacaaggaaaatggatttggtaattaaaattagaagaaacacaccttcaaacttcaacttctttaaaagaaaaaaaaaactgtcctatcttgttctgtaaaatattagaacgctttgttttacaaaaaatgatgagagaattcttccacatgtacttctgtgcttagaacatttttacggacctaagcgctggagacgttgctgcatgtcggctgggttttttttttcatacacccgagcacggaaaaactaacgcaaaattgtattttcttacctagtggaaatctgaaatgactgcaaattcctagtgaatgtacaggtttgctttcgtgtccctcttctggttgctttagaagtgacgtgtaatttctgaacccatgtttcatctgtataaaagaacatctgcaccagtttttctcctgcccctcagaagagccaaactttgagttttatgtctgtttgtcattgataaatttcaataaatctttttatacaatttttttggggatggcttctttgagtccaacaggccattgatcttttcaagatgcattccagatgaactgctaggtgagggggaagcttcatttttgttacctgatagaatagcttttcttatgagatatatataatgtgatactatgtttggatatttttggtcttaaagcaagactcagtggtgtatcttcattaaaagcttcctttaaaaaagttacagagttactaaaaaaacaagtacccaaacaatcaagttgggccaaccttggaaccttgttttgaatatctttcattgttttgtttgtcgtattgtaaaaagaatgtatggttgaaaactcaggaatgtttataaaacaaattatttcacaaaccca

SEQ ID NO: 24888 - protein, 223 aa, Homo sapiens
MEMGRRIHLELRNRTPSDVKELVLDNSRSNEGKLEGLTDEFEELEFLSTINVGLTSIANLPKLNKLKKLELSDNRVSGGLEVLAEKCPNLTHLNLSGNKIKDLSTIEPLKKLENLKSLDLFNCEVTNLNDYRENVFKLLPQLTYLDGYDRDDKEAPDSDAEGYVEGLDDEEEDEDEEEYDEDAQVVEDEEDEDEEEEGEEEDVKEERGQKRKREPEDEGEDDD

SEQ ID NO: 24889 - DNA, 1474 bp, Homo sapiens
cgaatgaaggcaaactcgaaggcctcacagatgaatttgaagaactggaattcttaagtacaatcaacgtaggcctcacctatgatgaagatgctcaggtagtggaagacgaggaggacgaggatgaggaggaggaaggtgaagaggaggacgtgagtggagaggaggaggaggatgaagaaggttataacgatggagaggtagatgacgaggaagatgaagaagagcttggtgaagaagaaaggggtcagaagcgaaaacgagaacctgaagatgagggagaagatgatgactaagtggaataacctattttgaaaaattcctattgtgatttgactgtttttacccatatcccctctcccccccccctccaatcctgccccctgaaacttatttttttctgattgtaacgttgctgtgggaacgagaggggaagagtgtactgggggttgcggggggagggatggcgggtgggggtggaataaaatactatttttactgccactctttatttttttcccctactttttctttgtgtccggtttttgtccctgtaaatgcgatagctaagtacacactaagtgagcatttgttcctgactctcaaagaggatggtttggagttctcttacgtttcctggtatttcccaagtctcttgggttggttggaaggctgtggctggtctcagtttggttactcaatgcccaggaggggctgagcaccagccatatcttttgctttggttcacatgatgatacctgcttttctcaggcctgctagaggcatccaacgccctggtttgtaaatagcaacctaaaggcgtattttggcactggtctggggacattccccatctctcatcccttttcccccttcacagatggtggtgggcttcgctctacaaagaggactctgatgttactcttgagcttatgagccagagagctgaaaaccgcaggcttgttgtgttaagttacaaggaaaatggatttggtaattaaaattagaagaaacacaccttcaaacttcaacttctttaaaagaaaaaaaaaactgtcctatcttgttctgtaaaatattagaacgctttgttttacaaaaaatgatgagagaattcttccacatgtacttctgtgcttagaacatttttacggacctaagcgctggagacgttgctgcatgtcggctgggttttttttttcatacacccgagcacggaaaaactaacgcaaaattgtattttcttacctagtggaaatctgaaatgactgcaaattcctagtgaatgtacaggtttgctttcgtgtccctcttctggttgctttagaagtgacgtgtaatttctgaacccatgtttcatctgtataaaagaacatctgcaccagtttttctcctgcccctcagaagagccaaactttgagttttatgtctgtttgtcattgataaatttcaataaatctttttatacaatttt

SEQ ID NO: 24890 - protein, 36 aa, Homo sapiens [sequence omitted]

SEQ ID NO: 24891 - DNA, 1434 bp, Homo sapiens
ggcctggcttcctggctctgcgatgctttcctgccctagggcagaaggcctcacaggatttattcccaggcactcttgccatgaccttgagaaggtggcttgacctggacatctggatctcagggactgagggggtgggaaaggactgagcctccccctcccagacccaacaggaaggtgggctttggtgaccatttcctaggctgagagctccttagctccaggagagggctgcgctccctggttctcctgctctgtgggctgtgctagatgaaacccacaaattgctgctgtcccgggcggagtggcatgcctccacccaccagtgaagaatgaaggcagggcagttgcagggccctgcaggactctgagatccagatgtgtaccccagtgctcccctgctctgcccactggcaagaggggatggcgggtgggggtggaataaaatactatttttactgccactctttatttttttcccctactttttctttgtgtccggtttttgtccctgtaaatgcgatagctaagtacacactaagtgagcatttgttcctgactctcaaagaggatggtttggagttctcttacgtttcctggtatttcccaagtctcttgggttggttggaaggctgtggctggtctcagtttggttactcaatgcccaggaggggctgagcaccagccatatcttttgctttggttcacatgatgatacctgcttttctcaggcctgctagaggcatccaacgccctggtttgtaaatagcaacctaaaggcgtattttggcactggtctggggacattccccatctctcatcccttttcccccttcacagatggtggtgggcttcgctctacaaagaggactctgatgttactcttgagcttatgagccagagagctgaaaaccgcaggcttgttgtgttaagttacaaggaaaatggatttggtaattaaaattagaagaaacacaccttcaaacttcaacttctttaaaagaaaaaaaaaactgtcctatcttgttctgtaaaatattagaacgctttgttttacaaaaaatgatgagagaattcttccacatgtacttctgtgcttagaacatttttacggacctaagcgctggagacgttgctgcatgtcggctgggttttttttttcatacacccgagcacggaaaaactaacgcaaaattgtattttcttacctagtggaaatctgaaatgactgcaaattcctagtgaatgtacaggtttgctttcgtgtccctcttctggttgctttagaagtgacgtgtaatttctgaacccatgtttcatctgtataaaagaacatctgcaccagtttttctcctgcccctcagaagagccaaactttgagttttatgtctgtttgtcattgataaatttcaataaatctttttatacaatttt

SEQ ID NO: 24892 - protein, 99 aa, Homo sapiens; identical to SEQ ID NO: 24878

SEQ ID NO: 24893 - DNA, 4880 bp, Homo sapiens
tggtcagtggaattgggaaaaagtctacaaaagtacaaattttcagtttaattttaactttgcgcttcactcacacccaggacttggcaggggaagtgggccttggttttttttttttctttttaaagcagaacacaccctgggtggaaaagggatgttctctttgcatggaagggttagaaccaagtacagaggaaatgggttggtattgtagcaagagttcaggggtgggtctaggctttgaaactagagcactaggaaagtgtggccctcatggaggcaggcagggaagggaatgggatgtctttcacaggcagctgttgggctgacatttttgttttgtcctgtttggtgcatttcagatacttcacagctcacctgctgctctcactgggacccctcttcatctcatgacaaagcagtgggtctttcccccatgtggtttgggctttttggtggtatcagcaacctcaggtctaagccctgtcccctccttcccctctgtgatctcaccctgcatggtgctgaaaccaaccagggaggaaatgcagaaacagtggggattctgaagacaccacctttaaaacgatggggatttcccaagggagtggaagcaacctcttgctatttggggaagagcagggtcccaggcccctctctgtatccttgccccctcctgcagcgtcatctgagccagggcagggttaggctctgtgctttggttgctaaggatgtgtaaccagagcagagacctctaggggtggtgcccacctggctggtggaacagttagaagaggagctgaaaagaaacagttacagctgtaggggcgggaaggtgtgatccctttccttacccgtcgtaagagtcatggccaacacttataacaaaagaaaggctaacaaaagaagagcgtaacaaatttatttaatcaaagttgtaagtgacatgagaaccttcagagaagaagaaccaaagacccagggaaactgcctatttttatacttaggtttgatgaagaatagacagccatgaagaaatgggactggacaaaggggtgtaggctgagagggaacccagcaaggcctgtctgttcagattctttgtggcctctctgtgtagcattccttcctcctagatatggggcaggacttccctggcatgagggtcttcaagggagaagggacaggagagagtaacctttctcggctttgctttgggagagaggaattctagtttctgtgacccgccttggggaagagaagttctggattctgtgacttctggggagagagggtgagagacaggagggcaagagaaattcacagagcttgcttctgaggccttccaatctcctttagttcaaagtacccagcacgccaaagccccttacatttgggtattgtgttctgagccccagcacagccaagaacttgtagaattgacttgggggtctggggagagtcccaagaagccaacaggggcccctcctcatcttgtggctaacactagccacctgagtgcagtagacacccaccctcctgtgaccttcttttgggattttaggataagcagttcggacgtgcctttaaaacggagagaacacaccccaaggagtggttatggggattaaacgagactgtgtatgaagcacctagagtgtgcctagcgagtgcttgagaaagatatgacgattatttttaatcaaagcattaatagtgattgcttgagtattgtcctccagaggagcagccaccagttttggtgttgtggtaggagccagggactggcctcgtcagggctccgaaacctatgtctatctgtagcattcctaggcagcctaccccagcagcagccccttgggctgtgggcaggggtggcaggcagcactgttcctctccaggaaggagaccgacttcctggacgaattccctgggctccccagcactgctctctgaggccctcctctcctcggccaacggcagtaaggagaagccattgacccgtctagaaaaaccgcatgtctgcagtctttgagggtagactggaatctcttctcatatttgccttgctttggtggagcttcaagaattcccaggccttccaaggaaaccaattactaaagaagactgtgggccacgtgactccagtgtttactgcaaacgaaggagatggctcccctcccccaacacagttactctccctccatctgcactggccccctaaggcctggcttcctggctctgcgatgctttcctgccctagggcagaaggcctcacaggatttattcccaggcactcttgccatgaccttgagaaggtggcttgacctggacatctggatctcagggactgagggggtgggaaaggactgagcctccccctcccagacccaacaggaaggtgggctttggtgaccatttcctaggctgagagctccttagctccaggagagggctgcgctccctggttctcctgctctgtgggctgtgctagatgaaacccacaaattgctgctgtcccgggcggagtggcatgcctccacccaccagtgaagaatgaaggcagggcagttgcagggccctgcaggactctgagatccagatgtgtaccccagtgctcccctgctctgcccactggcaagagggggctgaggaggggcatagcaggcctcatgtggactctgtttccacctcctttcccccatatctctacttggcccagagatgcctgagtaagaggggcacctagtcattctgggcccagaaagaagaagctaggcatgttggcctgctcaaaggagcaggagcagccctggacagggacaggttagaaagcctggctgcttatccaagagaagaaaaggccctgaggggcaggagcaaccctttgaacaatgctggactgctgttgagaaggaaggcttgtgccatgtgacccattggtgagaaatcagggcctgtgcatggaagttccagggagggaggcaacaaatccagttgacattggtgaaagaacttgtcctggacaacagtcggtcgaatgaaggcaaactcgaaggcctcacagatgaatttgaagaactggaattcttaagtacaatcaacgtaggcctcacctcaatcgcaaacttaccaaagttaaacaaacttaagaagcttgaactaagcgataacagagtctcagggggcctggaagtattggcagaaaagtgtccgaacctcacgcatctaaatttaagtggcaacaaaattaaagacctcagcacaatagagccactgaaaaagttagaaaacctcaagagcttagaccttttcaattgcgaggtaaccaacctgaacgactaccgagaaaatgtgttcaagctcctcccgcaactcacatatctcgacggctatgaccgggacgacaaggaggcccctgactcggatgctgagggctacgtggagggcctggatgatgaggaggaggatgaggatgaggaggagtatgatgaagatgctcaggtagtggaagacgaggaggacgaggatgaggaggaggaaggtgaagaggaggacgtgagtggagaggaggaggaggatgaagaaggttataacgatggagaggtagatgacgaggaagatgaagaagagcttggtgaagaagaaaggggtcagaagcgaaaacgagaacctgaagatgagggagaagatgatgactaagtggaataacctattttgaaaaattcctattgtgatttgactgtttttacccatatcccctctcccccccccctccaatcctgccccctgaaacttatttttttctgattgtaacgttgctgtgggaacgagaggggaagagtgtactgggggttgcggggggagggatggcgggtgggggtggaataaaatactatttttactgccactctttatttttttcccctactttttctttgtgtccggtttttgtccctgtaaatgcgatagctaagtacacactaagtgagcatttgttcctgactctcaaagaggatggtttggagttctcttacgtttcctggtatttcccaagtctcttgggttggttggaaggctgtggctggtctcagtttggttactcaatgcccaggaggggctgagcaccagccatatcttttgctttggttcacatgatgatacctgcttttctcaggcctgctagaggcatccaacgccctggtttgtaaatagcaacctaaaggcgtattttggcactggtctggggacattccccatctctcatcccttttcccccttcacagatggtggtgggcttcgctctacaaagaggactctgatgttactcttgagcttatgagccagagagctgaaaaccgcaggcttgttgtgttaagttacaaggaaaatggatttggtaattaaaattagaagaaacacaccttcaaacttcaacttctttaaaagaaaaaaaaaactgtcctatcttgttctgtaaaatattagaacgctttgttttacaaaaaatgatgagagaattcttccacatgtacttctgtgcttagaacatttttacggacctaagcgctggagacgttgctgcatgtcggctgggttttttttttcatacacccgagcacggaaaaactaacgcaaaattgtattttcttacctagtggaaatctgaaatgactgcaaattcctagtgaatgtacaggtttgctttcgtgtccctcttctggttgctttagaagtgacgtgtaatttctgaacccatgtttcatctgtataaaagaacatctgcaccagtttttctcctgcccctcagaagagccaaactttgagttttatgtctgtttgtcattgataaatttcaataaatctttttatacaatttt

SEQ ID NO: 24894 - protein, 51 aa, Homo sapiens; identical to SEQ ID NO: 24880

SEQ ID NO: 24895 - DNA, 1926 bp, Homo sapiens
ttaaggactaaccgatcgctctggtgtttgctctttcggcggaagtgatagagtgaaagaacttgtcctggacaacagtcggtcgaatgaaggcaaactcgaaggcctcacagatgaatttgaagaactggaattcttaagtacaatcaacgtaggcctcacctcaatcgcaaacttaccaaagttaaacaaacttaagaagcttgaactaagcgataacagagtctcagggggcctggaagtattggcagaaaagtgtccgaacctcacgcatctaaatttaagtggcaacaaaattaaagacctcagcacaatagagccactgaaaaagttagaaaacctcaagagcttagaccttttcaattgcgaggtaaccaacctgaacgactaccgagaaaatgtgttcaagctcctcccgcaactcacatatctcgacggctatgaccgggacgacaaggaggcccctgactcggatgctgagggctacgtggagggcctggatgatgaggaggaggatgaggatgaggaggagtatgatgaagatgctcaggtagtggaagacgaggaggacgaggatgaggaggaggaaggtgaagaggaggacgtgagtggagaggaggaggaggatgaagaaggttataacgatggagaggtagatgacgaggaagatgaagaagagcttggtgaagaagaaaggggtcagaagcgaaaacgagaacctgaagatgagggagaagatgatgactaagtggaataacctattttgaaaaattcctattgtgatttgactgtttttacccatatcccctctcccccccccctccaatcctgccccctgaaacttatttttttctgattgtaacgttgctgtgggaacgagaggggaagagtgtactgggggttgcggggggagggatggcgggtgggggtggaataaaatactatttttactgccactctttatttttttcccctactttttctttgtgtccggtttttgtccctgtaaatgcgatagctaagtacacactaagtgagcatttgttcctgactctcaaagaggatggtttggagttctcttacgtttcctggtatttcccaagtctcttgggttggttggaaggctgtggctggtctcagtttggttactcaatgcccaggaggggctgagcaccagccatatcttttgctttggttcacatgatgatacctgcttttctcaggcctgctagaggcatccaacgccctggtttgtaaatagcaacctaaaggcgtattttggcactggtctggggacattccccatctctcatcccttttcccccttcacagatggtggtgggcttcgctctacaaagaggactctgatgttactcttgagcttatgagccagagagctgaaaaccgcaggcttgttgtgttaagttacaaggaaaatggatttggtaattaaaattagaagaaacacaccttcaaacttcaacttctttaaaagaaaaaaaaaactgtcctatcttgttctgtaaaatattagaacgctttgttttacaaaaaatgatgagagaattcttccacatgtacttctgtgcttagaacatttttacggacctaagcgctggagacgttgctgcatgtcggctgggttttttttttcatacacccgagcacggaaaaactaacgcaaaattgtattttcttacctagtggaaatctgaaatgactgcaaattcctagtgaatgtacaggtttgctttcgtgtccctcttctggttgctttagaagtgacgtgtaatttctgaacccatgtttcatctgtataaaagaacatctgcaccagtttttctcctgcccctcagaagagccaaactttgagttttatgtctgtttgtcattgataaatttcaataaatctttttatacaatttt

SEQ ID NO: 24896 - protein, 51 aa, Homo sapiens; identical to SEQ ID NO: 24880

SEQ ID NO: 24897 - DNA, 2081 bp, Homo sapiens
gatcaggttagtgtgcgccgcgggtgctgggggctcgagaaccgagcggagctggttgagccttcaaagtcctaaaacgcgcggccgtgggttcggggtttattgattgaattccgccggcgcgggagcctctgcagagagagagcgcgagagatggagatgggcagacggattcatttagagctgcggaacaggacgccctctgatgtgaaagaacttgtcctggacaacagtcggtcgaatgaaggcaaactcgaaggcctcacagatgaatttgaagaactggaattcttaagtacaatcaacgtaggcctcacctcaatcgcaaacttaccaaagttaaacaaacttaagaagcttgaactaagcgataacagagtctcagggggcctggaagtattggcagaaaagtgtccgaacctcacgcatctaaatttaagtggcaacaaaattaaagacctcagcacaatagagccactgaaaaagttagaaaacctcaagagcttagaccttttcaattgcgaggtaaccaacctgaacgactaccgagaaaatgtgttcaagctcctcccgcaactcacatatctcgacggctatgaccgggacgacaaggaggcccctgactcggatgctgagggctacgtggagggcctggatgatgaggaggaggatgaggatgaggaggagtatgatgaagatgctcaggtagtggaagacgaggaggacgaggatgaggaggaggaaggtgaagaggaggacgtgagtggagaggaggaggaggatgaagaaggttataacgatggagaggtagatgacgaggaagatgaagaagagcttggtgaagaagaaaggggtcagaagcgaaaacgagaacctgaagatgagggagaagatgatgactaagtggaataacctattttgaaaaattcctattgtgatttgactgtttttacccatatcccctctcccccccccctccaatcctgccccctgaaacttatttttttctgattgtaacgttgctgtgggaacgagaggggaagagtgtactgggggttgcggggggagggatggcgggtgggggtggaataaaatactatttttactgccactctttatttttttcccctactttttctttgtgtccggtttttgtccctgtaaatgcgatagctaagtacacactaagtgagcatttgttcctgactctcaaagaggatggtttggagttctcttacgtttcctggtatttcccaagtctcttgggttggttggaaggctgtggctggtctcagtttggttactcaatgcccaggaggggctgagcaccagccatatcttttgctttggttcacatgatgatacctgcttttctcaggcctgctagaggcatccaacgccctggtttgtaaatagcaacctaaaggcgtattttggcactggtctggggacattccccatctctcatcccttttcccccttcacagatggtggtgggcttcgctctacaaagaggactctgatgttactcttgagcttatgagccagagagctgaaaaccgcaggcttgttgtgttaagttacaaggaaaatggatttggtaattaaaattagaagaaacacaccttcaaacttcaacttctttaaaagaaaaaaaaaactgtcctatcttgttctgtaaaatattagaacgctttgttttacaaaaaatgatgagagaattcttccacatgtacttctgtgcttagaacatttttacggacctaagcgctggagacgttgctgcatgtcggctgggttttttttttcatacacccgagcacggaaaaactaacgcaaaattgtattttcttacctagtggaaatctgaaatgactgcaaattcctagtgaatgtacaggtttgctttcgtgtccctcttctggttgctttagaagtgacgtgtaatttctgaacccatgtttcatctgtataaaagaacatctgcaccagtttttctcctgcccctcagaagagccaaactttgagttttatgtctgtttgtcattgataaatttcaataaatctttttatacaatttt

SEQ ID NO: 24898 - protein, 249 aa, Homo sapiens; identical to SEQ ID NO: 3319

SEQ ID NO: 24899 - DNA, 1568 bp, Homo sapiens
gatcaggttagtgtgcgccgcgggtgctgggggctcgagaaccgagcggagctggttgagccttcaaagtcctaaaacgcgcggccgtgggttcggggtttattgattgaattccgccggcgcgggagcctctgcagagagagagcgcgagagatggagatgggcagacggattcatttagagctgcggaacaggacgccctctgatgtgaaagaacttgtcctggacaacagtcggtcgaatgaaggcaaactcgaaggcctcacagatgaatttgaagaactggaattcttaagtacaatcaacgtaggcctcacctcaatcgcaaacttaccaaagttaaacaaacttaagaagcttgaactaagcgataacagagtctcagggggcctggaagtattggcagaaaagtgtccgaacctcacgcatctaaatttaagtggcaacaaaattaaagacctcagcacaatagagccactgaaacttatttttttctgattgtaacgttgctgtgggaacgagaggggaagagtgtactgggggttgcggggggagggatggcgggtgggggtggaataaaatactatttttactgccactctttatttttttcccctactttttctttgtgtccggtttttgtccctgtaaatgcgatagctaagtacacactaagtgagcatttgttcctgactctcaaagaggatggtttggagttctcttacgtttcctggtatttcccaagtctcttgggttggttggaaggctgtggctggtctcagtttggttactcaatgcccaggaggggctgagcaccagccatatcttttgctttggttcacatgatgatacctgcttttctcaggcctgctagaggcatccaacgccctggtttgtaaatagcaacctaaaggcgtattttggcactggtctggggacattccccatctctcatcccttttcccccttcacagatggtggtgggcttcgctctacaaagaggactctgatgttactcttgagcttatgagccagagagctgaaaaccgcaggcttgttgtgttaagttacaaggaaaatggatttggtaattaaaattagaagaaacacaccttcaaacttcaacttctttaaaagaaaaaaaaaactgtcctatcttgttctgtaaaatattagaacgctttgttttacaaaaaatgatgagagaattcttccacatgtacttctgtgcttagaacatttttacggacctaagcgctggagacgttgctgcatgtcggctgggttttttttttcatacacccgagcacggaaaaactaacgcaaaattgtattttcttacctagtggaaatctgaaatgactgcaaattcctagtgaatgtacaggtttgctttcgtgtccctcttctggttgctttagaagtgacgtgtaatttctgaacccatgtttcatctgtataaaagaacatctgcaccagtttttctcctgcccctcagaagagccaaactttgagttttatgtctgtttgtcattgataaatttcaataaatctttttatacaatttt

SEQ ID NO: 24900 - protein, 114 aa, Homo sapiens; identical to SEQ ID NO: 24886

SEQ ID NO: 24901 - DNA, 2003 bp, Homo sapiens
gatcaggttagtgtgcgccgcgggtgctgggggctcgagaaccgagcggagctggttgagccttcaaagtcctaaaacgcgcggccgtgggttcggggtttattgattgaattccgccggcgcgggagcctctgcagagagagagcgcgagagatggagatgggcagacggattcatttagagctgcggaacaggacgccctctgatgtgaaagaacttgtcctggacaacagtcggtcgaatgaaggcaaactcgaaggcctcacagatgaatttgaagaactggaattcttaagtacaatcaacgtaggcctcacctcaatcgcaaacttaccaaagttaaacaaacttaagaagcttgaactaagcgataacagagtctcagggggcctggaagtattggcagaaaagtgtccgaacctcacgcatctaaatttaagtggcaacaaaattaaagacctcagcacaatagagccactgaaaaagttagaaaacctcaagagcttagaccttttcaattgcgaggtaaccaacctgaacgactaccgagaaaatgtgttcaagctcctcccgcaactcacatatctcgacggctatgaccgggacgacaaggaggcccctgactcggatgctgagggctacgtggagggcctggatgatgaggaggaggatgaggatgaggaggagtatgatgaagatgctcaggtagtggaagacgaggaggacgaggatgaggaggaggaaggtgaagaggaggacgtgaaagaagaaaggggtcagaagcgaaaacgagaacctgaagatgagggagaagatgatgactaagtggaataacctattttgaaaaattcctattgtgatttgactgtttttacccatatcccctctcccccccccctccaatcctgccccctgaaacttatttttttctgattgtaacgttgctgtgggaacgagaggggaagagtgtactgggggttgcggggggagggatggcgggtgggggtggaataaaatactatttttactgccactctttatttttttcccctactttttctttgtgtccggtttttgtccctgtaaatgcgatagctaagtacacactaagtgagcatttgttcctgactctcaaagaggatggtttggagttctcttacgtttcctggtatttcccaagtctcttgggttggttggaaggctgtggctggtctcagtttggttactcaatgcccaggaggggctgagcaccagccatatcttttgctttggttcacatgatgatacctgcttttctcaggcctgctagaggcatccaacgccctggtttgtaaatagcaacctaaaggcgtattttggcactggtctggggacattccccatctctcatcccttttcccccttcacagatggtggtgggcttcgctctacaaagaggactctgatgttactcttgagcttatgagccagagagctgaaaaccgcaggcttgttgtgttaagttacaaggaaaatggatttggtaattaaaattagaagaaacacaccttcaaacttcaacttctttaaaagaaaaaaaaaactgtcctatcttgttctgtaaaatattagaacgctttgttttacaaaaaatgatgagagaattcttccacatgtacttctgtgcttagaacatttttacggacctaagcgctggagacgttgctgcatgtcggctgggttttttttttcatacacccgagcacggaaaaactaacgcaaaattgtattttcttacctagtggaaatctgaaatgactgcaaattcctagtgaatgtacaggtttgctttcgtgtccctcttctggttgctttagaagtgacgtgtaatttctgaacccatgtttcatctgtataaaagaacatctgcaccagtttttctcctgcccctcagaagagccaaactttgagttttatgtctgtttgtcattgataaatttcaataaatctttttatacaatttt

SEQ ID NO: 24902 - protein, 223 aa, Homo sapiens; identical to SEQ ID NO: 24888

SEQ ID NO: 24903 - DNA, 1117 bp, Homo sapiens
gatcaggttagtgtgcgccgcgggtgctgggggctcgagaaccgagcggagctggttgagccttcaaagtcctaaaacgcgcggccgtgggttcggggtttattgattgaattccgccggcgcgggagcctctgcagagagagagcgcgagagatggagatgggcagacggattcatttagagctgcggaacaggacgccctctgatgtgaaagaacttgtcctggacaacagtcggtcgaatgaaggcaaactcgaaggcctcacagatgaatttgaagaactggaattcttaagtacaatcaacgtaggcctcacctcaatcgcaaacttaccaaagttaaacaaacttaagaagcttgaactaagcgataacagagtctcagggggcctggaagtattggcagaaaagtgtccgaacctcacgcatctaaatttaagtggcaacaaaattaaagacctcagcacaatagagccactgaaaaagttagaaaacctcaagagcttagaccttttcaattgcgaggtaaccaacctgaacgactaccgagaaaatgtgttcaagctcctcccgcaactcacatatctcgacggctatgaccgggacgacaaggaggcccctgactcggatgctgagggctacgtggagggcctggatgatgaggaggaggatgaggatgaggaggagtatgatgaagatgctcaggtagtggaagacgaggaggacgaggatgaggaggaggaaggtgaagaggaggacgtgagtggagaggaggaggaggatgaagaaggttataacgatggagaggtagatgacgaggaagatgaagaagagcttggtgaagaagaaaggggtcagaagcgaaaacgagaacctgaagatgagggagaagatgatgactaagtggaataacctattttgaaaaattcctattgtgatttgactgtttttacccatatcccctctcccccccccctccaatcctgccccctgaaacttatttttttctgattgtaacgttgctgtgggaacgagaggggaagagtgtactgggggttgcggggggagggatggcgggtgggggtggaataaaatactatttttactgccactcttt

SEQ ID NO: 24904 - protein, 249 aa, Homo sapiens; identical to SEQ ID NO: 3319

SEQ ID NO: 24905 - DNA, 604 bp, Homo sapiens
gatcaggttagtgtgcgccgcgggtgctgggggctcgagaaccgagcggagctggttgagccttcaaagtcctaaaacgcgcggccgtgggttcggggtttattgattgaattccgccggcgcgggagcctctgcagagagagagcgcgagagatggagatgggcagacggattcatttagagctgcggaacaggacgccctctgatgtgaaagaacttgtcctggacaacagtcggtcgaatgaaggcaaactcgaaggcctcacagatgaatttgaagaactggaattcttaagtacaatcaacgtaggcctcacctcaatcgcaaacttaccaaagttaaacaaacttaagaagcttgaactaagcgataacagagtctcagggggcctggaagtattggcagaaaagtgtccgaacctcacgcatctaaatttaagtggcaacaaaattaaagacctcagcacaatagagccactgaaacttatttttttctgattgtaacgttgctgtgggaacgagaggggaagagtgtactgggggttgcggggggagggatggcgggtgggggtggaataaaatactatttttactgccactcttt

SEQ ID NO: 24906 - protein, 114 aa, Homo sapiens; identical to SEQ ID NO: 24886

SEQ ID NO: 24907 - DNA, 504 bp, Homo sapiens
cgaatgaaggcaaactcgaaggcctcacagatgaatttgaagaactggaattcttaagtacaatcaacgtaggcctcacctatgatgaagatgctcaggtagtggaagacgaggaggacgaggatgaggaggaggaaggtgaagaggaggacgtgagtggagaggaggaggaggatgaagaaggttataacgatggagaggtagatgacgaggaagatgaagaagagcttggtgaagaagaaaggggtcagaagcgaaaacgagaacctgaagatgagggagaagatgatgactaagtggaataacctattttgaaaaattcctattgtgatttgactgtttttacccatatcccctctcccccccccctccaatcctgccccctgaaacttatttttttctgattgtaacgttgctgtgggaacgagaggggaagagtgtactgggggttgcggggggagggatggcgggtgggggtggaataaaatactatttttactgcca

SEQ ID NO: 24908 - protein, 36 aa, Homo sapiens [sequence omitted]

SEQ ID NO: 24909 - DNA, 3910 bp, Homo sapiens
tggtcagtggaattgggaaaaagtctacaaaagtacaaattttcagtttaattttaactttgcgcttcactcacacccaggacttggcaggggaagtgggccttggttttttttttttctttttaaagcagaacacaccctgggtggaaaagggatgttctctttgcatggaagggttagaaccaagtacagaggaaatgggttggtattgtagcaagagttcaggggtgggtctaggctttgaaactagagcactaggaaagtgtggccctcatggaggcaggcagggaagggaatgggatgtctttcacaggcagctgttgggctgacatttttgttttgtcctgtttggtgcatttcagatacttcacagctcacctgctgctctcactgggacccctcttcatctcatgacaaagcagtgggtctttcccccatgtggtttgggctttttggtggtatcagcaacctcaggtctaagccctgtcccctccttcccctctgtgatctcaccctgcatggtgctgaaaccaaccagggaggaaatgcagaaacagtggggattctgaagacaccacctttaaaacgatggggatttcccaagggagtggaagcaacctcttgctatttggggaagagcagggtcccaggcccctctctgtatccttgccccctcctgcagcgtcatctgagccagggcagggttaggctctgtgctttggttgctaaggatgtgtaaccagagcagagacctctaggggtggtgcccacctggctggtggaacagttagaagaggagctgaaaagaaacagttacagctgtaggggcgggaaggtgtgatccctttccttacccgtcgtaagagtcatggccaacacttataacaaaagaaaggctaacaaaagaagagcgtaacaaatttatttaatcaaagttgtaagtgacatgagaaccttcagagaagaagaaccaaagacccagggaaactgcctatttttatacttaggtttgatgaagaatagacagccatgaagaaatgggactggacaaaggggtgtaggctgagagggaacccagcaaggcctgtctgttcagattctttgtggcctctctgtgtagcattccttcctcctagatatggggcaggacttccctggcatgagggtcttcaagggagaagggacaggagagagtaacctttctcggctttgctttgggagagaggaattctagtttctgtgacccgccttggggaagagaagttctggattctgtgacttctggggagagagggtgagagacaggagggcaagagaaattcacagagcttgcttctgaggccttccaatctcctttagttcaaagtacccagcacgccaaagccccttacatttgggtattgtgttctgagccccagcacagccaagaacttgtagaattgacttgggggtctggggagagtcccaagaagccaacaggggcccctcctcatcttgtggctaacactagccacctgagtgcagtagacacccaccctcctgtgaccttcttttgggattttaggataagcagttcggacgtgcctttaaaacggagagaacacaccccaaggagtggttatggggattaaacgagactgtgtatgaagcacctagagtgtgcctagcgagtgcttgagaaagatatgacgattatttttaatcaaagcattaatagtgattgcttgagtattgtcctccagaggagcagccaccagttttggtgttgtggtaggagccagggactggcctcgtcagggctccgaaacctatgtctatctgtagcattcctaggcagcctaccccagcagcagccccttgggctgtgggcaggggtggcaggcagcactgttcctctccaggaaggagaccgacttcctggacgaattccctgggctccccagcactgctctctgaggccctcctctcctcggccaacggcagtaaggagaagccattgacccgtctagaaaaaccgcatgtctgcagtctttgagggtagactggaatctcttctcatatttgccttgctttggtggagcttcaagaattcccaggccttccaaggaaaccaattactaaagaagactgtgggccacgtgactccagtgtttactgcaaacgaaggagatggctcccctcccccaacacagttactctccctccatctgcactggccccctaaggcctggcttcctggctctgcgatgctttcctgccctagggcagaaggcctcacaggatttattcccaggcactcttgccatgaccttgagaaggtggcttgacctggacatctggatctcagggactgagggggtgggaaaggactgagcctccccctcccagacccaacaggaaggtgggctttggtgaccatttcctaggctgagagctccttagctccaggagagggctgcgctccctggttctcctgctctgtgggctgtgctagatgaaacccacaaattgctgctgtcccgggcggagtggcatgcctccacccaccagtgaagaatgaaggcagggcagttgcagggccctgcaggactctgagatccagatgtgtaccccagtgctcccctgctctgcccactggcaagagggggctgaggaggggcatagcaggcctcatgtggactctgtttccacctcctttcccccatatctctacttggcccagagatgcctgagtaagaggggcacctagtcattctgggcccagaaagaagaagctaggcatgttggcctgctcaaaggagcaggagcagccctggacagggacaggttagaaagcctggctgcttatccaagagaagaaaaggccctgaggggcaggagcaaccctttgaacaatgctggactgctgttgagaaggaaggcttgtgccatgtgacccattggtgagaaatcagggcctgtgcatggaagttccagggagggaggcaacaaatccagttgacattggtgaaagaacttgtcctggacaacagtcggtcgaatgaaggcaaactcgaaggcctcacagatgaatttgaagaactggaattcttaagtacaatcaacgtaggcctcacctcaatcgcaaacttaccaaagttaaacaaacttaagaagcttgaactaagcgataacagagtctcagggggcctggaagtattggcagaaaagtgtccgaacctcacgcatctaaatttaagtggcaacaaaattaaagacctcagcacaatagagccactgaaaaagttagaaaacctcaagagcttagaccttttcaattgcgaggtaaccaacctgaacgactaccgagaaaatgtgttcaagctcctcccgcaactcacatatctcgacggctatgaccgggacgacaaggaggcccctgactcggatgctgagggctacgtggagggcctggatgatgaggaggaggatgaggatgaggaggagtatgatgaagatgctcaggtagtggaagacgaggaggacgaggatgaggaggaggaaggtgaagaggaggacgtgagtggagaggaggaggaggatgaagaaggttataacgatggagaggtagatgacgaggaagatgaagaagagcttggtgaagaagaaaggggtcagaagcgaaaacgagaacctgaagatgagggagaagatgatgactaagtggaataacctattttgaaaaattcctattgtgatttgactgtttttacccatatcccctctcccccccccctccaatcctgccccctgaaacttatttttttctgattgtaacgttgctgtgggaacgagaggggaagagtgtactgggggttgcggggggagggatggcgggtgggggtggaataaaatactatttttactgcca

SEQ ID NO: 24910 - protein, 51 aa, Homo sapiens; identical to SEQ ID NO: 24880

SEQ ID NO: 24911 - DNA, 1033 bp, Homo sapiens
gatcaggttagtgtgcgccgcgggtgctgggggctcgagaaccgagcggagctggttgagccttcaaagtcctaaaacgcgcggccgtgggttcggggtttattgattgaattccgccggcgcgggagcctctgcagagagagagcgcgagagatggagatgggcagacggattcatttagagctgcggaacaggacgccctctgatgtgaaagaacttgtcctggacaacagtcggtcgaatgaaggcaaactcgaaggcctcacagatgaatttgaagaactggaattcttaagtacaatcaacgtaggcctcacctcaatcgcaaacttaccaaagttaaacaaacttaagaagcttgaactaagcgataacagagtctcagggggcctggaagtattggcagaaaagtgtccgaacctcacgcatctaaatttaagtggcaacaaaattaaagacctcagcacaatagagccactgaaaaagttagaaaacctcaagagcttagaccttttcaattgcgaggtaaccaacctgaacgactaccgagaaaatgtgttcaagctcctcccgcaactcacatatctcgacggctatgaccgggacgacaaggaggcccctgactcggatgctgagggctacgtggagggcctggatgatgaggaggaggatgaggatgaggaggagtatgatgaagatgctcaggtagtggaagacgaggaggacgaggatgaggaggaggaaggtgaagaggaggacgtgaaagaagaaaggggtcagaagcgaaaacgagaacctgaagatgagggagaagatgatgactaagtggaataacctattttgaaaaattcctattgtgatttgactgtttttacccatatcccctctcccccccccctccaatcctgccccctgaaacttatttttttctgattgtaacgttgctgtgggaacgagaggggaagagtgtactgggggttgcggggggagggatggcgggtgggggtggaataaaatactatttttactgcca

SEQ ID NO: 24912 - protein, 223 aa, Homo sapiens; identical to SEQ ID NO: 24888

SEQ ID NO: 24913 - DNA, 737 bp, Homo sapiens
gatcaggttagtgtgcgccgcgggtgctgggggctcgagaaccgagcggagctggttgagccttcaaagtcctaaaacgcgcggccgtgggttcggggtttattgattgaattccgccggcgcgggagcctctgcagagagagagcgcgagagatggagatgggcagacggattcatttagagctgcggaacaggacgccctctgatgtgaaagaacttgtcctggacaacagtcggtcgaatgaaggcaaactcgaaggcctcacagatgaatttgaagaactggaattcttaagtacaatcaacgtaggcctcacctcaatcgcaaacttaccaaagttaaacaaacttaagaagcttgaactaagcgataacagagtctcagggggcctggaagtattggcagaaaagtgtccgaacctcacgcatctaaatttaagtggcaacaaaattaaagacctcagcacaatagagccactgaaaaagttagaaaacctcaagagcttagaccttttcaattgcgaggtaaccaacctgaacgactaccgagaaaatgtgttcaagctcctcccgcaactcacatatctcgacggctatgaccgggacgacaaggaggcccctgactcggatgctgagggctacgtggagggcctggatgatgaggaggaggatgaggatgaggaggagtatgatgaagataaggttataacgatggagaggtagatgacgaggaagat

SEQ ID NO: 24914 - protein, 189 aa, Homo sapiens
MEMGRRIHLELRNRTPSDVKELVLDNSRSNEGKLEGLTDEFEELEFLSTINVGLTSIANLPKLNKLKKLELSDNRVSGGLEVLAEKCPNLTHLNLSGNKIKDLSTIEPLKKLENLKSLDLFNCEVTNLNDYRENVFKLLPQLTYLDGYDRDDKEAPDSDAEGYVEGLDDEEEDEDEEEYDEDKVITMER

SEQ ID NO: 24915 - DNA, 707 bp, Homo sapiens
ttagtgtgcgccgcgggtgctgggggctcgagaaccgagcggagctggttgagccttcaaagtcctaaaacgcgcggccgtgggttcggggtttattgattgaattccgccggcgcgggagcctctgcagagagagagcgcgagagatggagatgggcagacggattcatttagagctgcggaacaggacgccctctgatgtgaaagaacttgtcctggacaacagtcggtcgaatgaaggcaaactcgaaggcctcacagatgaatttgaagaactggaattcttaagtacaatcaacgtaggcctcacctcaatcgcaaacttaccaaagttaaacaaacttaagaagcttgaactaagcgataacagagtctcagggggcctggaagtattggcagaaaagtgtccgaacctcacgcatctaaatttaagtggcaacaaaattaaagacctcagcacaatagagccactggtaagtcattcggaccctcccctccctgcaggggtaggaggtgggaggaattggcatcagcaaatactacttttgcatttgtccttttcccacttaatttttttgactctcatgatgtgctatgagatagaattgagctattgtttctgctgagtccatagagaaactgaggcccagagaagttaaataccttgaccaaggtcacagacagaatgggcagctattgtacgggta

SEQ ID NO: 24916 - protein, 159 aa, Homo sapiens
MEMGRRIHLELRNRTPSDVKELVLDNSRSNEGKLEGLTDEFEELEFLSTINVGLTSIANLPKLNKLKKLELSDNRVSGGLEVLAEKCPNLTHLNLSGNKIKDLSTIEPLVSHSDPPLPAGVGGGRNWHQQILLLHLSFSHLIFLTLMMCYEIELSYCFC

SEQ ID NO: 24917 - DNA, 860 bp, Homo sapiens
cagctggagaagatgggatgggctggtttaaaacagaagtcatgattgaccctcagtggagaggcctcacaaaggtaccaagggcatcctctcattcccccaaacaaaactacaagtattgagtataaagaaaccttaatattcatcttttaatggctttcaaacattaacaaataatgaaactaatttgtaggtccaagccagtcagttttctttttaatgaataaaagtgttttacatgtagtgagggaggagcatggtgtcggtttttcacaaaacacaggaatgcgtgtacataccagggagtggagtaaaatgtatttctcactactaggagcagaaagttcgaaagccactgatctaattcaacactcccattttagaatttcagaatggagaaaacagaggctcaaagaagccaaacaacttgtccaacttacttaatagcaaagccgagaagagcatccaagtctttaatagttctctggtaatttcctcaccaaaccagaatctccaaatgtaaatacctcttcccggagagcccagcccgggagggcgtttccccaacggatcgacaactcttccctcccggggaacaggctgctgtccttggcttcagtcagggccactagagtcgcgtgcgcgacacccctcacccccgccaaaagaacctcatgtttaatgttccccttactctatcacttccgccgaaagagcaaacaccagagcgatcggttagtccttaaggccacatttaactacgtctgagcgcctgcaggaggaacggcgaaaccccggagaggaggcgggggaggcagggagcgcgtgggggggggcatttgcacagaggatcgtcgtcc

SEQ ID NO: 24918 - protein, 74 aa, Homo sapiens [sequence omitted]

SEQ ID NO: 24919 - DNA, 1310 bp, Homo sapiens
gtgcggcgcgagccccgggaaacatggctgctcgtcctatttcggcgtcgcggcatggccaccagctcccggagcccagttgggagaggtgccgaaggcataactgtgacacctgatgaagagcaaaacttgaatcattatatacaagttttagagaacctagtacgaagtgttccctctggggagccaggtcgtgagaaaaaatctaactctccaaaacatgtttattctatagcatcaaagggatcaaaatttaaggagctagttacacatggagacgcttcaactgagaatgatgttttaaccaatcctatcagtgaagaaactacaactttccctacaggaggcttcacaccggaaataggaaagaaaaaacacacggaaagtaccccattctggtcgatcaaaccaaacaatgtttccattgttttgcatgcagaggaaccttatattgaaaatgaagagccagagccagagccggagccagctgcaaaacaaactgaggcaccaagaatgttgccagttgttactgaatcatctacaagtccatatgttacctcatacaagtcacctgtcaccactttagataagagcactggcattgggatctctacagaatcagaagatgttcctcagctctcaggtgaaactgcgatagaaaaacccgaagagtttggaaagcacccagagagttggaataatgatgacattttgaaaaaaattttagatattaattcacaagtgcaacaggcacttcttagtgacaccagcaacccagcatatagagaagatattgaagcctctaaagatcacctaaaacgaagccttgctctagcagcagcagcagaacataaattaaaaacaatgtataagtcccagttattgccagtaggacgaacaagtaataaaattgatgacatcgaaactgttattaacatgctgtgtaattctagatctaaactctatgaatatttagatattaaatgtgttccaccagagatgagagaaaaagctgctacagtattcaatacattaaaaaatatgtgtagatcaaggagagtcacagccttattaaaagtttattaaacaataatataaaaattttaaacctacttgatattccataacaaagctgatttaagcaaactgcattttttcacaggagaaataatcatattcgtaatttcaaaagttgtataaaaatattttctattgtagttcaaatgtgccaacatctttatgtgtcatgtgttatgaacaattttcatatgcactaaaaacctaatttaaaataaaattttggttcagga

SEQ ID NO: 24920 - protein, 343 aa, Homo sapiens
MATSSRSPVGRGAEGITVTPDEEQNLNHYIQVLENLVRSVPSGEPGREKKSNSPKHVYSIASKGSKFKELVTHGDASTENDVLTNPISEETTTFPTGGFTPEIGKKKHTESTPFWSIKPNNVSIVLHAEEPYIENEEPEPEPEPAAKQTEAPRMLPVVTESSTSPYVTSYKSPVTTLDKSTGIGISTESEDVPQLSGETAIEKPEEFGKHPESWNNDDILKKILDINSQVQQALLSDTSNPAYREDIEASKDHLKRSLALAAAAEHKLKTMYKSQLLPVGRTSNKIDDIETVINMLCNSRSKLYEYLDIKCVPPEMREKAATVFNTLKNMCRSRRVTALLKVY

SEQ ID NO: 24921 - DNA, 720 bp, Homo sapiens
attatttgaacattaaatgttgaatatatatttaatgacttaatgaatactttagacatagtgaactccagactttaaaaagtatctttgaaacatttaaataactttaatcttcaatgtcaagtaaataacagtagggtattggggaaacagattgctaagtaacttctttattctttccaaaatgagggaaacaaaactaaattccagtttccatgatcataacacagaagcttttctactataaacattgtattttaggctcctacccaggaattgtcttttattttaggtggctaaccaggaattgaattgtcttaaaagacaatgtgtaggagaaatagcaattacagatcttcctaactctgatctaattttgtgtacaagccatttttagtgaaggtacttgggcacagcttttattcctttagattttgtattcatcaaaaagcgagaaaaaatggggtgacaaaactcatctatttccctcttatttcacttttgaaggaaatcagagcacttgtacttccatgttctgtctttgacctaagaaatatttatttctatagtgttctattaggaaaatcaatattggccaggctggtctcaaactcctgacctcaggtgatccacctgccttggcctcccaaagtgctagaattagagacgtgagccaccacgcccggccatttttttgcattttttagtagagacggagtt

SEQ ID NO: 24922 - protein, 31 aa, Homo sapiens
MIITQKLFYYKHCILGSYPGIVFYFRWLTRN

SEQ ID NO: 24923 - DNA, 915 bp, Homo sapiens
aagtgtataaacctacagggatttgggttgggttttttttgtttgttttttttttccttttggtctttttttttttctccttttaaagaaaagctaaaggccgctgtgagtcctggtggcaggctctccatggatgtagcatatcgaagataatttttatactgcatttttatggattattttgtaatgtgtgattccgtctgctgaggaggtgggaggggctccagggaaagccacccaccttcagtgaggttgctccccagctgagcgcaccgggcatgggatgtggaggctggcgacacaccctgtgcctctccaaggctgggcgcgtggggcgtccagagtctctctgggtctcagatgtccatctgccacctcttgttaaggctctagccagaagggagggtgagggtagaagaaagttattcccgaagaaaaaaagaatgaaaagtcattgtactgaactgtttttatatttttaaaagttactatttaaaggttggtttgattgttgcgtcttaattgcctctccccccagtttgccagtcccgccccccgccccccgggaaaacagccaggccactgttgctgtcacattctggagcctgggccagggccatttcccatcgatgtgagctcttctcatctcacagcattccctgcgctgcttccacccccttctccccttccagatacccagcatcgcagcagggatttcacaatcccatactgtgtcgcctcccatccaagcgccagggagggtggggggtaggagctaagacttcctctggacagatgggcagggcagagttcactgaggtgaaggaagaccacaggttaacaccaaagtattgtacagctgtcaatgcaaaacttttttggaaaaaaattaaacgtaatgaacttgaagcgaaa

SEQ ID NO: 24924 - protein, 67 aa, Homo sapiens
MGCGGWRHTLCLSKAGRVGRPESLWVSDVHLPPLVKALARREGEGRRKLFPKKKRMKSHCTELFLYF

SEQ ID NO: 24925 - DNA, 2530 bp, Homo sapiens
agctacaacctgatcatgcctttgcctcccacctgcaggcaagtggttcgtgagcactgggaaagataaccttctcaacgcctggaggacgccttatggagccagcatattccagtctaaagaatcctcgtctgtcttgagttgtgacatttcagcggatgacaaatacattgtaacaggctctggtgacaagaaggccacagtttatgaggtcatctactaaacaagaactccagcagggctgtcaaactctgggagaaaccgactcggctctgacagggagacccccaggcgaggggccccgaggatggcggaggatgggccgcaggcagccgagcgttcagggctgcgctccggccggctgagagggcacgtgccccgtcacagtctggactcctgggcctggattgatgtgtctcacagactcggaagggttctgctcctcctcctccccctgaacaatgctggcagttgctacaaatagatttattggaggcttatggctccggttcccccacagacccgctcatgagtctctgtttgttcttcccttttcttttgccctgtccctcaccttgggtcgggggtgctggagtggaccacaatgttgtgctgggggatgggggggtctctctttgccgattgtgcagtgcacaagatttgtgaaaaatgtaaataacagactcctattgcggactgatcagtgggagaggaggccccttcccaccggaaactctgagtgtgtatttcgcctgctgtatttgtaatccactcgtggtggtggcttttttttttttttttttttaaataaacagatgctctcacctgggaagaggagacagggaggggaaccaattgaagaaagaggagaaaagtcttagagtgtggaaaaggcaaccaggttggccgtaaggtgcctgctggaatgcgtgtgcctccacacgggtctgggcatccggactgataaccagccggccagactgagggatggaaggcactgagatgggggcccgtccaggcggacacccgcagaaatggagctttctgtggtctcttgcactctggctgcctcttgccctctctgtgtctctctttcttggtctctccctctctcctcctcagcctggtctttctctttggtgcacacttagttattgttgtgagcaatggaagttcaaaggaactccctctccagctcttctgaatcttgggacacagcctaaaaaggacaaaaagttagaagacagcatagcaactcagctcagggagctaccagagaaaaatagcaactgatgtgggtgctttttttttttttttaatttgaataaaaagaattagaagtgatgtccttttataaaatgccttctcccccttcccgcctacagtctcttcctctccccttagaggggggaaagtgtataaacctacagggttgtgagtctgaaaagaggatccccctcacccccaccctgggcagagcagtgggggttggggggtgggagagggggacacagatcctggcacactgtggatatttcttgcagattgcagtctcttgtggcccaaacaggttaggtagactatcgcctctggcaggtgccaccttttggtaccaacatgttctgaggtgttaggatttgggttgggttttttttgtttgttttttttttccttttggtctttttttttttctccttttaaagaaaagctaaaggccgctgtgagtcctggtggcaggctctccatggatgtagcatatcgaagataatttttatactgcatttttatggattattttgtaatgtgtgattccgtctgctgaggaggtgggaggggctccagggaaagccacccaccttcagtgaggttgctccccagctgagcgcaccgggcatgggatgtggaggctggcgacacaccctgtgcctctccaaggctgggcgcgtggggcgtccagagtctctctgggtctcagatgtccatctgccacctcttgttaaggctctagccagaagggagggtgagggtagaagaaagttattcccgaagaaaaaaagaatgaaaagtcattgtactgaactgtttttatatttttaaaagttactatttaaaggttggtttgattgttgcgtcttaattgcctctccccccagtttgccagtcccgccccccgccccccgggaaaacagccaggccactgttgctgtcacattctggagcctgggccagggccatttcccatcgatgtgagctcttctcatctcacagcattccctgcgctgcttccacccccttctccccttccagatacccagcatcgcagcagggatttcacaatcccatactgtgtcgcctcccatccaagcgccagggagggtggggggtaggagctaagacttcctctggacagatgggcagggcagagttcactgaggtgaaggaagaccacaggttaacaccaaagtattgtacagctgtcaatgcaaaacttttttggaaaaaaattaaacgtaatgaacttgaagcgaaa

SEQ ID NO: 24926 - protein, 101 aa, Homo sapiens [sequence omitted]

SEQ ID NO: 24927 - DNA, 4473 bp, Homo sapiens
aatataacgttctgttgagatgagaggaacgctcgcccttgtcagctcttaaaccgctcttactatgagatgtcctatggcttgaacattgaaatgcacaagcagacagagattgcgaagagactgaacacaattttagcacagatcatgcctttcctgtcacaagagcaccagcagcaggtggcgcaggcagtggagcgcgccaagcaggtcaccatgacggagctgaacgccatcatcgggcagcagcagctccaggcgcagcacctctcccatgccacacacggccccccggtccagttgccaccccacccgtcaggtctccagcctccaggaatccccccagtgacagggagcagctccgggctgctggcactgggcgccctgggcagccaggcccatctgacggtgaaggatgagaagaaccaccatgaactcgatcacagagagagagaatccagtgcgaataactctgtgtcaccctcggaaagcctccgggccagtgagaagcaccggggctctgcggactacagcatggaagccaagaagcggaaggcggaggagaaggacagcttgagccgatacgacagtgatggagacaagagtgatgatctggtggtggatgtttccaatgaggaccccgcaacgccccgggtcagcccggcacactcccctcctgaaaatgggctggacaaggcccgtagcctgaaaaaagatgcccccaccagccctgcctcggtggcctcttccagtagcacaccttcctccaagaccaaagaccttggtcataacgacaaatcctccacccctgggctcaagtccaacacaccaaccccaaggaacgacgccccaactccaggcaccagcacgaccccagggctcaggtcgatgccgggtaaacctccgggcatggacccgatagcctcggctctgcgcacgcccatctccatcaccagctcctatgcggcgcccttcgccatgatgagccaccatgagatgaacggctccctcaccagtcctggcgcctacgccggcctccacaacatcccaccccagatgagcgccgccgccgctgctgcagccgctgcctatggccgatcgccaatggttggttttgaccctcaccccccgatgcgggccacaggcctcccctcaagcctggcctccattcctggaggaaaaccagcgtactcattccatgtgagtgctgatgggcagatgcagcccgtgcccttcccccacgacgccctggcaggccccggcatcccgaggcacgcccggcagatcaacacactcagccacggggaggtggtgtgtgccgtgaccatcagcaaccccacgaggcacgtctacacaggtggcaagggctgcgtgaagatctgggacatcagccagccaggcagcaagagccccatctcccagctggactgcctgaacagggacaattacatccgctcctgcaagctgctccctgatgggcgcacgctcatcgtgggcggcgaggccagcacgctcaccatctgggacctggcctcgcccacgccccgcatcaaggccgagctgacgtcctcggctcccgcctgttatgccctggccattagccctgacgccaaagtctgcttctcctgctgcagcgatgggaacattgctgtctgggacctgcacaaccagaccctggtcaggcagttccagggccacacagatggggccagctgcatagacatctcccatgatggcaccaaactgtggacagggggcctggacaacacggtgcgctcctgggacctgcgggagggccgacagctacagcagcatgacttcacttcccagatcttctcgctgggctactgccccactggggagtggctggctgtgggcatggagagcagcaacgtggaggtgctgcaccacaccaagcctgacaagtaccagctgcacctgcacgagagctgcgtgctctccctcaagttcgcctactgcggcaagtggttcgtgagcactgggaaagataaccttctcaacgcctggaggacgccttatggagccagcatattccagtctaaagaatcctcgtctgtcttgagttgtgacatttcagcggatgacaaatacattgtaacaggctctggtgacaagaaggccacagtttatgaggtcatctactaaacaagaactccagcagggctgtcaaactctgggagaaaccgactcggctctgacagggagacccccaggcgaggggccccgaggatggcggaggatgggccgcaggcagccgagcgttcagggctgcgctccggccggctgagagggcacgtgccccgtcacagtctggactcctgggcctggattgatgtgtctcacagactcggaagggttctgctcctcctcctccccctgaacaatgctggcagttgctacaaatagatttattggaggcttatggctccggttcccccacagacccgctcatgagtctctgtttgttcttcccttttcttttgccctgtccctcaccttgggtcgggggtgctggagtggaccacaatgttgtgctgggggatgggggggtctctctttgccgattgtgcagtgcacaagatttgtgaaaaatgtaaataacagactcctattgcggactgatcagtgggagaggaggccccttcccaccggaaactctgagtgtgtatttcgcctgctgtatttgtaatccactcgtggtggtggcttttttttttttttttttttaaataaacagatgctctcacctgggaagaggagacagggaggggaaccaattgaagaaagaggagaaaagtcttagagtgtggaaaaggcaaccaggttggccgtaaggtgcctgctggaatgcgtgtgcctccacacgggtctgggcatccggactgataaccagccggccagactgagggatggaaggcactgagatgggggcccgtccaggcggacacccgcagaaatggagctttctgtggtctcttgcactctggctgcctcttgccctctctgtgtctctctttcttggtctctccctctctcctcctcagcctggtctttctctttggtgcacacttagttattgttgtgagcaatggaagttcaaaggaactccctctccagctcttctgaatcttgggacacagcctaaaaaggacaaaaagttagaagacagcatagcaactcagctcagggagctaccagagaaaaatagcaactgatgtgggtgctttttttttttttttaatttgaataaaaagaattagaagtgatgtccttttataaaatgccttctcccccttcccgcctacagtctcttcctctccccttagaggggggaaagtgtataaacctacagggttgtgagtctgaaaagaggatccccctcacccccaccctgggcagagcagtgggggttggggggtgggagagggggacacagatcctggcacactgtggatatttcttgcagattgcagtctcttgtggcccaaacaggttaggtagactatcgcctctggcaggtgccaccttttggtaccaacatgttctgaggtgttaggatttgggttgggttttttttgtttgttttttttttccttttggtctttttttttttctccttttaaagaaaagctaaaggccgctgtgagtcctggtggcaggctctccatggatgtagcatatcgaagataatttttatactgcatttttatggattattttgtaatgtgtgattccgtctgctgaggaggtgggaggggctccagggaaagccacccaccttcagtgaggttgctccccagctgagcgcaccgggcatgggatgtggaggctggcgacacaccctgtgcctctccaaggctgggcgcgtggggcgtccagagtctctctgggtctcagatgtccatctgccacctcttgttaaggctctagccagaagggagggtgagggtagaagaaagttattcccgaagaaaaaaagaatgaaaagtcattgtactgaactgtttttatatttttaaaagttactatttaaaggttggtttgattgttgcgtcttaattgcctctccccccagtttgccagtcccgccccccgccccccgggaaaacagccaggccactgttgctgtcacattctggagcctgggccagggccatttcccatcgatgtgagctcttctcatctcacagcattccctgcgctgcttccacccccttctccccttccagatacccagcatcgcagcagggatttcacaatcccatactgtgtcgcctcccatccaagcgccagggagggtggggggtaggagctaagacttcctctggacagatgggcagggcagagttcactgaggtgaaggaagaccacaggttaacaccaaagtattgtacagctgtcaatgcaaaacttttttggaaaaaaattaaacgtaatgaacttgaagcgaaa

SEQ ID NO: 24928 - protein, 698 aa, Homo sapiens [sequence omitted]

SEQ ID NO: 24929 - DNA, 5808 bp, Homo sapiens
aggccgagtcccgcagccccacgtgggggccccgcgctcccattggccagcgccggacgaagctgccacattattttgttacttttcagtccctatttggaactgctctcgcggcagttcagacctcgtgctcgtccccttcgcctgtctgtgtgtggtatccgtaggtccggggcacttttttttttggtgtgtgtgtgtgtgcgtgcgcgcgtgtgtgtgtgttgggtgtgtgtgttttgggggtttgccggggcgcggagaggagagccgggccgaggggaaggaaggaagccgtagagctccccggtctcgggctgcgtctcccctccagcgctctcctgcctgtgcgctccgacgcggcagcggcggtggcgctgagcgctcctcggtggggacgcggtgctcaagctgggagcagcgagaaccctttgcggaggcttcccgtgcccgctggacttaggatgccagggcgtttgatttgcacctactgagcccggagttcctccccggccctgggaagggcttgcagcggcggcggcggcggcggcagcggcagtagcagacggaacagcaggctctcctctccgagggggggcgtcgaagcgcccgcgccgggctcccgccctcaccctccggcgctcctgcggccccaagccaccacctcgtagcccgcctccttcctcttctcgccgcgagccccaggcccggacgcctctaggatcggacccgcgcgccccggatgcttggggctgccccggcgcgcccccctacaggcgcgacccgctgagtgacccggagggggcccgagctcgccccaggaggggcccccggcctcgggaccccgcgccggacctgctggggagccgacgatgtccgcgcagtcccaggcattgacgcgctcgacgcagcccagggaaggcggccggccgctgcccgccgagccctaggcgcacaaagcccgcgcccgccgcccggccccggcgcccgccgacgactttgccgcctgctccgcggctctttgtctccacttggggcgggcgcccgactctgggatttcgctgcgagaacgagctgggggggccgggggcgagctctcggtttcccggccgccccccgctcgggctcggctcccccctcccccgcacctccccggcccgggctctcggcgcttccacgctctcggaatcacgacccctccctgccatgtatccgcagggcagacatccggctccccatcaacccgggcagccgggatttaaattcacggtggctgagtcttgtgacaggatcaaagacgaattccagttcctgcaagctcagtatcacagcctcaaagtggagtacgacaagctggcaaacgagaagacggagatgcagcgccattatgtgatgtactatgagatgtcctatggcttgaacattgaaatgcacaagcagacagagattgcgaagagactgaacacaattttagcacagatcatgcctttcctgtcacaagagcaccagcagcaggtggcgcaggcagtggagcgcgccaagcaggtcaccatgacggagctgaacgccatcatcgggcagcagcagctccaggcgcagcacctctcccatgccacacacggccccccggtccagttgccaccccacccgtcaggtctccagcctccaggaatccccccagtgacagggagcagctccgggctgctggcactgggcgccctgggcagccaggcccatctgacggtgaaggatgagaagaaccaccatgaactcgatcacagagagagagaatccagtgcgaataactctgtgtcaccctcggaaagcctccgggccagtgagaagcaccggggctctgcggactacagcatggaagccaagaagcggaaggcggaggagaaggacagcttgagccgatacgacagtgatggagacaagagtgatgatctggtggtggatgtttccaatgaggaccccgcaacgccccgggtcagcccggcacactcccctcctgaaaatgggctggacaaggcccgtagcctgaaaaaagatgcccccaccagccctgcctcggtggcctcttccagtagcacaccttcctccaagaccaaagaccttggtcataacgacaaatcctccacccctgggctcaagtccaacacaccaaccccaaggaacgacgccccaactccaggcaccagcacgaccccagggctcaggtcgatgccgggtaaacctccgggcatggacccgatagcctcggctctgcgcacgcccatctccatcaccagctcctatgcggcgcccttcgccatgatgagccaccatgagatgaacggctccctcaccagtcctggcgcctacgccggcctccacaacatcccaccccagatgagcgccgccgccgctgctgcagccgctgcctatggccgatcgccaatggttggttttgaccctcaccccccgatgcgggccacaggcctcccctcaagcctggcctccattcctggaggaaaaccagcgtactcattccatgtgagtgctgatgggcagatgcagcccgtgcccttcccccacgacgccctggcaggccccggcatcccgaggcacgcccggcagatcaacacactcagccacggggaggtggtgtgtgccgtgaccatcagcaaccccacgaggcacgtctacacaggtggcaagggctgcgtgaagatctgggacatcagccagccaggcagcaagagccccatctcccagctggactgcctgaacagggacaattacatccgctcctgcaagctgctccctgatgggcgcacgctcatcgtgggcggcgaggccagcacgctcaccatctgggacctggcctcgcccacgccccgcatcaaggccgagctgacgtcctcggctcccgcctgttatgccctggccattagccctgacgccaaagtctgcttctcctgctgcagcgatgggaacattgctgtctgggacctgcacaaccagaccctggtcaggcagttccagggccacacagatggggccagctgcatagacatctcccatgatggcaccaaactgtggacagggggcctggacaacacggtgcgctcctgggacctgcgggagggccgacagctacagcagcatgacttcacttcccagatcttctcgctgggctactgccccactggggagtggctggctgtgggcatggagagcagcaacgtggaggtgctgcaccacaccaagcctgacaagtaccagctgcacctgcacgagagctgcgtgctctccctcaagttcgcctactgcggcaagtggttcgtgagcactgggaaagataaccttctcaacgcctggaggacgccttatggagccagcatattccagtctaaagaatcctcgtctgtcttgagttgtgacatttcagcggatgacaaatacattgtaacaggctctggtgacaagaaggccacagtttatgaggtcatctactaaacaagaactccagcagggctgtcaaactctgggagaaaccgactcggctctgacagggagacccccaggcgaggggccccgaggatggcggaggatgggccgcaggcagccgagcgttcagggctgcgctccggccggctgagagggcacgtgccccgtcacagtctggactcctgggcctggattgatgtgtctcacagactcggaagggttctgctcctcctcctccccctgaacaatgctggcagttgctacaaatagatttattggaggcttatggctccggttcccccacagacccgctcatgagtctctgtttgttcttcccttttcttttgccctgtccctcaccttgggtcgggggtgctggagtggaccacaatgttgtgctgggggatgggggggtctctctttgccgattgtgcagtgcacaagatttgtgaaaaatgtaaataacagactcctattgcggactgatcagtgggagaggaggccccttcccaccggaaactctgagtgtgtatttcgcctgctgtatttgtaatccactcgtggtggtggcttttttttttttttttttttaaataaacagatgctctcacctgggaagaggagacagggaggggaaccaattgaagaaagaggagaaaagtcttagagtgtggaaaaggcaaccaggttggccgtaaggtgcctgctggaatgcgtgtgcctccacacgggtctgggcatccggactgataaccagccggccagactgagggatggaaggcactgagatgggggcccgtccaggcggacacccgcagaaatggagctttctgtggtctcttgcactctggctgcctcttgccctctctgtgtctctctttcttggtctctccctctctcctcctcagcctggtctttctctttggtgcacacttagttattgttgtgagcaatggaagttcaaaggaactccctctccagctcttctgaatcttgggacacagcctaaaaaggacaaaaagttagaagacagcatagcaactcagctcagggagctaccagagaaaaatagcaactgatgtgggtgctttttttttttttttaatttgaataaaaagaattagaagtgatgtccttttataaaatgccttctcccccttcccgcctacagtctcttcctctccccttagaggggggaaagtgtataaacctacagggttgtgagtctgaaaagaggatccccctcacccccaccctgggcagagcagtgggggttggggggtgggagagggggacacagatcctggcacactgtggatatttcttgcagattgcagtctcttgtggcccaaacaggttaggtagactatcgcctctggcaggtgccaccttttggtaccaacatgttctgaggtgttaggatttgggttgggttttttttgtttgttttttttttccttttggtctttttttttttctccttttaaagaaaagctaaaggccgctgtgagtcctggtggcaggctctccatggatgtagcatatcgaagataatttttatactgcatttttatggattattttgtaatgtgtgattccgtctgctgaggaggtgggaggggctccagggaaagccacccaccttcagtgaggttgctccccagctgagcgcaccgggcatgggatgtggaggctggcgacacaccctgtgcctctccaaggctgggcgcgtggggcgtccagagtctctctgggtctcagatgtccatctgccacctcttgttaaggctctagccagaagggagggtgagggtagaagaaagttattcccgaagaaaaaaagaatgaaaagtcattgtactgaactgtttttatatttttaaaagttactatttaaaggttggtttgattgttgcgtcttaattgcctctccccccagtttgccagtcccgccccccgccccccgggaaaacagccaggccactgttgctgtcacattctggagcctgggccagggccatttcccatcgatgtgagctcttctcatctcacagcattccctgcgctgcttccacccccttctccccttccagatacccagcatcgcagcagggatttcacaatcccatactgtgtcgcctcccatccaagcgccagggagggtggggggtaggagctaagacttcctctggacagatgggcagggcagagttcactgaggtgaaggaagaccacaggttaacaccaaagtattgtacagctgtcaatgcaaaacttttttggaaaaaaattaaacgtaatgaacttgaagcgaaa

SEQ ID NO: 24930 - protein, 764 aa, Homo sapiens
MYPQGRHPAPHQPGQPGFKFTVAESCDRIKDEFQFLQAQYHSLKVEYDKLANEKTEMQRHYVMYYEMSYGLNIEMHKQTEIAKRLNTILAQIMPFLSQEHQQQVAQAVERAKQVTMTELNAIIGQQQLQAQHLSHATHGPPVQLPPHPSGLQPPGIPPVTGSSSGLLALGALGSQAHLTVKDEKNHHELDHRERESSANNSVSPSESLRASEKHRGSADYSMEAKKRKAEEKDSLSRYDSDGDKSDDLVVDVSNEDPATPRVSPAHSPPENGLDKARSLKKDAPTSPASVASSSSTPSSKTKDLGHNDKSSTPGLKSNTPTPRNDAPTPGTSTTPGLRSMPGKPPGMDPIASALRTPISITSSYAAPFAMMSHHEMNGSLTSPGAYAGLHNIPPQMSAAAAAAAAAYGRSPMVGFDPHPPMRATGLPSSLASIPGGKPAYSFHVSADGQMQPVPFPHDALAGPGIPRHARQINTLSHGEVVCAVTISNPTRHVYTGGKGCVKIWDISQPGSKSPISQLDCLNRDNYIRSCKLLPDGRTLIVGGEASTLTIWDLASPTPRIKAELTSSAPACYALAISPDAKVCFSCCSDGNIAVWDLHNQTLVRQFQGHTDGASCIDISHDGTKLWTGGLDNTVRSWDLREGRQLQQHDFTSQIFSLGYCPTGEWLAVGMESSNVEVLHHTKPDKYQLHLHESCVLSLKFAYCGKWFVSTGKDNLLNAWRTPYGASIFQSKESSSVLSCDISADDKYIVTGSGDKKATVYEVIY

SEQ ID NO: 24931 - DNA, 948 bp, Homo sapiens
tactaaacaagaactccagcagggctgtcaaactctgggagaaaccgactcggctctgacagggagacccccaggcgaggggccccgaggatggcggaggatgggccgcaggcagccgagcgttcagggctgcgctccggccggctgagagggcacgtgccccgtcacagtctggactcctgggcctggattgatgtgtctcacagactcggaagggttctgctcctcctcctccccctgaacaatgctggcagttgctacaaatagatttattggaggcttatggctccggttcccccacagacccgctcatgagtctctgtttgttcttcccttttcttttgccctgtccctcaccttgggtcgggggtgctggagtggaccacaatgttgtgctgggggatgggggggtctctctttgccgattgtgcagtgcacaagatttgtgaaaaatgtaaataacagactcctattgcggactgatcagtgggagaggaggccccttcccaccggaaactctgagtgtgtatttcgcctgctgtatttgtaatccactcgtggtggtggcttttttttttttttttttttaaataaacagatgctctcacctgggaagaggagacagggaggggaaccaattgaagaaagaggagaaaagtcttagagtgtggaaaaggcaaccaggttggccgtaaggtgcctgctggaatgcgtgtgcctccacacgggtctgggcatccggactgataaccagccggccagactgagggatggaaggcactgagatgggggcccgtccaggcggacacccgcagaaatggagctttctgtggtctcttggcagagttcactgaggtgaaggaagaccacaggttaacaccaaagtattgtacagctgtcaatgcaaaacttttttggaaaaaaattaaacgtaatgaacttgaagcg

SEQ ID NO: 24932 - protein, 101 aa, Homo sapiens
MLAVATNRFIGGLWLRFPHRPAHESLFVLPFSFALSLTLGRGCWSGPQCCAGGWGGLSLPIVQCTRFVKNVNNRLLLRTDQWERRPLPTGNSECVFRLLYL

SEQ ID NO: 24933 - DNA, 501 bp, Homo sapiens
aagtgtataaacctacagggatttgggttgggttttttttgtttgttttttttttccttttggtctttttttttttctccttttaaagaaaagctaaaggccgctgtgagtcctggtggcaggctctccatggatgtagcatatcgaagataatttttatactgcatttttatggattattttgtaatgtgtgattccgtctgctgaggaggtgggaggggctccagggaaagccacccaccttcagtgaggttgctccccagctgagcgcaccgggcatgggatgtggaggctggcgacacaccctgtgcctctccaaggctgggcgcgtggggcgtccagagtctctctgggtctcagatgtccatctgccacctcttgttaaggctctagccagaagggagggtgagggtagaagaaagttattcccgaagaaaaaaagaatgaaaagtcattgtactgaactgtttttatatttttaaaagttactatttaaaggtt

SEQ ID NO: 24934 - protein, 67 aa, Homo sapiens; identical to SEQ ID NO: 24924

SEQ ID NO: 24935 - DNA, 2116 bp, Homo sapiens
agctacaacctgatcatgcctttgcctcccacctgcaggcaagtggttcgtgagcactgggaaagataaccttctcaacgcctggaggacgccttatggagccagcatattccagtctaaagaatcctcgtctgtcttgagttgtgacatttcagcggatgacaaatacattgtaacaggctctggtgacaagaaggccacagtttatgaggtcatctactaaacaagaactccagcagggctgtcaaactctgggagaaaccgactcggctctgacagggagacccccaggcgaggggccccgaggatggcggaggatgggccgcaggcagccgagcgttcagggctgcgctccggccggctgagagggcacgtgccccgtcacagtctggactcctgggcctggattgatgtgtctcacagactcggaagggttctgctcctcctcctccccctgaacaatgctggcagttgctacaaatagatttattggaggcttatggctccggttcccccacagacccgctcatgagtctctgtttgttcttcccttttcttttgccctgtccctcaccttgggtcgggggtgctggagtggaccacaatgttgtgctgggggatgggggggtctctctttgccgattgtgcagtgcacaagatttgtgaaaaatgtaaataacagactcctattgcggactgatcagtgggagaggaggccccttcccaccggaaactctgagtgtgtatttcgcctgctgtatttgtaatccactcgtggtggtggcttttttttttttttttttttaaataaacagatgctctcacctgggaagaggagacagggaggggaaccaattgaagaaagaggagaaaagtcttagagtgtggaaaaggcaaccaggttggccgtaaggtgcctgctggaatgcgtgtgcctccacacgggtctgggcatccggactgataaccagccggccagactgagggatggaaggcactgagatgggggcccgtccaggcggacacccgcagaaatggagctttctgtggtctcttgcactctggctgcctcttgccctctctgtgtctctctttcttggtctctccctctctcctcctcagcctggtctttctctttggtgcacacttagttattgttgtgagcaatggaagttcaaaggaactccctctccagctcttctgaatcttgggacacagcctaaaaaggacaaaaagttagaagacagcatagcaactcagctcagggagctaccagagaaaaatagcaactgatgtgggtgctttttttttttttttaatttgaataaaaagaattagaagtgatgtccttttataaaatgccttctcccccttcccgcctacagtctcttcctctccccttagaggggggaaagtgtataaacctacagggttgtgagtctgaaaagaggatccccctcacccccaccctgggcagagcagtgggggttggggggtgggagagggggacacagatcctggcacactgtggatatttcttgcagattgcagtctcttgtggcccaaacaggttaggtagactatcgcctctggcaggtgccaccttttggtaccaacatgttctgaggtgttaggatttgggttgggttttttttgtttgttttttttttccttttggtctttttttttttctccttttaaagaaaagctaaaggccgctgtgagtcctggtggcaggctctccatggatgtagcatatcgaagataatttttatactgcatttttatggattattttgtaatgtgtgattccgtctgctgaggaggtgggaggggctccagggaaagccacccaccttcagtgaggttgctccccagctgagcgcaccgggcatgggatgtggaggctggcgacacaccctgtgcctctccaaggctgggcgcgtggggcgtccagagtctctctgggtctcagatgtccatctgccacctcttgttaaggctctagccagaagggagggtgagggtagaagaaagttattcccgaagaaaaaaagaatgaaaagtcattgtactgaactgtttttatatttttaaaagttactatttaaaggtt

SEQ ID NO: 24936 - protein, 101 aa, Homo sapiens [sequence omitted]

SEQ ID NO: 24937 - DNA, 4059 bp, Homo sapiens
aatataacgttctgttgagatgagaggaacgctcgcccttgtcagctcttaaaccgctcttactatgagatgtcctatggcttgaacattgaaatgcacaagcagacagagattgcgaagagactgaacacaattttagcacagatcatgcctttcctgtcacaagagcaccagcagcaggtggcgcaggcagtggagcgcgccaagcaggtcaccatgacggagctgaacgccatcatcgggcagcagcagctccaggcgcagcacctctcccatgccacacacggccccccggtccagttgccaccccacccgtcaggtctccagcctccaggaatccccccagtgacagggagcagctccgggctgctggcactgggcgccctgggcagccaggcccatctgacggtgaaggatgagaagaaccaccatgaactcgatcacagagagagagaatccagtgcgaataactctgtgtcaccctcggaaagcctccgggccagtgagaagcaccggggctctgcggactacagcatggaagccaagaagcggaaggcggaggagaaggacagcttgagccgatacgacagtgatggagacaagagtgatgatctggtggtggatgtttccaatgaggaccccgcaacgccccgggtcagcccggcacactcccctcctgaaaatgggctggacaaggcccgtagcctgaaaaaagatgcccccaccagccctgcctcggtggcctcttccagtagcacaccttcctccaagaccaaagaccttggtcataacgacaaatcctccacccctgggctcaagtccaacacaccaaccccaaggaacgacgccccaactccaggcaccagcacgaccccagggctcaggtcgatgccgggtaaacctccgggcatggacccgatagcctcggctctgcgcacgcccatctccatcaccagctcctatgcggcgcccttcgccatgatgagccaccatgagatgaacggctccctcaccagtcctggcgcctacgccggcctccacaacatcccaccccagatgagcgccgccgccgctgctgcagccgctgcctatggccgatcgccaatggttggttttgaccctcaccccccgatgcgggccacaggcctcccctcaagcctggcctccattcctggaggaaaaccagcgtactcattccatgtgagtgctgatgggcagatgcagcccgtgcccttcccccacgacgccctggcaggccccggcatcccgaggcacgcccggcagatcaacacactcagccacggggaggtggtgtgtgccgtgaccatcagcaaccccacgaggcacgtctacacaggtggcaagggctgcgtgaagatctgggacatcagccagccaggcagcaagagccccatctcccagctggactgcctgaacagggacaattacatccgctcctgcaagctgctccctgatgggcgcacgctcatcgtgggcggcgaggccagcacgctcaccatctgggacctggcctcgcccacgccccgcatcaaggccgagctgacgtcctcggctcccgcctgttatgccctggccattagccctgacgccaaagtctgcttctcctgctgcagcgatgggaacattgctgtctgggacctgcacaaccagaccctggtcaggcagttccagggccacacagatggggccagctgcatagacatctcccatgatggcaccaaactgtggacagggggcctggacaacacggtgcgctcctgggacctgcgggagggccgacagctacagcagcatgacttcacttcccagatcttctcgctgggctactgccccactggggagtggctggctgtgggcatggagagcagcaacgtggaggtgctgcaccacaccaagcctgacaagtaccagctgcacctgcacgagagctgcgtgctctccctcaagttcgcctactgcggcaagtggttcgtgagcactgggaaagataaccttctcaacgcctggaggacgccttatggagccagcatattccagtctaaagaatcctcgtctgtcttgagttgtgacatttcagcggatgacaaatacattgtaacaggctctggtgacaagaaggccacagtttatgaggtcatctactaaacaagaactccagcagggctgtcaaactctgggagaaaccgactcggctctgacagggagacccccaggcgaggggccccgaggatggcggaggatgggccgcaggcagccgagcgttcagggctgcgctccggccggctgagagggcacgtgccccgtcacagtctggactcctgggcctggattgatgtgtctcacagactcggaagggttctgctcctcctcctccccctgaacaatgctggcagttgctacaaatagatttattggaggcttatggctccggttcccccacagacccgctcatgagtctctgtttgttcttcccttttcttttgccctgtccctcaccttgggtcgggggtgctggagtggaccacaatgttgtgctgggggatgggggggtctctctttgccgattgtgcagtgcacaagatttgtgaaaaatgtaaataacagactcctattgcggactgatcagtgggagaggaggccccttcccaccggaaactctgagtgtgtatttcgcctgctgtatttgtaatccactcgtggtggtggcttttttttttttttttttttaaataaacagatgctctcacctgggaagaggagacagggaggggaaccaattgaagaaagaggagaaaagtcttagagtgtggaaaaggcaaccaggttggccgtaaggtgcctgctggaatgcgtgtgcctccacacgggtctgggcatccggactgataaccagccggccagactgagggatggaaggcactgagatgggggcccgtccaggcggacacccgcagaaatggagctttctgtggtctcttgcactctggctgcctcttgccctctctgtgtctctctttcttggtctctccctctctcctcctcagcctggtctttctctttggtgcacacttagttattgttgtgagcaatggaagttcaaaggaactccctctccagctcttctgaatcttgggacacagcctaaaaaggacaaaaagttagaagacagcatagcaactcagctcagggagctaccagagaaaaatagcaactgatgtgggtgctttttttttttttttaatttgaataaaaagaattagaagtgatgtccttttataaaatgccttctcccccttcccgcctacagtctcttcctctccccttagaggggggaaagtgtataaacctacagggttgtgagtctgaaaagaggatccccctcacccccaccctgggcagagcagtgggggttggggggtgggagagggggacacagatcctggcacactgtggatatttcttgcagattgcagtctcttgtggcccaaacaggttaggtagactatcgcctctggcaggtgccaccttttggtaccaacatgttctgaggtgttaggatttgggttgggttttttttgtttgttttttttttccttttggtctttttttttttctccttttaaagaaaagctaaaggccgctgtgagtcctggtggcaggctctccatggatgtagcatatcgaagataatttttatactgcatttttatggattattttgtaatgtgtgattccgtctgctgaggaggtgggaggggctccagggaaagccacccaccttcagtgaggttgctccccagctgagcgcaccgggcatgggatgtggaggctggcgacacaccctgtgcctctccaaggctgggcgcgtggggcgtccagagtctctctgggtctcagatgtccatctgccacctcttgttaaggctctagccagaagggagggtgagggtagaagaaagttattcccgaagaaaaaaagaatgaaaagtcattgtactgaactgtttttatatttttaaaagttactatttaaaggtt

SEQ ID NO: 24938 - protein, 698 aa, Homo sapiens [sequence omitted]

SEQ ID NO: 24939 - DNA, 5394 bp, Homo sapiens
aggccgagtcccgcagccccacgtgggggccccgcgctcccattggccagcgccggacgaagctgccacattattttgttacttttcagtccctatttggaactgctctcgcggcagttcagacctcgtgctcgtccccttcgcctgtctgtgtgtggtatccgtaggtccggggcacttttttttttggtgtgtgtgtgtgtgcgtgcgcgcgtgtgtgtgtgttgggtgtgtgtgttttgggggtttgccggggcgcggagaggagagccgggccgaggggaaggaaggaagccgtagagctccccggtctcgggctgcgtctcccctccagcgctctcctgcctgtgcgctccgacgcggcagcggcggtggcgctgagcgctcctcggtggggacgcggtgctcaagctgggagcagcgagaaccctttgcggaggcttcccgtgcccgctggacttaggatgccagggcgtttgatttgcacctactgagcccggagttcctccccggccctgggaagggcttgcagcggcggcggcggcggcggcagcggcagtagcagacggaacagcaggctctcctctccgagggggggcgtcgaagcgcccgcgccgggctcccgccctcaccctccggcgctcctgcggccccaagccaccacctcgtagcccgcctccttcctcttctcgccgcgagccccaggcccggacgcctctaggatcggacccgcgcgccccggatgcttggggctgccccggcgcgcccccctacaggcgcgacccgctgagtgacccggagggggcccgagctcgccccaggaggggcccccggcctcgggaccccgcgccggacctgctggggagccgacgatgtccgcgcagtcccaggcattgacgcgctcgacgcagcccagggaaggcggccggccgctgcccgccgagccctaggcgcacaaagcccgcgcccgccgcccggccccggcgcccgccgacgactttgccgcctgctccgcggctctttgtctccacttggggcgggcgcccgactctgggatttcgctgcgagaacgagctgggggggccgggggcgagctctcggtttcccggccgccccccgctcgggctcggctcccccctcccccgcacctccccggcccgggctctcggcgcttccacgctctcggaatcacgacccctccctgccatgtatccgcagggcagacatccggctccccatcaacccgggcagccgggatttaaattcacggtggctgagtcttgtgacaggatcaaagacgaattccagttcctgcaagctcagtatcacagcctcaaagtggagtacgacaagctggcaaacgagaagacggagatgcagcgccattatgtgatgtactatgagatgtcctatggcttgaacattgaaatgcacaagcagacagagattgcgaagagactgaacacaattttagcacagatcatgcctttcctgtcacaagagcaccagcagcaggtggcgcaggcagtggagcgcgccaagcaggtcaccatgacggagctgaacgccatcatcgggcagcagcagctccaggcgcagcacctctcccatgccacacacggccccccggtccagttgccaccccacccgtcaggtctccagcctccaggaatccccccagtgacagggagcagctccgggctgctggcactgggcgccctgggcagccaggcccatctgacggtgaaggatgagaagaaccaccatgaactcgatcacagagagagagaatccagtgcgaataactctgtgtcaccctcggaaagcctccgggccagtgagaagcaccggggctctgcggactacagcatggaagccaagaagcggaaggcggaggagaaggacagcttgagccgatacgacagtgatggagacaagagtgatgatctggtggtggatgtttccaatgaggaccccgcaacgccccgggtcagcccggcacactcccctcctgaaaatgggctggacaaggcccgtagcctgaaaaaagatgcccccaccagccctgcctcggtggcctcttccagtagcacaccttcctccaagaccaaagaccttggtcataacgacaaatcctccacccctgggctcaagtccaacacaccaaccccaaggaacgacgccccaactccaggcaccagcacgaccccagggctcaggtcgatgccgggtaaacctccgggcatggacccgatagcctcggctctgcgcacgcccatctccatcaccagctcctatgcggcgcccttcgccatgatgagccaccatgagatgaacggctccctcaccagtcctggcgcctacgccggcctccacaacatcccaccccagatgagcgccgccgccgctgctgcagccgctgcctatggccgatcgccaatggttggttttgaccctcaccccccgatgcgggccacaggcctcccctcaagcctggcctccattcctggaggaaaaccagcgtactcattccatgtgagtgctgatgggcagatgcagcccgtgcccttcccccacgacgccctggcaggccccggcatcccgaggcacgcccggcagatcaacacactcagccacggggaggtggtgtgtgccgtgaccatcagcaaccccacgaggcacgtctacacaggtggcaagggctgcgtgaagatctgggacatcagccagccaggcagcaagagccccatctcccagctggactgcctgaacagggacaattacatccgctcctgcaagctgctccctgatgggcgcacgctcatcgtgggcggcgaggccagcacgctcaccatctgggacctggcctcgcccacgccccgcatcaaggccgagctgacgtcctcggctcccgcctgttatgccctggccattagccctgacgccaaagtctgcttctcctgctgcagcgatgggaacattgctgtctgggacctgcacaaccagaccctggtcaggcagttccagggccacacagatggggccagctgcatagacatctcccatgatggcaccaaactgtggacagggggcctggacaacacggtgcgctcctgggacctgcgggagggccgacagctacagcagcatgacttcacttcccagatcttctcgctgggctactgccccactggggagtggctggctgtgggcatggagagcagcaacgtggaggtgctgcaccacaccaagcctgacaagtaccagctgcacctgcacgagagctgcgtgctctccctcaagttcgcctactgcggcaagtggttcgtgagcactgggaaagataaccttctcaacgcctggaggacgccttatggagccagcatattccagtctaaagaatcctcgtctgtcttgagttgtgacatttcagcggatgacaaatacattgtaacaggctctggtgacaagaaggccacagtttatgaggtcatctactaaacaagaactccagcagggctgtcaaactctgggagaaaccgactcggctctgacagggagacccccaggcgaggggccccgaggatggcggaggatgggccgcaggcagccgagcgttcagggctgcgctccggccggctgagagggcacgtgccccgtcacagtctggactcctgggcctggattgatgtgtctcacagactcggaagggttctgctcctcctcctccccctgaacaatgctggcagttgctacaaatagatttattggaggcttatggctccggttcccccacagacccgctcatgagtctctgtttgttcttcccttttcttttgccctgtccctcaccttgggtcgggggtgctggagtggaccacaatgttgtgctgggggatgggggggtctctctttgccgattgtgcagtgcacaagatttgtgaaaaatgtaaataacagactcctattgcggactgatcagtgggagaggaggccccttcccaccggaaactctgagtgtgtatttcgcctgctgtatttgtaatccactcgtggtggtggcttttttttttttttttttttaaataaacagatgctctcacctgggaagaggagacagggaggggaaccaattgaagaaagaggagaaaagtcttagagtgtggaaaaggcaaccaggttggccgtaaggtgcctgctggaatgcgtgtgcctccacacgggtctgggcatccggactgataaccagccggccagactgagggatggaaggcactgagatgggggcccgtccaggcggacacccgcagaaatggagctttctgtggtctcttgcactctggctgcctcttgccctctctgtgtctctctttcttggtctctccctctctcctcctcagcctggtctttctctttggtgcacacttagttattgttgtgagcaatggaagttcaaaggaactccctctccagctcttctgaatcttgggacacagcctaaaaaggacaaaaagttagaagacagcatagcaactcagctcagggagctaccagagaaaaatagcaactgatgtgggtgctttttttttttttttaatttgaataaaaagaattagaagtgatgtccttttataaaatgccttctcccccttcccgcctacagtctcttcctctccccttagaggggggaaagtgtataaacctacagggttgtgagtctgaaaagaggatccccctcacccccaccctgggcagagcagtgggggttggggggtgggagagggggacacagatcctggcacactgtggatatttcttgcagattgcagtctcttgtggcccaaacaggttaggtagactatcgcctctggcaggtgccaccttttggtaccaacatgttctgaggtgttaggatttgggttgggttttttttgtttgttttttttttccttttggtctttttttttttctccttttaaagaaaagctaaaggccgctgtgagtcctggtggcaggctctccatggatgtagcatatcgaagataatttttatactgcatttttatggattattttgtaatgtgtgattccgtctgctgaggaggtgggaggggctccagggaaagccacccaccttcagtgaggttgctccccagctgagcgcaccgggcatgggatgtggaggctggcgacacaccctgtgcctctccaaggctgggcgcgtggggcgtccagagtctctctgggtctcagatgtccatctgccacctcttgttaaggctctagccagaagggagggtgagggtagaagaaagttattcccgaagaaaaaaagaatgaaaagtcattgtactgaactgtttttatatttttaaaagttactatttaaaggtt

SEQ ID NO: 24940 - protein, 764 aa, Homo sapiens; identical to SEQ ID NO: 24930

SEQ ID NO: 24941 - DNA, 518 bp, Homo sapiens
agctacaacctgatcatgcctttgcctcccacctgcaggcaagtggttcgtgagcactgggaaagataaccttctcaacgcctggaggacgccttatggagccagcatattccagtctaaagaatcctcgtctgtcttgagttgtgacatttcagcggatgacaaatacattgtaacaggctctggtgacaagaaggccacagtttatgaggtcatctactaaacaagaactccagcagggctgtcaaactctgggagaaaccgactcggctctgacagggagacccccaggcgaggggccccgaggatggcggaggatgggccgcaggcagccgagcgttcagggctgcgctccggccggctgagagggcacgtgccccgtcacagtctggactcctgggcctggattgatgtgtctcacagactcggaagggttctgctcctcctcctccccctgaacaatgctggcagttgctacaaatagatttattggaggcttatggctccggttcccccac

SEQ ID NO: 24942 - protein, 58 aa, Homo sapiens [sequence omitted]

SEQ ID NO: 24943 - DNA, 2461 bp, Homo sapiens
aatataacgttctgttgagatgagaggaacgctcgcccttgtcagctcttaaaccgctcttactatgagatgtcctatggcttgaacattgaaatgcacaagcagacagagattgcgaagagactgaacacaattttagcacagatcatgcctttcctgtcacaagagcaccagcagcaggtggcgcaggcagtggagcgcgccaagcaggtcaccatgacggagctgaacgccatcatcgggcagcagcagctccaggcgcagcacctctcccatgccacacacggccccccggtccagttgccaccccacccgtcaggtctccagcctccaggaatccccccagtgacagggagcagctccgggctgctggcactgggcgccctgggcagccaggcccatctgacggtgaaggatgagaagaaccaccatgaactcgatcacagagagagagaatccagtgcgaataactctgtgtcaccctcggaaagcctccgggccagtgagaagcaccggggctctgcggactacagcatggaagccaagaagcggaaggcggaggagaaggacagcttgagccgatacgacagtgatggagacaagagtgatgatctggtggtggatgtttccaatgaggaccccgcaacgccccgggtcagcccggcacactcccctcctgaaaatgggctggacaaggcccgtagcctgaaaaaagatgcccccaccagccctgcctcggtggcctcttccagtagcacaccttcctccaagaccaaagaccttggtcataacgacaaatcctccacccctgggctcaagtccaacacaccaaccccaaggaacgacgccccaactccaggcaccagcacgaccccagggctcaggtcgatgccgggtaaacctccgggcatggacccgatagcctcggctctgcgcacgcccatctccatcaccagctcctatgcggcgcccttcgccatgatgagccaccatgagatgaacggctccctcaccagtcctggcgcctacgccggcctccacaacatcccaccccagatgagcgccgccgccgctgctgcagccgctgcctatggccgatcgccaatggttggttttgaccctcaccccccgatgcgggccacaggcctcccctcaagcctggcctccattcctggaggaaaaccagcgtactcattccatgtgagtgctgatgggcagatgcagcccgtgcccttcccccacgacgccctggcaggccccggcatcccgaggcacgcccggcagatcaacacactcagccacggggaggtggtgtgtgccgtgaccatcagcaaccccacgaggcacgtctacacaggtggcaagggctgcgtgaagatctgggacatcagccagccaggcagcaagagccccatctcccagctggactgcctgaacagggacaattacatccgctcctgcaagctgctccctgatgggcgcacgctcatcgtgggcggcgaggccagcacgctcaccatctgggacctggcctcgcccacgccccgcatcaaggccgagctgacgtcctcggctcccgcctgttatgccctggccattagccctgacgccaaagtctgcttctcctgctgcagcgatgggaacattgctgtctgggacctgcacaaccagaccctggtcaggcagttccagggccacacagatggggccagctgcatagacatctcccatgatggcaccaaactgtggacagggggcctggacaacacggtgcgctcctgggacctgcgggagggccgacagctacagcagcatgacttcacttcccagatcttctcgctgggctactgccccactggggagtggctggctgtgggcatggagagcagcaacgtggaggtgctgcaccacaccaagcctgacaagtaccagctgcacctgcacgagagctgcgtgctctccctcaagttcgcctactgcggcaagtggttcgtgagcactgggaaagataaccttctcaacgcctggaggacgccttatggagccagcatattccagtctaaagaatcctcgtctgtcttgagttgtgacatttcagcggatgacaaatacattgtaacaggctctggtgacaagaaggccacagtttatgaggtcatctactaaacaagaactccagcagggctgtcaaactctgggagaaaccgactcggctctgacagggagacccccaggcgaggggccccgaggatggcggaggatgggccgcaggcagccgagcgttcagggctgcgctccggccggctgagagggcacgtgccccgtcacagtctggactcctgggcctggattgatgtgtctcacagactcggaagggttctgctcctcctcctccccctgaacaatgctggcagttgctacaaatagatttattggaggcttatggctccggttcccccac

SEQ ID NO: 24944 - protein, 698 aa, Homo sapiens [sequence omitted]

SEQ ID NO: 24945 - DNA, 2979 bp, Homo sapiens
gtgtgtgtttgtgtgtgtgctctcacacaaagggggatgcggccggggggcgccgttgagagaggaggttaattccgcgcgagtggcgcggggggctgcttgtgttccagggggagctgttcacgcggtccccggccccgctctgaagtctcccaactcacccggcttgtctcccgcccccgccttactggggagagggaggcccttggtgaaaggcatgggagccccgctgccgacggggagagatggggcgccccccctccgccccgtcggagagctgagaaacttgctgggaaggttctgggctgagggtggcctcttttggttgggcgccgttggggaggggccggggccgctctgagcgcggtctcatgcccccgccccctcccctgtcttgtcttcgcgggctccaggctccccatcaacccgggcagccgggatttaaattcacggtggctgagtcttgtgacaggatcaaagacgaattccagttcctgcaagctcagtatcacagcctcaaagtggagtacgacaagctggcaaacgagaagacggagatgcagcgccattatgtgatgtactatgagatgtcctatggcttgaacattgaaatgcacaagcagacagagattgcgaagagactgaacacaattttagcacagatcatgcctttcctgtcacaagagcaccagcagcaggtggcgcaggcagtggagcgcgccaagcaggtcaccatgacggagctgaacgccatcatcgggcagcagcagctccaggcgcagcacctctcccatgccacacacggccccccggtccagttgccaccccacccgtcaggtctccagcctccaggaatccccccagtgacagggagcagctccgggctgctggcactgggcgccctgggcagccaggcccatctgacggtgaaggatgagaagaaccaccatgaactcgatcacagagagagagaatccagtgcgaataactctgtgtcaccctcggaaagcctccgggccagtgagaagcaccggggctctgcggactacagcatggaagccaagaagcggaaggcggaggagaaggacagcttgagccgatacgacagtgatggagacaagagtgatgatctggtggtggatgtttccaatgaggaccccgcaacgccccgggtcagcccggcacactcccctcctgaaaatgggctggacaaggcccgtagcctgaaaaaagatgcccccaccagccctgcctcggtggcctcttccagtagcacaccttcctccaagaccaaagaccttggtcataacgacaaatcctccacccctgggctcaagtccaacacaccaaccccaaggaacgacgccccaactccaggcaccagcacgaccccagggctcaggtcgatgccgggtaaacctccgggcatggacccgatagcctcggctctgcgcacgcccatctccatcaccagctcctatgcggcgcccttcgccatgatgagccaccatgagatgaacggctccctcaccagtcctggcgcctacgccggcctccacaacatcccaccccagatgagcgccgccgccgctgctgcagccgctgcctatggccgatcgccaatggttggttttgaccctcaccccccgatgcgggccacaggcctcccctcaagcctggcctccattcctggaggaaaaccagcgtactcattccatgtgagtgctgatgggcagatgcagcccgtgcccttcccccacgacgccctggcaggccccggcatcccgaggcacgcccggcagatcaacacactcagccacggggaggtggtgtgtgccgtgaccatcagcaaccccacgaggcacgtctacacaggtggcaagggctgcgtgaagatctgggacatcagccagccaggcagcaagagccccatctcccagctggactgcctgaacagggacaattacatccgctcctgcaagctgctccctgatgggcgcacgctcatcgtgggcggcgaggccagcacgctcaccatctgggacctggcctcgcccacgccccgcatcaaggccgagctgacgtcctcggctcccgcctgttatgccctggccattagccctgacgccaaagtctgcttctcctgctgcagcgatgggaacattgctgtctgggacctgcacaaccagaccctggtcaggcagttccagggccacacagatggggccagctgcatagacatctcccatgatggcaccaaactgtggacagggggcctggacaacacggtgcgctcctgggacctgcgggagggccgacagctacagcagcatgacttcacttcccagatcttctcgctgggctactgccccactggggagtggctggctgtgggcatggagagcagcaacgtggaggtgctgcaccacaccaagcctgacaagtaccagctgcacctgcacgagagctgcgtgctctccctcaagttcgcctactgcggcaagtggttcgtgagcactgggaaagataaccttctcaacgcctggaggacgccttatggagccagcatattccagtctaaagaatcctcgtctgtcttgagttgtgacatttcagcggatgacaaatacattgtaacaggctctggtgacaagaaggccacagtttatgaggtcatctactaaacaagaactccagcagggctgtcaaactctgggagaaaccgactcggctctgacagggagacccccaggcgaggggccccgaggatggcggaggatgggccgcaggcagccgagcgttcagggctgcgctccggccggctgagagggcacgtgccccgtcacagtctggactcctgggcctggattgatgtgtctcacagactcggaagggttctgctcctcctcctccccctgaacaatgctggcagttgctacaaatagatttattggaggcttatggctccggttcccccac

SEQ ID NO: 24946 - protein, 770 aa, Homo sapiens
MPPPPPLSCLRGLQAPHQPGQPGFKFTVAESCDRIKDEFQFLQAQYHSLKVEYDKLANEKTEMQRHYVMYYEMSYGLNIEMHKQTEIAKRLNTILAQIMPFLSQEHQQQVAQAVERAKQVTMTELNAIIGQQQLQAQHLSHATHGPPVQLPPHPSGLQPPGIPPVTGSSSGLLALGALGSQAHLTVKDEKNHHELDHRERESSANNSVSPSESLRASEKHRGSADYSMEAKKRKAEEKDSLSRYDSDGDKSDDLVVDVSNEDPATPRVSPAHSPPENGLDKARSLKKDAPTSPASVASSSSTPSSKTKDLGHNDKSSTPGLKSNTPTPRNDAPTPGTSTTPGLRSMPGKPPGMDPIASALRTPISITSSYAAPFAMMSHHEMNGSLTSPGAYAGLHNIPPQMSAAAAAAAAAYGRSPMVGFDPHPPMRATGLPSSLASIPGGKPAYSFHVSADGQMQPVPFPHDALAGPGIPRHARQINTLSHGEVVCAVTISNPTRHVYTGGKGCVKIWDISQPGSKSPISQLDCLNRDNYIRSCKLLPDGRTLIVGGEASTLTIWDLASPTPRIKAELTSSAPACYALAISPDAKVCFSCCSDGNIAVWDLHNQTLVRQFQGHTDGASCIDISHDGTKLWTGGLDNTVRSWDLREGRQLQQHDFTSQIFSLGYCPTGEWLAVGMESSNVEVLHHTKPDKYQLHLHESCVLSLKFAYCGKWFVSTGKDNLLNAWRTPYGASIFQSKESSSVLSCDISADDKYIVTGSGDKKATVYEVIY

SEQ ID NO: 24947 - DNA, 3796 bp, Homo sapiens
aggccgagtcccgcagccccacgtgggggccccgcgctcccattggccagcgccggacgaagctgccacattattttgttacttttcagtccctatttggaactgctctcgcggcagttcagacctcgtgctcgtccccttcgcctgtctgtgtgtggtatccgtaggtccggggcacttttttttttggtgtgtgtgtgtgtgcgtgcgcgcgtgtgtgtgtgttgggtgtgtgtgttttgggggtttgccggggcgcggagaggagagccgggccgaggggaaggaaggaagccgtagagctccccggtctcgggctgcgtctcccctccagcgctctcctgcctgtgcgctccgacgcggcagcggcggtggcgctgagcgctcctcggtggggacgcggtgctcaagctgggagcagcgagaaccctttgcggaggcttcccgtgcccgctggacttaggatgccagggcgtttgatttgcacctactgagcccggagttcctccccggccctgggaagggcttgcagcggcggcggcggcggcggcagcggcagtagcagacggaacagcaggctctcctctccgagggggggcgtcgaagcgcccgcgccgggctcccgccctcaccctccggcgctcctgcggccccaagccaccacctcgtagcccgcctccttcctcttctcgccgcgagccccaggcccggacgcctctaggatcggacccgcgcgccccggatgcttggggctgccccggcgcgcccccctacaggcgcgacccgctgagtgacccggagggggcccgagctcgccccaggaggggcccccggcctcgggaccccgcgccggacctgctggggagccgacgatgtccgcgcagtcccaggcattgacgcgctcgacgcagcccagggaaggcggccggccgctgcccgccgagccctaggcgcacaaagcccgcgcccgccgcccggccccggcgcccgccgacgactttgccgcctgctccgcggctctttgtctccacttggggcgggcgcccgactctgggatttcgctgcgagaacgagctgggggggccgggggcgagctctcggtttcccggccgccccccgctcgggctcggctcccccctcccccgcacctccccggcccgggctctcggcgcttccacgctctcggaatcacgacccctccctgccatgtatccgcagggcagacatccggctccccatcaacccgggcagccgggatttaaattcacggtggctgagtcttgtgacaggatcaaagacgaattccagttcctgcaagctcagtatcacagcctcaaagtggagtacgacaagctggcaaacgagaagacggagatgcagcgccattatgtgatgtactatgagatgtcctatggcttgaacattgaaatgcacaagcagacagagattgcgaagagactgaacacaattttagcacagatcatgcctttcctgtcacaagagcaccagcagcaggtggcgcaggcagtggagcgcgccaagcaggtcaccatgacggagctgaacgccatcatcgggcagcagcagctccaggcgcagcacctctcccatgccacacacggccccccggtccagttgccaccccacccgtcaggtctccagcctccaggaatccccccagtgacagggagcagctccgggctgctggcactgggcgccctgggcagccaggcccatctgacggtgaaggatgagaagaaccaccatgaactcgatcacagagagagagaatccagtgcgaataactctgtgtcaccctcggaaagcctccgggccagtgagaagcaccggggctctgcggactacagcatggaagccaagaagcggaaggcggaggagaaggacagcttgagccgatacgacagtgatggagacaagagtgatgatctggtggtggatgtttccaatgaggaccccgcaacgccccgggtcagcccggcacactcccctcctgaaaatgggctggacaaggcccgtagcctgaaaaaagatgcccccaccagccctgcctcggtggcctcttccagtagcacaccttcctccaagaccaaagaccttggtcataacgacaaatcctccacccctgggctcaagtccaacacaccaaccccaaggaacgacgccccaactccaggcaccagcacgaccccagggctcaggtcgatgccgggtaaacctccgggcatggacccgatagcctcggctctgcgcacgcccatctccatcaccagctcctatgcggcgcccttcgccatgatgagccaccatgagatgaacggctccctcaccagtcctggcgcctacgccggcctccacaacatcccaccccagatgagcgccgccgccgctgctgcagccgctgcctatggccgatcgccaatggttggttttgaccctcaccccccgatgcgggccacaggcctcccctcaagcctggcctccattcctggaggaaaaccagcgtactcattccatgtgagtgctgatgggcagatgcagcccgtgcccttcccccacgacgccctggcaggccccggcatcccgaggcacgcccggcagatcaacacactcagccacggggaggtggtgtgtgccgtgaccatcagcaaccccacgaggcacgtctacacaggtggcaagggctgcgtgaagatctgggacatcagccagccaggcagcaagagccccatctcccagctggactgcctgaacagggacaattacatccgctcctgcaagctgctccctgatgggcgcacgctcatcgtgggcggcgaggccagcacgctcaccatctgggacctggcctcgcccacgccccgcatcaaggccgagctgacgtcctcggctcccgcctgttatgccctggccattagccctgacgccaaagtctgcttctcctgctgcagcgatgggaacattgctgtctgggacctgcacaaccagaccctggtcaggcagttccagggccacacagatggggccagctgcatagacatctcccatgatggcaccaaactgtggacagggggcctggacaacacggtgcgctcctgggacctgcgggagggccgacagctacagcagcatgacttcacttcccagatcttctcgctgggctactgccccactggggagtggctggctgtgggcatggagagcagcaacgtggaggtgctgcaccacaccaagcctgacaagtaccagctgcacctgcacgagagctgcgtgctctccctcaagttcgcctactgcggcaagtggttcgtgagcactgggaaagataaccttctcaacgcctggaggacgccttatggagccagcatattccagtctaaagaatcctcgtctgtcttgagttgtgacatttcagcggatgacaaatacattgtaacaggctctggtgacaagaaggccacagtttatgaggtcatctactaaacaagaactccagcagggctgtcaaactctgggagaaaccgactcggctctgacagggagacccccaggcgaggggccccgaggatggcggaggatgggccgcaggcagccgagcgttcagggctgcgctccggccggctgagagggcacgtgccccgtcacagtctggactcctgggcctggattgatgtgtctcacagactcggaagggttctgctcctcctcctccccctgaacaatgctggcagttgctacaaatagatttattggaggcttatggctccggttcccccac

SEQ ID NO: 24948 - protein, 764 aa, Homo sapiens; identical to SEQ ID NO: 24930

SEQ ID NO: 24949 - DNA, 2009 bp, Homo sapiens
aggccgagtcccgcagccccacgtgggggccccgcgctcccattggccagcgccggacgaagctgccacattattttgttacttttcagtccctatttggaactgctctcgcggcagttcagacctcgtgctcgtccccttcgcctgtctgtgtgtggtatccgtaggtccggggcacttttttttttggtgtgtgtgtgtgtgcgtgcgcgcgtgtgtgtgtgttgggtgtgtgtgttttgggggtttgccggggcgcggagaggagagccgggccgaggggaaggaaggaagccgtagagctccccggtctcgggctgcgtctcccctccagcgctctcctgcctgtgcgctccgacgcggcagcggcggtggcgctgagcgctcctcggtggggacgcggtgctcaagctgggagcagcgagaaccctttgcggaggcttcccgtgcccgctggacttaggatgccagggcgtttgatttgcacctactgagcccggagttcctccccggccctgggaagggcttgcagcggcggcggcggcggcggcagcggcagtagcagacggaacagcaggctctcctctccgagggggggcgtcgaagcgcccgcgccgggctcccgccctcaccctccggcgctcctgcggccccaagccaccacctcgtagcccgcctccttcctcttctcgccgcgagccccaggcccggacgcctctaggatcggacccgcgcgccccggatgcttggggctgccccggcgcgcccccctacaggcgcgacccgctgagtgacccggagggggcccgagctcgccccaggaggggcccccggcctcgggaccccgcgccggacctgctggggagccgacgatgtccgcgcagtcccaggcattgacgcgctcgacgcagcccagggaaggcggccggccgctgcccgccgagccctaggcgcacaaagcccgcgcccgccgcccggccccggcgcccgccgacgactttgccgcctgctccgcggctctttgtctccacttggggcgggcgcccgactctgggatttcgctgcgagaacgagctgggggggccgggggcgagctctcggtttcccggccgccccccgctcgggctcggctcccccctcccccgcacctccccggcccgggctctcggcgcttccacgctctcggaatcacgacccctccctgccatgtatccgcagggcagacatccggctccccatcaacccgggcagccgggatttaaattcacggtggctgagtcttgtgacaggatcaaagacgaattccagttcctgcaagctcagtatcacagcctcaaagtggagtacgacaagctggcaaacgagaagacggagatgcagcgccattatgtgatgtactatgagatgtcctatggcttgaacattgaaatgcacaagcagacagagattgcgaagagactgaacacaattttagcacagatcatgcctttcctgtcacaagagcaccagcagcaggtggcgcaggcagtggagcgcgccaagcaggtcaccatgacggagctgaacgccatcatcgggcagcagcagctccaggcgcagcacctctcccatgccacacacggccccccggtccagttgccaccccacccgtcaggtctccagcctccaggaatccccccagtgacagggagcagctccgggctgctggcactgggcgccctgggcagccaggcccatctgacggtgaaggatgagaagaaccaccatgaactcgatcacagagagagagaatccagtgcgaataactctgtgtcaccctcggaaagcctccgggccagtgagaagcaccggggctctgcggactacagcatggaagccaagaagcggaaggcggaggagaaggacagcttgagccgatacgacagtgatggagacaagagtgatgatctggtggtggatgtttccaatgaggaccccgcaacgccccgggtcagcccggcacactcccc

SEQ ID NO: 24950 - protein, 266 aa, Homo sapiens
MYPQGRHPAPHQPGQPGFKFTVAESCDRIKDEFQFLQAQYHSLKVEYDKLANEKTEMQRHYVMYYEMSYGLNIEMHKQTEIAKRLNTILAQIMPFLSQEHQQQVAQAVERAKQVTMTELNAIIGQQQLQAQHLSHATHGPPVQLPPHPSGLQPPGIPPVTGSSSGLLALGALGSQAHLTVKDEKNHHELDHRERESSANNSVSPSESLRASEKHRGSADYSMEAKKRKAEEKDSLSRYDSDGDKSDDLVVDVSNEDPATPRVSPAH

SEQ ID NO: 24951 - DNA, 288 bp, Homo sapiens
agtccctatttggaactgctctcgcggcagttcagacctcgggaccccgcgccggacctgctggggagccgacgatgtccgcgcagtcccaggcattgacgcgctcgacgcagcccagggaaggcggccggccgctgcccgccgagccctaggcgcacaaagcccgcgcccgccgcccggccccggcgcccgccgacgactttgccgcctgctccgcggctctttgtctccacttggggcgggcgcccgactctgggatttcgctgcgagaacgagctgggggggccg

SEQ ID NO: 24952 - protein, 94 aa, Homo sapiens
VPIWNCSRGSSDLGTPRRTCWGADDVRAVPGIDALDAAQGRRPAAARRALGAQSPRPPPGPGARRRLCRLLRGSLSPLGAGARLWDFAARTSWG

SEQ ID NO: 24953 - DNA, 528 bp, Homo sapiens
atgggggacttcctggggccttatggattcatcggggcaaatgtgaatggaacgaagggcctagaggaagaggaagtgagagagcccggcgacggcgggaagctgcctccagagcccggcgacggcgggaagctgcctccagagcccggcgacggcgggaagctgcctccagagcccggcgacggcgggaagctgcctccagagcccggcgacggcgggaagctgcctccagagcccggcgacggcgggaagctgcctccagagcccggcgacggcgggaagctgcctccagagcccggcgacgaggggctcttccaacactcgcatgttgcctgccagggcctggcctctaaaaagtatagcctgtgggctgtattttcaagactcattcctctggatttgttggaagaagccctcggaattaatgacaactggggacaaaatgaaaagaagtacgattgtgttattttcaaccaaagagttggcacattcaaagagcacagacccaacccgcagatgagctggtga

SEQ ID NO: 24954 - protein, 175 aa, Homo sapiens [sequence omitted]

SEQ ID NO: 24955 - DNA, 1566 bp, Homo sapiens
cactagctcaggatgggctgacacagtatgtatgccggggaagcgagcacggctcctggaaggggactcgaaaatctgtcattctcgccaagaacaaggtgctaggcatctgtttttgggctccacttgccaggcctgaggaaggcggaaaaaatgttgggattccacctggcacctcgaggagccagcgctgaaccgaagccggaggcagaggcacctctggggagtgagtcgacgggcccccgaggcggcatgacactggccatggtgctgctggagatggccaacatgccacttgggcacaaaccttcacacaactttagagcttagaaagcttctcctccccatgtcagtgtgggaggactcggtagagagcctgagaatctggtccaaggtcaggctccagtcctcttgagctgtgagatgctgggcaagtcctcaacaccctggtcctcggttcgctcctttttgcaatggggagaatggggcctgccttgcctgctatgtgattgaatgagaaagtgtgtgcataaatattttaaggtattcagctctgcacaaatatattttgcagagctctgattttttgggagaggaaacagaatatcagagagagtcaatggctcatgtgagatcccagatcaggcctgggtctctcaaccccctgtcatgagctctttctagcaatgtattcctttggattcaacattgtgtctggaaaggcagggcactgtctaaatgtgcaatgtacaactctaggtggatgaggagggctgttcacgtggcccatgccgtggatgagacctaccagggtggtgcagagcacagcctgcacagctggacagagaggccctgctgaaggccgcagagcccgccaggttttctcctaacggacgtcgtattttcacaaggatcaaatgctgaagagatgaagttccaacggtggagattcaagagtggagagcagaagtggggctgcagagctacccagatcccaggaaaaactacacgtgagaaaaggggactgacagagcttgtagaaggccgaccaggtgtcagacccttgaatgtactctttacacagattgactctgattctcacaactgtcaaggtcatgcggttctcaaatgacccagagaggatcagaaagccagcttgtatgacgctgagccaggctaatttcacggtgccattccctcctcatcccatgcccatcatcaagcaaaggggccatccaggaaggtgactttgtcacctggtaaaggaaccagtgctttgctggatcacagcagaatcccttgctctcccctggagttgtcccagctgtggtgccagcattggttccagggacagggctttttatttaaatggcccgcataggctgccgtctccctccactctgtcggctctttgggagctggacaacacatctcttatttttgtctctctcaaaactcttagccgggtaattatttttggaattgaaatacttgcttaaaccctcaaataatgtaaggcagtatatgattgtgccaaacctacactaaatatagtacataagcatc

SEQ ID NO: 24956 - protein, 67 aa, Homo sapiens [sequence omitted]

SEQ ID NO: 24957 - DNA, 3205 bp, Homo sapiens
ggcaaccagttgggggtccactgccgcagtgtgggaggtttgttctttcgctctttgcaataaatcttgttactgctcaccctgggtccacactgcttttgtgagttgtaacactcactgggaaggtctgcagcttcactcctcaagcccgggagaccgcgagcccaccgggagaaacgaacaactctagacgcgccgccttaaaagcggtaacattcactgcgaaggtctgcagctttactcctgagccagcgagaccacgagcccaccagaaggaagaaaccccgaatacgtctgaacgtcagaaggaacaaactccagaagcgccacctcaagagctgtaacactcaccgcgagggtccgcggcttcagtcttgaagtcagtgagaccaagaacccaccaattcgggacacaatacctataatcccagtactttaggaggccagggcaggcggatcatctgagctcaggggttggagaggagcctgaacaacataccgaaaccccgtctctacaaaaaatacaaaaattaaccggttgtggtggccggtgccggtagttccagctagtgggggactgcggaggtgggagctgaagcgggaggatcgcttgagcctggaggttgaggctgcagtaaacagggattgcgtcaggacactccaacctggggaacagaacgatgccctaaaaggctggctgagctgactggagtccaatctcctgactctcaatcctccaccatgccggaatccacttgcatttctggcaagaaggttgtttacgctcaaggtctacagggatggaagtggcacccagtgagagggctctgccgatggagctgtgaaggcgtcgacctcattctgacgggcttgttgagactggtcagcgcctgggcaagagggcagctgggatatgtctatgccatgtttgacccatgctattgttttttcctccctttttactttctatctgtactcctctccttctcttccactccattcccctgcccacctccacactgaaaatcgaggccttgggaggagaggtcaagggaggaaagaattctggaaagaattcttccacactttataacaaggagcccaggcactagtattttcctcttgccatcggcggccagccataaaaagggttgatccatgagttgtttctccaactcttcgagcagctcagttcatggcactgctatagtttagactaacccgctcaacattgttagaaacatttagaaatgtctccccctttgccgcaatttccctctctctgccggtgtctgctctaacagctggaagaaatttctccttcatctgctatattcagcctttcactaagcgccatcaattttgcctttgaaatttcttttgtactggtctccttctctcctttccaccgctaatcccggggcctgtctctagccctgtgattctgaactgtttaagaacctcctgacagagctccctgcctctggcttctccacctttgatccattctgcacagccaagacagattcatttttctcaagctctgtttgcatcttaggaggcctcagctcaaaacccctaggctctctaatgtccttggcattgcccagacagctttcacagctccctctcactctaccttcttcccagatcgtggctgcttttgcctcctgtactgttgtaacaaatcaccacgaacttggtggcttaaaacaacggaaacttattctcttacagttctgtggccaaaaatccacactgagtcttataggcctagatcaaggtggcagcagggctgtgattccttgggaggctcccagggagaattctctttcctggcctcttccagcttctcagggctgcaggcatttcttggcttgtggccacatcactccagtctctgcctcagtggtcatattgccttttcttctccctgtagtgaaatcttcccctgcttccctcttataagatacttataattacattaggagcccatctggataatccagggtaatctccccatctcagaagccttaacttaatcacatctgaaaaatcccttttcccatgtaaagtagtagttataggctccatgaaagggatggggacatggatctttggggggaccgttattcagcctctcatcatggccagcttaatccttccacttccctactcgctactacaacaagtatcagttgagtatctactatgtgctaggcactgttttaggcaataggaatcataatgactaatgagccttttcggattcagtctcctgcagggtgaactatccctttcctgagctctttacctcttagagcttggtatcattacatagcatgatcatcacatactatgtatgtctgtgtgtttgacatgtggttcatagctggtgaacggtgctcttcgtttctataggcaggtaggatggacgtgcttcgtagggcctttctccgcaagccctgacatacacagcacagagatgggacagccccctactacatcctgccagatgttgctggcttattttaaaattagaaacgcctatacagtaccataaaccagtgatgccaactggtttatactccataagtttgtactcttggaagtgctagggttggttgcagcctaatatttaggaagagttttgaaaggcactgtgacttgtagcttcacacctgtcttcttaaaagcctggccctttcccgatttcaggttgacatgtgcctcctgcaggcactgacactgaggccttaccggtgactgtttccttattggtaagtgtgttgctttcctaggtggaaactctctgaggaaaaagatcacgttacacgcacacaagcacacacatacacatctttgtaactctctggccccccattggatctagcaaagataacttggatgctagatatttgcataccagccagtgttgtccagcactttcgttcaactctttgacaactatcgtcacattcctatactgcttgtgctatcatttgattaatgtttgtatttaatttgtctcaacttttagcttgtgtaaacttattttaaaaggaagcatttgcatctctaccataaatagaagaccagagtcatttatcataaataaagcataactgtaaaaataaagatactgaaaatgaaataatgttattcccctaagaattaaacaataaaatattgagtaataaaattg

SEQ ID NO: 24958 - protein, 125 aa, Homo sapiens
MSLALPRQLSQLPLTLPSSQIVAAFASCTVVTNHHELGGLKQRKLILLQFCGQKSTLSLIGLDQGGSRAVIPWEAPRENSLSWPLPASQGCRHFLACGHITPVSASVVILPFLLPVVKSSPASLL

SEQ ID NO: 24959 - DNA, 854 bp, Homo sapiens
gaggaagtgccgcgtcttggtgggtctggagctggctgacaatgcaggagacaaggtctcgccatgttgcctaggatgttctcgaactcctgaactcaagtaatccaccttggcctcccaaagtgctaggattacaggcatgagccaccacgcccggccaaattgtatgggtctctctgtgtctccagagccctgtctgtcgctgggagctccatctctcctgccccacccatcatgccagagactgcagcctcagacccccgggaggtgctggagccacagtgcagaggtggtgcccaactcagaggaccagggaccgggcgccgccttccagctcagtgaagcaagccctccccagagctcaggcctgcggttcagtggctgccctgaactttggcaagaagatctggagggggcccgcctgggcatcttctactaaatggcctcggcttccctctttccatccaggaatcagtcctgtagcttgggtgcctccttatttgttaattagtggcttttcatgttctcctttagccaaggctccctttttccaagtgatgtctttcagggaagcagtgtttgaaatagatagcgggtaccttccctggatggagtcagggcgggggcactgtcctccactgctagacacccccagaatgcctggcgctctgcagagcacagtctgagctgctctaagaaggggtctcctttaccctaaaggcagctgggcagggacaggtgggagaatgggtgtaggaggcaggccccaggctctgcttcttggtgacagttggccagagccctgtatgctttgatttttttgtacttaaaaagaaaaaacacacacacacaac

SEQ ID NO: 24960 - protein, 99 aa, Homo sapiens
MSHHARPNCMGLSVSPEPCLSLGAPSLLPHPSCQRLQPQTPGRCWSHSAEVVPNSEDQGPGAAFQLSEASPPQSSGLRFSGCPELWQEDLEGARLGIFY

SEQ ID NO: 24961 - DNA, 723 bp, Homo sapiens
cgcgtcttggtgggtctggagctggctgacaatgcaggggtctctctgtgtctccagagccctgtctgtcgctgggagctccatctctcctgccccacccatcatgccagagactgcagcctcagacccccgggaggtgctggagccacagtgcagaggtggtgcccaactcagaggaccagggaccgggcgccgccttccagctcagtgaagcaagccctccccagagctcaggcctgcggttcagtggctgccctgaactttggcaagaagatctggagggggcccgcctgggcatcttctactaaatggcctcggcttccctctttccatccaggaatcagtcctgtagcttgggtgcctccttatttgttaattagtggcttttcatgttctcctttagccaaggctccctttttccaagtgatgtctttcagggaagcagtgtttgaaatagatagcgggtaccttccctggatggagtcagggcgggggcactgtcctccactgctagacacccccagaatgcctggcgctctgcagagcacagtctgagctgctctaagaaggggtctcctttaccctaaaggcagctgggcagggacaggtgggagaatgggtgtaggaggcaggccccaggctctgcttcttggtgacagttggccagagccctgtatgctttgatttttttgtacttaaaaagaaaaaacacacacacacaac

SEQ ID NO: 24962 - protein, 59 aa, Homo sapiens
MQGSLCVSRALSVAGSSISPAPPIMPETAASDPREVLEPQCRGGAQLRGPGTGRRLPAQ

SEQ ID NO: 24963 - DNA, 1426 bp, Homo sapiens
atggcccagtcgcctcctccgcagagcctcctcggccacgaccactggatcttcgcccagggctggggctgggccggccactgggactccacgtccccggcctcctcctccgattcgtcgggttcgtgcccctgcgacggcgcccgcggactcccgcagccacagcctccgagctgcagctcccgagccgcagaggcagccgcgacgacgcccagacgagcgcgcaccggaccagcgggcggacagcggcagagcgccagcgagcgggagaaactgcgcatgcgcacgctggcccgcgccctgcacgagttgcgccgctttctgcctccctccttggcgccggccggccagagcctgaccaagatcgagacgctgcgcctggccatccgctacatcggccacctatcggccgtgctgggtctcagcgaggagagtctgcagtgccggcgcaggcagcgcggggacgcggggtccccttggggctgcccgctgtgccccgacccccaagccgcacccgagcgcctggggaggggggtccacgacacggatccctgggcaacacccccttactgccccaagatacagtcgcccccgtattcgtcccaagggacaacctccgacgcgtctctttggacgccaccccaaggctgtccctggacgcagtcgtccccagagccccggaacccaccagtgccctggacggcggccccagcaactttggagctggccgcagtgtaccagggtctctctgtgtctccagagccctgtctgtcgctgggagctccatctctcctgccccacccatcatgccagagactgcagcctcagacccccgggaggtgctggagccacagtgcagaggtggtgcccaactcagaggaccagggaccgggcgccgccttccagctcagtgaagcaagccctccccagagctcaggcctgcggttcagtggctgccctgaactttggcaagaagatctggagggggcccgcctgggcatcttctactaaatggcctcggcttccctctttccatccaggaatcagtcctgtagcttgggtgcctccttatttgttaattagtggcttttcatgttctcctttagccaaggctccctttttccaagtgatgtctttcagggaagcagtgtttgaaatagatagcgggtaccttccctggatggagtcagggcgggggcactgtcctccactgctagacacccccagaatgcctggcgctctgcagagcacagtctgagctgctctaagaaggggtctcctttaccctaaaggcagctgggcagggacaggtgggagaatgggtgtaggaggcaggccccaggctctgcttcttggtgacagttggccagagccctgtatgctttgatttttttgtacttaaaaagaaaaaacacacacacacaac

SEQ ID NO: 24964 - protein, 336 aa, Homo sapiens
MAQSPPPQSLLGHDHWIFAQGWGWAGHWDSTSPASSSDSSGSCPCDGARGLPQPQPPSCSSRAAEAAATTPRRARTGPAGGQRQSASEREKLRMRTLARALHELRRFLPPSLAPAGQSLTKIETLRLAIRYIGHLSAVLGLSEESLQCRRRQRGDAGSPWGCPLCPDPQAAPERLGRGVHDTDPWATPPYCPKIQSPPYSSQGTTSDASLWTPPQGCPWTQSSPEPRNPPVPWTAAPATLELAAVYQGLSVSPEPCLSLGAPSLLPHPSCQRLQPQTPGRCWSHSAEVVPNSEDQGPGAAFQLSEASPPQSSGLRFSGCPELWQEDLEGARLGIFY

SEQ ID NO: 24965 - DNA, 3600 bp, Homo sapiens
ccagcaggcaccccccgagcccagctccacacaccgttcctggatctcctctccccaggcggagcgtgcccctgcccagtccagtgaccttcgcctgttggagccctggttaatttttgcccagtctgcctgttgtggggctcctcccctttggggatataagcccggcctggggctgctccgttctctgcctggcctgaggctccctgagccgcctccccaccatcaccatggccaagggcttctatatttccaagtccctgggcatcctggggatcctcctgggcgtggcagccgtgtgcacaatcatcgcactgtcagtggtgtactcccaggagaagaacaagaacgccaacagctcccccgtggcctccaccaccccgtccgcctcagccaccaccaaccccgcctcggccaccaccttggaccaaagtaaagcgtggaatcgttaccgcctccccaacacgctgaaacccgattcctaccgggtgacgctgagaccgtacctcacccccaatgacaggggcctgtacgtttttaagggctccagcaccgtccgtttcacctgcaaggaggccactgacgtcatcatcatccacagcaagaagctcaactacaccctcagccaggggcacagggtggtcctgcgtggtgtgggaggctcccagccccccgacattgacaagactgagctggtggagcccaccgagtacctggtggtgcacctcaagggctccctggtgaaggacagccagtatgagatggacagcgagttcgagggggagttggcagatgacctggcgggcttctaccgcagcgagtacatggagggcaatgtcagaaaggtggtggccactacacagatgcaggctgcagatgcccggaagtccttcccatgcttcgatgagccggccatgaaggccgagttcaacatcacgcttatccaccccaaggacctgacagccctgtccaacatgcttcccaaaggtcccagcaccccacttccagaagaccccaactggaatgtcactgagttccacaccacgcccaagatgtccacgtacttgctggccttcattgtcagtgagttcgactacgtggagaagcaggcatccaatggtgtcttgatccggatctgggcccggcccagtgccattgcggcgggccacggcgattatgccctgaacgtgacgggccccatccttaacttctttgctggtcattatgacacaccctacccactcccaaaatcagaccagattggcctgccagacttcaacgccggcgccatggagaactggggactggtgacctaccgggagaactccctgctgttcgaccccctgtcctcctccagcagcaacaaggagcgggtggtcactgtgattgctcatgagctggcccaccagtggttcgggaacctggtgaccatagagtggtggaatgacctgtggctgaacgagggcttcgcctcctacgtggagtacctgggtgctgactatgcggagcccacctggaacttgaaagacctcatggtgctgaatgatgtgtaccgcgtgatggcagtggatgcactggcctcctcccacccgctgtccacacccgcctcggagatcaacacgccggcccagatcagtgagctgtttgacgccatctcctacagcaagggcgcctcagtcctcaggatgctctccagcttcctgtccgaggacgtattcaagcagggcctggcgtcctacctccacacctttgcctaccagaacaccatctacctgaacctgtgggaccacctgcaggaggctgtgaacaaccggtccatccaactccccaccaccgtgcgggacatcatgaaccgctggaccctgcagatgggcttcccggtcatcacggtggataccagcacggggaccctttcccaggagcacttcctccttgaccccgattccaatgttacccgcccctcagaattcaactacgtgtggattgtgcccatcacatccatcagagatggcagacagcagcaggactactggctgatagatgtaagagcccagaacgatctcttcagcacatcaggcaatgagtgggtcctgctgaacctcaatgtgacgggctattaccgggtgaactacgacgaagagaactggaggaagattcagactcagctgcagagagaccactcggccatccctgtcatcaatcgggcacagatcattaatgacgccttcaacctggccagtgcccataaggtccctgtcactctggcgctgaacaacaccctcttcctgattgaagagagacagtacatgccctgggaggccgccctgagcagcctgagctacttcaagctcatgtttgaccgctccgaggtctatggccccatgaagaactacctgaagaagcaggtcacacccctcttcattcacttcagaaataataccaacaactggagggagatcccagaaaacctgatggaccagtacagcgaggttaatgccatcagcaccgcctgctccaacggagttccagagtgtgaggagatggtctctggccttttcaagcagtggatggagaaccccaataataacccgatccaccccaacctgcggtccaccgtctactgcaacgctatcgcccagggcggggaggaggagtgggacttcgcctgggagcagttccgaaatgccacactggtcaatgaggctgacaagctccgggcagccctggcctgcagcaaagagttgtggatcctgaacaggtacctgagctacaccctgaacccggacttaatccggaagcaggacgccacctctaccatcatcagcattaccaacaacgtcattgggcaaggtctggtctgggactttgtccagagcaactggaagaagctttttaacgattatggtggtggctcgttctccttctccaacctcatccaggcagtgacacgacgattctccaccgagtatgagctgcagcagctggagcagttcaagaaggacaacgaggaaacaggcttcggctcaggcacccgggccctggagcaagccctggagaagacgaaagccaacatcaagtgggtgaaggagaacaaggaggtggtgctccagtggttcacagaaaacagcaaatagtccccagcccttgaagtcacccggcccccatgcaaggtgcccacatgtgtccatcccagcggctggtgcagggcctccattcctggagcccgaggcaccagtgtcctcccctcaaggacaaagtctccagcccacgttctctctgcctgtgagccagtctagttcctgatgacccaggctgcctgagcacctcccagcccctgcccctcatgccaaccccgccctaggcctggcatggcacctgtcgcccagtgccctggggctgatctcagggaagcccagctccagggccagatgagcagaagctctcgatggacaatgaacggccttgctgggggccgccctgtaccctctttcacctttccctaaagaccctaaatctgaggaatcaacagggcagcagatctgtatatttttttctaagagaaaatgtaaataaaggatttctagatgagtgagactcatt

SEQ ID NO: 24966 - protein, 967 aa, Homo sapiens
MAKGFYISKSLGILGILLGVAAVCTIIALSVVYSQEKNKNANSSPVASTTPSASATTNPASATTLDQSKAWNRYRLPNTLKPDSYRVTLRPYLTPNDRGLYVFKGSSTVRFTCKEATDVIIIHSKKLNYTLSQGHRVVLRGVGGSQPPDIDKTELVEPTEYLVVHLKGSLVKDSQYEMDSEFEGELADDLAGFYRSEYMEGNVRKVVATTQMQAADARKSFPCFDEPAMKAEFNITLIHPKDLTALSNMLPKGPSTPLPEDPNWNVTEFHTTPKMSTYLLAFIVSEFDYVEKQASNGVLIRIWARPSAIAAGHGDYALNVTGPILNFFAGHYDTPYPLPKSDQIGLPDFNAGAMENWGLVTYRENSLLFDPLSSSSSNKERVVTVIAHELAHQWFGNLVTIEWWNDLWLNEGFASYVEYLGADYAEPTWNLKDLMVLNDVYRVMAVDALASSHPLSTPASEINTPAQISELFDAISYSKGASVLRMLSSFLSEDVFKQGLASYLHTFAYQNTIYLNLWDHLQEAVNNRSIQLPTTVRDIMNRWTLQMGFPVITVDTSTGTLSQEHFLLDPDSNVTRPSEFNYVWIVPITSIRDGRQQQDYWLIDVRAQNDLFSTSGNEWVLLNLNVTGYYRVNYDEENWRKIQTQLQRDHSAIPVINRAQIINDAFNLASAHKVPVTLALNNTLFLIEERQYMPWEAALSSLSYFKLMFDRSEVYGPMKNYLKKQVTPLFIHFRNNTNNWREIPENLMDQYSEVNAISTACSNGVPECEEMVSGLFKQWMENPNNNPIHPNLRSTVYCNAIAQGGEEEWDFAWEQFRNATLVNEADKLRAALACSKELWILNRYLSYTLNPDLIRKQDATSTIISITNNVIGQGLVWDFVQSNWKKLFNDYGGGSFSFSNLIQAVTRRFSTEYELQQLEQFKKDNEETGFGSGTRALEQALEKTKANIKWVKENKEVVLQWFTENSK

SEQ ID NO: 24967 - DNA, 757 bp, Homo sapiens
tggattgatattataataaaatattacacctgaaggccagaatctccctgagccaggttttgcctgggattgtcattttgcaacctctgtgttcacaaggactttgcccgggagcaaggtggacgtcctgcctatccctggaacagggtgtggtcccatccatggggactctaaagtgggagtggaaagccagaggcctgagagagctcctcctcaaggctgttagggacccagccggactgagaatcttttgtttttctggcagctggagcagttcaagaaggacaacgaggaaacaggcttcggctcaggcacccgggccctggagcaagccctggagaagacgaaagccaacatcaagtgggtgaaggagaacaaggaggtggtgctccagtggttcacagaaaacagcaaatagtccccagcccttgaacccacgttctctctgcctgtgagccagtctagttcctgatgacccaggctgcctgagcacctcccagcccctgcccctcatgccaaccccgccctaggcctggcatggcacctgtcgcccagtgccctggggctgatctcagggaagcccagctccagggccagatgagcagaagctctcgatggacaatgaacggccttgctgggggccgccctgtaccctctttcacctttccctaaagaccctaaatctgaggaatcaacagggcagcagatctgtatatttttttctaagagaaaatgtaaataaaggatttctagatga

SEQ ID NO: 24968 - protein, 68 aa, Homo sapiens
MGTLKWEWKARGLRELLLKAVRDPAGLRIFCFSGSWSSSRRTTRKQASAQAPGPWSKPWRRRKPTSSG

SEQ ID NO: 24969 - DNA, 799 bp, Homo sapiens
tggattgatattataataaaatattacacctgaaggccagaatctccctgagccaggttttgcctgggattgtcattttgcaacctctgtgttcacaaggactttgcccgggagcaaggtggacgtcctgcctatccctggaacagggtgtggtcccatccatggggactctaaagtgggagtggaaagccagaggcctgagagagctcctcctcaaggctgttagggacccagccggactgagaatcttttgtttttctggcagctggagcagttcaagaaggacaacgaggaaacaggcttcggctcaggcacccgggccctggagcaagccctggagaagacgaaagccaacatcaagtgggtgaaggagaacaaggaggtggtgctccagtggttcacagaaaacagcaaatagtccccagcccttgaagtcacccggcccccatgcaaggtgcccacatgtgtccatcccagcgggttctctctgcctgtgagccagtctagttcctgatgacccaggctgcctgagcacctcccagcccctgcccctcatgccaaccccgccctaggcctggcatggcacctgtcgcccagtgccctggggctgatctcagggaagcccagctccagggccagatgagcagaagctctcgatggacaatgaacggccttgctgggggccgccctgtaccctctttcacctttccctaaagaccctaaatctgaggaatcaacagggcagcagatctgtatatttttttctaagagaaaatgtaaataaaggatttctagatga

SEQ ID NO: 24970 - protein, 68 aa, Homo sapiens; identical to SEQ ID NO: 24968

SEQ ID NO: 24971 - DNA, 584 bp, Homo sapiens
tggattgatattataataaaatattacacctgaaggccagaatctccctgagccaggttttgcctgggattgtcattttgcaacctctgtgttcacaaggactttgcccgggagcaaggtggacgtcctgcctatccctggaacagggtgtggtcccatccatggggactctaaagtgggagtggaaagccagaggcctgagagagctcctcctcaaggctgttagggacccagccggactgagaatcttttgtttttctggcagctggagcagttcaagaaggacaacgaggaaacaggcttcggctcaggcacccgggccctggagcaagccctggagaagacgaaagccaacatcaagtgggtgaaggagaacaaggaggtggtgctccagtggttcacagaaaacagcaaatagtccccaatgagcagaagctctcgatggacaatgaacggccttgctgggggccgccctgtaccctctttcacctttccctaaagaccctaaatctgaggaatcaacagggcagcagatctgtatatttttttctaagagaaaatgtaaataaaggatttctagatga

SEQ ID NO: 24972 - protein, 68 aa, Homo sapiens; identical to SEQ ID NO: 24968

SEQ ID NO: 24973 - DNA, 1327 bp, Homo sapiens
gggacggcggcggcgcagctcggaacccgccagggtccagggtccaggttccagcgcccggcggcccagatctcgctcctcggtctaaagcctccgccgcagctctcagtgaagaggaaggggaactctaggtgctcaacgcccgcgttacagtcgcgttctccctcgctcctacaacccggccaagatgccggggcatggatggggaccgaggtttgggggttgtggagcctattccacgccctccctgcaggcaccccccgagcccagctccacacaccgttcctggatctcctctccccaggcggagcgtgcccctgcccagtccagtgaccttcgcctgttggagccctggttaatttttgcccagtctgcctgttgtggggctcctcccctttggggatataagcccggcctggggctgctccgttctctgcctggcctgaggctccctgagccgcctccccaccatcaccatggccaagggcttctatatttccaagtccctgggcatcctggggatcctcctgggcgtggcagccgtgtgcacaatcatcgcactgtcagtggtgtactcccaggagaagaacaagaacgccaacagctcccccgtggcctccaccaccccgtccgcctcagccaccaccaaccccgcctcggccaccaccttggaccaaagtaaagcgtggaatcgttaccgcctccccaacacgctgaaacccgattcctaccgggtgacgctgagaccgtacctcacccccaatgacaggggcctgtacgtttttaagggctccagcaccgtccgtttcacctgcaaggaggccactgacgtcatcatcatccacagcaagaagctcaactacaccctcagccaggggcacagggtggtcctgcgtggtgtgggaggctcccagccccccgacattgacaagactgagctggtggagcccaccgagtacctggtggtgcacctcaagggctccctggtgaaggacagccagtatgagatggacagcgagttcgagggggagttggcagatgacctggcgggcttctaccgcagcgagtacatggagggcaatgtcagaaagtgagttccggctgggctgcccggtggggtggatccgaggtgctgaggcaaggctggattctgagggccaaggaaggacttagcttgcaggcctttgaaccctgtggagcccgagactggcccattgcttcacctccagctgctggcaaagcagctgcaaatgcaccgaactgggagggcttccccacccctcaccagggagctggggatgagggacagagcgtcccttggacagac

SEQ ID NO: 24974 - protein, 164 aa, Homo sapiens
MPGHGWGPRFGGCGAYSTPSLQAPPEPSSTHRSWISSPQAERAPAQSSDLRLLEPWLIFAQSACCGAPPLWGYKPGLGLLRSLPGLRLPEPPPHHHHGQGLLYFQVPGHPGDPPGRGSRVHNHRTVSGVLPGEEQERQQLPRGLHHPVRLSHHQPRLGHHLGPK

SEQ ID NO: 24975 - DNA, 1165 bp, Homo sapiens
ggagtccagtgctggaggggcagggacggcggcggcgcagctcggaacccgccagggtccagggtccaggttccagcgcccggcggcccaggcaccccccgagcccagctccacacaccgttcctggatctcctctccccaggcggagcgtgcccctgcccagtccagtgaccttcgcctgttggagccctggttaatttttgcccagtctgcctgttgtggggctcctcccctttggggatataagcccggcctggggctgctccgttctctgcctggcctgaggctccctgagccgcctccccaccatcaccatggccaagggcttctatatttccaagtccctgggcatcctggggatcctcctgggcgtggcagccgtgtgcacaatcatcgcactgtcagtggtgtactcccaggagaagaacaagaacgccaacagctcccccgtggcctccaccaccccgtccgcctcagccaccaccaaccccgcctcggccaccaccttggaccaaagtaaagcgtggaatcgttaccgcctccccaacacgctgaaacccgattcctaccgggtgacgctgagaccgtacctcacccccaatgacaggggcctgtacgtttttaagggctccagcaccgtccgtttcacctgcaaggaggccactgacgtcatcatcatccacagcaagaagctcaactacaccctcagccaggggcacagggtggtcctgcgtggtgtgggaggctcccagccccccgacattgacaagactgagctggtggagcccaccgagtacctggtggtgcacctcaagggctccctggtgaaggacagccagtatgagatggacagcgagttcgagggggagttggcagatgacctggcgggcttctaccgcagcgagtacatggagggcaatgtcagaaagtgagttccggctgggctgcccggtggggtggatccgaggtgctgaggcaaggctggattctgagggccaaggaaggacttagcttgcaggcctttgaaccctgtggagcccgagactggcccattgcttcacctccagctgctggcaaagcagctgcaaatgcaccgaactgggagggcttccccacccctcaccagggagctggggatgagggacagagcgtcccttggacagac

SEQ ID NO: 24976 - protein, 205 aa, Homo sapiens [sequence omitted]

SEQ ID NO: 24977 - DNA, 1203 bp, Homo sapiens
gagcgacagagcgagactctgtctcaaaaacaaataaaggaaaaagaaaaaaatgagaagcgcgtgttcccgactccggtgctttttcgcaaggtcgtgctactgcgccttctgaactacgagtcccaggcaccccccgagcccagctccacacaccgttcctggatctcctctccccaggcggagcgtgcccctgcccagtccagtgaccttcgcctgttggagccctggttaatttttgcccagtctgcctgttgtggggctcctcccctttggggatataagcccggcctggggctgctccgttctctgcctggcctgaggctccctgagccgcctccccaccatcaccatggccaagggcttctatatttccaagtccctgggcatcctggggatcctcctgggcgtggcagccgtgtgcacaatcatcgcactgtcagtggtgtactcccaggagaagaacaagaacgccaacagctcccccgtggcctccaccaccccgtccgcctcagccaccaccaaccccgcctcggccaccaccttggaccaaagtaaagcgtggaatcgttaccgcctccccaacacgctgaaacccgattcctaccgggtgacgctgagaccgtacctcacccccaatgacaggggcctgtacgtttttaagggctccagcaccgtccgtttcacctgcaaggaggccactgacgtcatcatcatccacagcaagaagctcaactacaccctcagccaggggcacagggtggtcctgcgtggtgtgggaggctcccagccccccgacattgacaagactgagctggtggagcccaccgagtacctggtggtgcacctcaagggctccctggtgaaggacagccagtatgagatggacagcgagttcgagggggagttggcagatgacctggcgggcttctaccgcagcgagtacatggagggcaatgtcagaaagtgagttccggctgggctgcccggtggggtggatccgaggtgctgaggcaaggctggattctgagggccaaggaaggacttagcttgcaggcctttgaaccctgtggagcccgagactggcccattgcttcacctccagctgctggcaaagcagctgcaaatgcaccgaactgggagggcttccccacccctcaccagggagctggggatgagggacagagcgtcccttggacagac

SEQ ID NO: 24978 - protein, 205 aa, Homo sapiens [sequence omitted]

SEQ ID NO: 24979 - DNA, 695 bp, Homo sapiens
gaactcccgacctgaggtgatccacctgcctcggcctcccaaagtgctgggattacagacgtgagccaccgcgtccagctatgatttattgtttttagaatggtagcatagtacttttttcatatagaagcccataatttatttaaccaatcctccattactgaacatctaattgtttctgattttcccctattttaaatcatgctgtattgagcattcctgacttctccaccccttctggattaggtcaaagcaaacctgagacatcaaatcatttcatccacaaatataagtttataatttttatttattttttttttgagaaagagagaatcgcttgaacccaggaggcggaggttgcagtgagccaagattgcgccattgcactccagcctgggcaacaagagcaaaattccatctcaaaaaaaaaattatattataaagcctgttaatcttctggtctttcgtcttcacttttaattttatttatattttgattagacacggtattcacatggttcaagattcaagagaacaaaaggatatgctgaaaaatgcgtttcccaccctgttctccagctccagtttccttcctgggaaacaactcgtgttatcagcgcgtgcacatataaaagcaaattgtgtgtctctgtgctttttccatttaagtacaattgataaacgacttgaacacg

SEQ ID NO: 24980 - protein, 59 aa, Homo sapiens
MVQDSREQKDMLKNAFPTLFSSSSFLPGKQLVLSARAHIKANCVSLCFFHLSTIDKRLE

SEQ ID NO: 24981 - DNA, 1743 bp, Homo sapiens
cacaataatttttcattaactacttgaggttgcctgcaaattcagctagctttccagcctgctatcagcaaagccataaacatcttttttaaaaataggttaaggttggccaggtgcggtggctcacgcctgtaatcccagcaatgttgggattacaggtgtgagccactggacctggccaaatactgggttttcagtgctcactgccactaataaaaatctgaaattctttcattatgcaatttctaagtgcctggtgagggccaagctcagttctaggctctgaagattaagagagaaacaaggctctgtctgctcctgttgtctctgtgagcatctttgacagagtgctcagattgttgggatatagtgcatcggactggcagcctgaatttgtggagaccgcagtcagtaactttgtgatatatggaatatttagaggacagtaacccatttccctacgccctacctgatcacatcgtgccctgctgggccataccccaaacagcccaccttcctctaggcctggccatggccctgtgcctgccacattgaggattaagtcaggatatcttgagccctctcaaatccctgtttattcaggcctctgccacatatagagccagccttctgtccccaccacttccactaccatggagcccacttagtaaaacgctctctgggcccagcttcgccagaaaagacaccaggggagcaaggctcaaaccaggggcagctaaatctgatcttgtggaccagtctctagtaagggctttcagcgtggctgtctgtccattgctttccaaataggatgcagcaatgattggtacatgggtattaagatcggtagtaggggctagtccaagtttagcaatagccaaactggagagcctctgaagtatgagagtcccagagggatttgtcagctcctggcagacatcctgattttcaccttcctgagtctaccctaccccagagggtgccagtctcactgtggtgatggttagcccagtgtgtgctgcactcacacaccagcacggggtccgtgcttgcaggctggtggatgctgtcctctgggttaagactgtctcccttctcgggagcactggagggttctccatctgcgtgtttcagtggaagttggcagatacgaaaacaggcccctatagggaagcagttccatgaaaatgattaattctttccaaaagacttaaaattttttcctatttcaattttcctttcaaaaaaggaaatacattcatgtagttcaaaacttaagaaaacaaaagtctgttcagcaaaagactcccactccggttccccaaacgctgagccccaccccccatccctggtagcaagaagtgtttccaattttaaggttaagaaacaaagtccctggatttgtgttagggatgtcttcctgagagtgggttgtgttccgtttgaccctggcggttgacctcggcccactaggatcatgccgccctctccagggaggagggcctccccatcaccctgtacagtggcaccccagccctggcactgcccgcccttgctcagcgtacctttcccatggcactctgacgtactggatgtttggtttctgaagttactggctgtttaccctgccgggatgtaagcccctccagggcaggggcttgtctcgtgttcagtgctgcatcccagctgctgggcacggtacctggtccatggcgttcaataaataactgttggatgagtgaa

SEQ ID NO: 24982 - protein, 61 aa, Homo sapiens
MVSPVCAALTHQHGVRACRLVDAVLWVKTVSLLGSTGGFSICVFQWKLADTKTGPYREAVP

SEQ ID NO: 24983 - DNA, 2528 bp, Homo sapiens
attctcccagggcttaggcgcccataaatgttctttctgtggtggagtagggcctcctgcttccatactgtcgcatgggctagatctcaggtgtggtgttgagccaccttaagatgagggctgcttcgcagtaaagtttccagcctgggcccctcttgggccttctggctggggaccctcagcctcctgatgctgttgcagggcaggtctgagagggtgcccagcagcacccggtgtcagggccaccttgttttccatttttgaacagcgctccctgtggtttgtgcccactgctcaatacagcctccgatcctcactcttgaaagctccatgataagcacagagatgggcagtgtgggtcagaaggtgggccgcttcctgtggaagagggaagtgtaggtgaatagatatcaaaacccctgatgtcattcttttgaggggttggattttcttttttctggcagacatttcagtacattcacatttctctcacatttgctgaatgtgagatcagaataaaggagatcggcgtttatttcgtaccttctgtaagttggcatgagcaagatcattcaactgtccttacaacaggcattcttatccccattttgcagatgacgaaagtagacccagctccagtaaccttcccttagattacacggggctgagatctgagactgttcacttgactccactgtccttttctttcctcgctgcttaagatggcttctcccaatgttatcatcttcttttttatagataaggaaactgagcctcagagagtctgacttctcacaaaccgtggtctaaataggcttgattttctaaggtggccagtgatcatgtcatagagtataagagccaaagagtcgtctgtgtccctccatttaactgatgttgaagccgaagcccaaggtggtaaatgttatgttgagggtcacaaatccagaccactggacctggccaaatactgggttttcagtgctcactgccactaataaaaatctgaaattctttcattatgcaatttctaagtgcctggtgagggccaagctcagttctaggctctgaagattaagagagaaacaaggctctgtctgctcctgttgtctctgtgagcatctttgacagagtgctcagattgttgggatatagtgcatcggactggcagcctgaatttgtggagaccgcagtcagtaactttgtgatatatggaatatttagaggacagtaacccatttccctacgccctacctgatcacatcgtgccctgctgggccataccccaaacagcccaccttcctctaggcctggccatggccctgtgcctgccacattgaggattaagtcaggatatcttgagccctctcaaatccctgtttattcaggcctctgccacatatagagccagccttctgtccccaccacttccactaccatggagcccacttagtaaaacgctctctgggcccagcttcgccagaaaagacaccaggggagcaaggctcaaaccaggggcagctaaatctgatcttgtggaccagtctctagtaagggctttcagcgtggctgtctgtccattgctttccaaataggatgcagcaatgattggtacatgggtattaagatcggtagtaggggctagtccaagtttagcaatagccaaactggagagcctctgaagtatgagagtcccagagggatttgtcagctcctggcagacatcctgattttcaccttcctgagtctaccctaccccagagggtgccagtctcactgtggtgatggttagcccagtgtgtgctgcactcacacaccagcacggggtccgtgcttgcaggctggtggatgctgtcctctgggttaagactgtctcccttctcgggagcactggagggttctccatctgcgtgtttcagtggaagttggcagatacgaaaacaggcccctatagggaagcagttccatgaaaatgattaattctttccaaaagacttaaaattttttcctatttcaattttcctttcaaaaaaggaaatacattcatgtagttcaaaacttaagaaaacaaaagtctgttcagcaaaagactcccactccggttccccaaacgctgagccccaccccccatccctggtagcaagaagtgtttccaattttaaggttaagaaacaaagtccctggatttgtgttagggatgtcttcctgagagtgggttgtgttccgtttgaccctggcggttgacctcggcccactaggatcatgccgccctctccagggaggagggcctccccatcaccctgtacagtggcaccccagccctggcactgcccgcccttgctcagcgtacctttcccatggcactctgacgtactggatgtttggtttctgaagttactggctgtttaccctgccgggatgtaagcccctccagggcaggggcttgtctcgtgttcagtgctgcatcccagctgctgggcacggtacctggtccatggcgttcaataaataactgttggatgagtgaa

SEQ ID NO: 24984 - protein, 58 aa, Homo sapiens [sequence omitted]

SEQ ID NO: 24985 - DNA, 2799 bp, Homo sapiens
agggtggcctttcagcagcccctgcgcgggctgtgtctgctgtgaaaaacatcaacctgccagagattcctcggaacatcaacattggcgatctcaacatcaaagttcccaacctgtcccagtttgtctgaggatcaagtattggcctgaaatagagtccttaagacaagcaaagacaagcaaggcaagcacgtctggaaacagaacccattttgagccttagaagagtcaagcctcaggacctggaaactttgtgtctggggaagactgtttggcatggaatagggaagggattcctattgacactgctcgggtgcacccagttctcacatgtgcagtcatgccgttctctgatgcatacggccactgcagatgtgaggggccctgccttcctcagtagggagtcaacatgcccaagtcatttgcacctttacctctcacatggatgctcccaagggttagggactgcattgagcaggcccacctgcttcccagaacctcctcactagggctgagcaccttctctgagtagagtcttcatccttagcaccacagacttctgaggtcctgtgccctttacttgctggtgaggtgtcataggtagaaaagggctggcccttcagatctgggggtgtggtgagtggcaagtaagggcagaattttaggagaaccagagtcacccgctggctctactgagattgttacacccagaatccttttggttaccgcctcatgaagaatatgcttcccgcattgtcctagtcccagttgtattctcacaggtgttatgtgcaggacacaatccaaatcataaacctggctcatgcccaacacatttctgctaatagggagagggacccaccacacacccacacatgccagaggtccctcctcacagaggagagggcctgtgtctgtagaaggttaaagctgacaacatgtgaaacatcccagaattatgactcttcccaagtttaaaatacattctcctcatgagagcagaaggtttgttgctgtgttgtgaatgatgagctgcctccatagggaacccactgccacctgggccagcttctggagcatgagaacctgagccagggtcacccttgtggggcctggacatgacgcacgctggctgcgactaggagcagggctgcctcttctccctccccaaggtctgcttgtgggcacgctctgttccctcaggtgccattctcccagggcttaggcgcccataaatgttctttctgtggtggagtagggcctcctgcttccatactgtcgcatgggctagatctcaggtgtggtgttgagccaccttaagatgagggctgcttcgcagtaaagtttccagcctgggcccctcttgggccttctggctggggaccctcagcctcctgatgctgttgcagggcaggtctgagagggtgcccagcagcacccggtgtcagggccaccttgttttccatttttgaacagcgctccctgtggtttgtgcccactgctcaatacagcctccgatcctcactcttgaaagctccatgataagcacagagatgggcagtgtgggtcagaaggtgggccgcttcctgtggaagagggaagtgtaggtgaatagatatcaaaacccctgatgtcattcttttgaggggttggattttcttttttctggcagacatttcagtacattcacatttctctcacatttgctgaatgtgagatcagaataaaggagatcggcgtttatttcgtaccttctgtaagttggcatgagcaagatcattcaactgtccttacaacaggcattcttatccccattttgcagatgacgaaagtagacccagctccagtaaccttcccttagattacacggggctgagatctgagactgttcacttgactccactgtccttttctttcctcgctgcttaagatggcttctcccaatgttatcatcttcttttttatagataaggaaactgagcctcagagagtctgacttctcacaaaccgtggtctaaataggcttgattttctaaggtggccagtgatcatgtcatagagtataagagccaaagagtcgtctgtgtccctccatttaactgatgttgaagccgaagcccaaggtggtaaatgttatgttgagggtcacaaatccagagccacatccctcttcttgagttcgtttgttacgtggtttaatgcattactgcaggacagcccttatgctagatttcctgggatagcctagattttgaatgttttgcctgccagaaaccaatggttttaaaaaatcattgagtggtcctacagattcaaagcgagcatccaaacatccctcacatggcctcttacaatgacataaaactgaagcccacttttttatttggaaaactcaatccctttggacaagccacaataatttttcattaactacttgaggttgcctgcaaattcagctagctttccagcctgctatcagcaaagccataaacatcttttttaaaaataggttaaggttggccaggtgcggtggctcacgcctgtaatcccagcactttgggaggccgaggcgggcagatcacgaggtcaggagatcgagaccatcctagctaacacagtgaaaacccatctctactaaaaatacaaaaaattggccagccgtggtagtggacacctgtagtcccagctactcaggaggctgcggcaggagaatggcatgaacccgggaggcagagcttgcagtgagccaagatcgcaccactacactccagcctgggcaacacagcaagactccgtctc

SEQ ID NO: 24986 - protein, 51 aa, Homo sapiens
MHTATADVRGPAFLSRESTCPSHLHLYLSHGCSQGLGTALSRPTCFPEPPH

SEQ ID NO: 24987 - DNA, 3003 bp, Homo sapiens
agggtggcctttcagcagcccctgcgcgggctgtgtctgctgtgaaaaacatcaacctgccagagattcctcggaacatcaacattggcgatctcaacatcaaagttcccaacctgtcccagtttgtctgaggatcaagtattggcctgaaatagagtccttaagacaagcaaagacaagcaaggcaagcacgtctggaaacagaacccattttgagccttagaagagtcaagcctcaggacctggaaactttgtgtctggggaagactgtttggcatggaatagggaagggattcctattgacactgctcgggtgcacccagttctcacatgtgcagtcatgccgttctctgatgcatacggccactgcagatgtgaggggccctgccttcctcagtagggagtcaacatgcccaagtcatttgcacctttacctctcacatggatgctcccaagggttagggactgcattgagcaggcccacctgcttcccagaacctcctcactagggctgagcaccttctctgagtagagtcttcatccttagcaccacagacttctgaggtcctgtgccctttacttgctggtgaggtgtcataggtagaaaagggctggcccttcagatctgggggtgtggtgagtggcaagtaagggcagaattttaggagaaccagagtcacccgctggctctactgagattgttacacccagaatccttttgtgtttttttgtggttttttttttttgaggtggagtcttgctctgtcacccaggctggagtgctgtggtgcaatctcggctcactgcaacctctgcttcccgggttcaagcatttctcctgtctcagcctccccagtagctgggattacaggcacccaccaccgtgcccggccaccagaatcctttggtatagccaagccttttggttaccgcctcatgaagaatatgcttcccgcattgtcctagtcccagttgtattctcacaggtgttatgtgcaggacacaatccaaatcataaacctggctcatgcccaacacatttctgctaatagggagagggacccaccacacacccacacatgccagaggtccctcctcacagaggagagggcctgtgtctgtagaaggttaaagctgacaacatgtgaaacatcccagaattatgactcttcccaagtttaaaatacattctcctcatgagagcagaaggtttgttgctgtgttgtgaatgatgagctgcctccatagggaacccactgccacctgggccagcttctggagcatgagaacctgagccagggtcacccttgtggggcctggacatgacgcacgctggctgcgactaggagcagggctgcctcttctccctccccaaggtctgcttgtgggcacgctctgttccctcaggtgccattctcccagggcttaggcgcccataaatgttctttctgtggtggagtagggcctcctgcttccatactgtcgcatgggctagatctcaggtgtggtgttgagccaccttaagatgagggctgcttcgcagtaaagtttccagcctgggcccctcttgggccttctggctggggaccctcagcctcctgatgctgttgcagggcaggtctgagagggtgcccagcagcacccggtgtcagggccaccttgttttccatttttgaacagcgctccctgtggtttgtgcccactgctcaatacagcctccgatcctcactcttgaaagctccatgataagcacagagatgggcagtgtgggtcagaaggtgggccgcttcctgtggaagagggaagtgtaggtgaatagatatcaaaacccctgatgtcattcttttgaggggttggattttcttttttctggcagacatttcagtacattcacatttctctcacatttgctgaatgtgagatcagaataaaggagatcggcgtttatttcgtaccttctgtaagttggcatgagcaagatcattcaactgtccttacaacaggcattcttatccccattttgcagatgacgaaagtagacccagctccagtaaccttcccttagattacacggggctgagatctgagactgttcacttgactccactgtccttttctttcctcgctgcttaagatggcttctcccaatgttatcatcttcttttttatagataaggaaactgagcctcagagagtctgacttctcacaaaccgtggtctaaataggcttgattttctaaggtggccagtgatcatgtcatagagtataagagccaaagagtcgtctgtgtccctccatttaactgatgttgaagccgaagcccaaggtggtaaatgttatgttgagggtcacaaatccagagccacatccctcttcttgagttcgtttgttacgtggtttaatgcattactgcaggacagcccttatgctagatttcctgggatagcctagattttgaatgttttgcctgccagaaaccaatggttttaaaaaatcattgagtggtcctacagattcaaagcgagcatccaaacatccctcacatggcctcttacaatgacataaaactgaagcccacttttttatttggaaaactcaatccctttggacaagccacaataatttttcattaactacttgaggttgcctgcaaattcagctagctttccagcctgctatcagcaaagccataaacatcttttttaaaaataggttaaggttggccaggtgcggtggctcacgcctgtaatcccagcactttgggaggccgaggcgggcagatcacgaggtcaggagatcgagaccatcctagctaacacagtgaaaacccatctctactaaaaatacaaaaaattggccagccgtggtagtggacacctgtagtcccagctactcaggaggctgcggcaggagaatggcatgaacccgggaggcagagcttgcagtgagccaagatcgcaccactacactccagcctgggcaacacagcaagactccgtctc

SEQ ID NO: 24988 - protein, 51 aa, Homo sapiens; identical to SEQ ID NO: 24986

SEQ ID NO: 24989 - DNA, 4041 bp, Homo sapiens
tatgtcagatgaaactcatcctggttgtaattatttttaggttgaattaccattggatttgccaagtactgaaaaatcagtagcacttttgtttaaactctgttaataaacacttctgagtgaattttgctagtgtcattatttcccatgcttgctgagtagaaggttgaattattattacttcataattcatatttgttcaatgcacactgtgtgaagctgagtttaggcctctcgaagacttagcctctttctttctgttcctgtggttttgaataccatttacatgactcacgtctcagattttctttccctaccagcctccctgtgttggtttgtgactttatctgtcagtgttctctcaggtatttacttagatttctgcaggcatcctcaaggtcagcgcatcagccaacttctgttgtttaacagaacccttctttgtgccctgactctatctccagttctttaggtacatgagttcagtgttgattcttgactgcttgctcccacacccatgcttggcagcctccaactttcttaagtcccatctatctccaatcagagaaatgttagccatctttcatggtcaacttcatattcagtggacaaggtctgaactgactagcaggactaacacgggcagctgttcgctcatccattgctcacttacacttgagtcattttgcttaccaaagaacccagtgtgtcctgggcaccaggctaggtgctttacacacatttatctcatccagtcctcactgcaatcctggaaggaggctgaagcactttaaaggtgcactacatcctccaggaggtggtgatgggtgggatggtgttggaaacaaacatgaatgaaatcgtggctcagattgaggctcaaaacaggctggagaaatccgagggtggcctttcagcagcccctgcgcgggctgtgtctgctgtgaaaaacatcaacctgccagagattcctcggaacatcaacattggcgatctcaacatcaaagttcccaacctgtcccagtttgtctgaggatcaagtattggcctgaaatagagtccttaagacaagcaaagacaagcaaggcaagcacgtctggaaacagaacccattttgagccttagaagagtcaagcctcaggacctggaaactttgtgtctggggaagactgtttggcatggaatagggaagggattcctattgacactgctcgggtgcacccagttctcacatgtgcagtcatgccgttctctgatgcatacggccactgcagatgtgaggggccctgccttcctcagtagggagtcaacatgcccaagtcatttgcacctttacctctcacatggatgctcccaagggttagggactgcattgagcaggcccacctgcttcccagaacctcctcactagggctgagcaccttctctgagtagagtcttcatccttagcaccacagacttctgaggtcctgtgccctttacttgctggtgaggtgtcataggtagaaaagggctggcccttcagatctgggggtgtggtgagtggcaagtaagggcagaattttaggagaaccagagtcacccgctggctctactgagattgttacacccagaatccttttgtgtttttttgtggttttttttttttgaggtggagtcttgctctgtcacccaggctggagtgctgtggtgcaatctcggctcactgcaacctctgcttcccgggttcaagcatttctcctgtctcagcctccccagtagctgggattacaggcacccaccaccatgcccagctaattgttgtatgtttagtagagacagggtttcaccatgttggccaggctgggctcgaactcctggacctcaagtgatctacccgccttggcctcccaaagtgctggcattacaggtgtgagccaccgtgcccggccaccagaatcctttggtatagccaagccttttggttaccgcctcatgaagaatatgcttcccgcattgtcctagtcccagttgtattctcacaggtgttatgtgcaggacacaatccaaatcataaacctggctcatgcccaacacatttctgctaatagggagagggacccaccacacacccacacatgccagaggtccctcctcacagaggagagggcctgtgtctgtagaaggttaaagctgacaacatgtgaaacatcccagaattatgactcttcccaagtttaaaatacattctcctcatgagagcagaaggtttgttgctgtgttgtgaatgatgagctgcctccatagggaacccactgccacctgggccagcttctggagcatgagaacctgagccagggtcacccttgtggggcctggacatgacgcacgctggctgcgactaggagcagggctgcctcttctccctccccaaggtctgcttgtgggcacgctctgttccctcaggtgccattctcccagggcttaggcgcccataaatgttctttctgtggtggagtagggcctcctgcttccatactgtcgcatgggctagatctcaggtgtggtgttgagccaccttaagatgagggctgcttcgcagtaaagtttccagcctgggcccctcttgggccttctggctggggaccctcagcctcctgatgctgttgcagggcaggtctgagagggtgcccagcagcacccggtgtcagggccaccttgttttccatttttgaacagcgctccctgtggtttgtgcccactgctcaatacagcctccgatcctcactcttgaaagctccatgataagcacagagatgggcagtgtgggtcagaaggtgggccgcttcctgtggaagagggaagtgtaggtgaatagatatcaaaacccctgatgtcattcttttgaggggttggattttcttttttctggcagacatttcagtacattcacatttctctcacatttgctgaatgtgagatcagaataaaggagatcggcgtttatttcgtaccttctgtaagttggcatgagcaagatcattcaactgtccttacaacaggcattcttatccccattttgcagatgacgaaagtagacccagctccagtaaccttcccttagattacacggggctgagatctgagactgttcacttgactccactgtccttttctttcctcgctgcttaagatggcttctcccaatgttatcatcttcttttttatagataaggaaactgagcctcagagagtctgacttctcacaaaccgtggtctaaataggcttgattttctaaggtggccagtgatcatgtcatagagtataagagccaaagagtcgtctgtgtccctccatttaactgatgttgaagccgaagcccaaggtggtaaatgttatgttgagggtcacaaatccagagccacatccctcttcttgagttcgtttgttacgtggtttaatgcattactgcaggacagcccttatgctagatttcctgggatagcctagattttgaatgttttgcctgccagaaaccaatggttttaaaaaatcattgagtggtcctacagattcaaagcgagcatccaaacatccctcacatggcctcttacaatgacataaaactgaagcccacttttttatttggaaaactcaatccctttggacaagccacaataatttttcattaactacttgaggttgcctgcaaattcagctagctttccagcctgctatcagcaaagccataaacatcttttttaaaaataggttaaggttggccaggtgcggtggctcacgcctgtaatcccagcactttgggaggccgaggcgggcagatcacgaggtcaggagatcgagaccatcctagctaacacagtgaaaacccatctctactaaaaatacaaaaaattggccagccgtggtagtggacacctgtagtcccagctactcaggaggctgcggcaggagaatggcatgaacccgggaggcagagcttgcagtgagccaagatcgcaccactacactccagcctgggcaacacagcaagactccgtctc

SEQ ID NO: 24990 - protein, 105 aa, Homo sapiens
MSSVLILDCLLPHPCLAASNFLKSHLSPIREMLAIFHGQLHIQWTRSELTSRTNTGSCSLIHCSLTLESFCLPKNPVCPGHQARCFTHIYLIQSSLQSWKEAEAL

SEQ ID NO: 24991 - DNA, 3671 bp, Homo sapiens
gctttctgggagtagccggtgctgagagaaccgtggctggcaaagatgattcaggcgattctggttttcaacaaccatgggaagccacggctagtccgcttctaccagcgtttcccagaagaaattcaacagcagattgttcgagagactttccatctagtcctcaagcgggatgacaacatctgtaacttcttggagggtggaagtttgattggtggctctgactacaaactgatctaccggcactatgctaccctctactttgtattttgtgtggattcctcagagagtgaacttggaatcttggacctcatccaggtacatctggaagttgttttcttcatagctcccaaggtttttgtggaaactctggataagtgtttcgaaaatgtgtgtgaattggatttgatcttccatatggataaggtgcactacatcctccaggaggtggtgatgggtgggatggtgttggaaacaaacatgaatgaaatcgtggctcagattgaggctcaaaacaggctggagaaatccgagggtggcctttcagcagcccctgcgcgggctgtgtctgctgtgaaaaacatcaacctgccagagattcctcggaacatcaacattggcgatctcaacatcaaagttcccaacctgtcccagtttgtctgaggatcaagtattggcctgaaatagagtccttaagacaagcaaagacaagcaaggcaagcacgtctggaaacagaacccattttgagccttagaagagtcaagcctcaggacctggaaactttgtgtctggggaagactgtttggcatggaatagggaagggattcctattgacactgctcgggtgcacccagttctcacatgtgcagtcatgccgttctctgatgcatacggccactgcagatgtgaggggccctgccttcctcagtagggagtcaacatgcccaagtcatttgcacctttacctctcacatggatgctcccaagggttagggactgcattgagcaggcccacctgcttcccagaacctcctcactagggctgagcaccttctctgagtagagtcttcatccttagcaccacagacttctgaggtcctgtgccctttacttgctggtgaggtgtcataggtagaaaagggctggcccttcagatctgggggtgtggtgagtggcaagtaagggcagaattttaggagaaccagagtcacccgctggctctactgagattgttacacccagaatccttttgtgtttttttgtggttttttttttttgaggtggagtcttgctctgtcacccaggctggagtgctgtggtgcaatctcggctcactgcaacctctgcttcccgggttcaagcatttctcctgtctcagcctccccagtagctgggattacaggcacccaccaccatgcccagctaattgttgtatgtttagtagagacagggtttcaccatgttggccaggctgggctcgaactcctggacctcaagtgatctacccgccttggcctcccaaagtgctggcattacaggtgtgagccaccgtgcccggccaccagaatcctttggtatagccaagccttttggttaccgcctcatgaagaatatgcttcccgcattgtcctagtcccagttgtattctcacaggtgttatgtgcaggacacaatccaaatcataaacctggctcatgcccaacacatttctgctaatagggagagggacccaccacacacccacacatgccagaggtccctcctcacagaggagagggcctgtgtctgtagaaggttaaagctgacaacatgtgaaacatcccagaattatgactcttcccaagtttaaaatacattctcctcatgagagcagaaggtttgttgctgtgttgtgaatgatgagctgcctccatagggaacccactgccacctgggccagcttctggagcatgagaacctgagccagggtcacccttgtggggcctggacatgacgcacgctggctgcgactaggagcagggctgcctcttctccctccccaaggtctgcttgtgggcacgctctgttccctcaggtgccattctcccagggcttaggcgcccataaatgttctttctgtggtggagtagggcctcctgcttccatactgtcgcatgggctagatctcaggtgtggtgttgagccaccttaagatgagggctgcttcgcagtaaagtttccagcctgggcccctcttgggccttctggctggggaccctcagcctcctgatgctgttgcagggcaggtctgagagggtgcccagcagcacccggtgtcagggccaccttgttttccatttttgaacagcgctccctgtggtttgtgcccactgctcaatacagcctccgatcctcactcttgaaagctccatgataagcacagagatgggcagtgtgggtcagaaggtgggccgcttcctgtggaagagggaagtgtaggtgaatagatatcaaaacccctgatgtcattcttttgaggggttggattttcttttttctggcagacatttcagtacattcacatttctctcacatttgctgaatgtgagatcagaataaaggagatcggcgtttatttcgtaccttctgtaagttggcatgagcaagatcattcaactgtccttacaacaggcattcttatccccattttgcagatgacgaaagtagacccagctccagtaaccttcccttagattacacggggctgagatctgagactgttcacttgactccactgtccttttctttcctcgctgcttaagatggcttctcccaatgttatcatcttcttttttatagataaggaaactgagcctcagagagtctgacttctcacaaaccgtggtctaaataggcttgattttctaaggtggccagtgatcatgtcatagagtataagagccaaagagtcgtctgtgtccctccatttaactgatgttgaagccgaagcccaaggtggtaaatgttatgttgagggtcacaaatccagagccacatccctcttcttgagttcgtttgttacgtggtttaatgcattactgcaggacagcccttatgctagatttcctgggatagcctagattttgaatgttttgcctgccagaaaccaatggttttaaaaaatcattgagtggtcctacagattcaaagcgagcatccaaacatccctcacatggcctcttacaatgacataaaactgaagcccacttttttatttggaaaactcaatccctttggacaagccacaataatttttcattaactacttgaggttgcctgcaaattcagctagctttccagcctgctatcagcaaagccataaacatcttttttaaaaataggttaaggttggccaggtgcggtggctcacgcctgtaatcccagcactttgggaggccgaggcgggcagatcacgaggtcaggagatcgagaccatcctagctaacacagtgaaaacccatctctactaaaaatacaaaaaattggccagccgtggtagtggacacctgtagtcccagctactcaggaggctgcggcaggagaatggcatgaacccgggaggcagagcttgcagtgagccaagatcgcaccactacactccagcctgggcaacacagcaagactccgtctc

SEQ ID NO: 24992 - protein, 205 aa, Homo sapiens
MIQAILVFNNHGKPRLVRFYQRFPEEIQQQIVRETFHLVLKRDDNICNFLEGGSLIGGSDYKLIYRHYATLYFVFCVDSSESELGILDLIQVHLEVVFFIAPKVFVETLDKCFENVCELDLIFHMDKVHYILQEVVMGGMVLETNMNEIVAQIEAQNRLEKSEGGLSAAPARAVSAVKNINLPEIPRNINIGDLNIKVPNLSQFV

SEQ ID NO: 24993 - DNA, 3754 bp, Homo sapiens
gctttctgggagtagccggtgctgagagaaccgtggctggcaaagatgattcaggcgattctggttttcaacaaccatgggaagccacggctagtccgcttctaccagcgtttcccagaagaaattcaacagcagattgttcgagagactttccatctagtcctcaagcgggatgacaacatctgtaacttcttggagggtggaagtttgattggtggctctgactacaaactgatctaccggcactatgctaccctctactttgtattttgtgtggattcctcagagagtgaacttggaatcttggacctcatccagcttaaaaaaagagagaggaagaaaagccagtgcaacaccctacaaactggaacactagctctttgggaacaaggacctgacatcagaacaagaaggctataagttcccaaaccttaaaagtttttgtggaaactctggataagtgtttcgaaaatgtgtgtgaattggatttgatcttccatatggataaggtgcactacatcctccaggaggtggtgatgggtgggatggtgttggaaacaaacatgaatgaaatcgtggctcagattgaggctcaaaacaggctggagaaatccgagggtggcctttcagcagcccctgcgcgggctgtgtctgctgtgaaaaacatcaacctgccagagattcctcggaacatcaacattggcgatctcaacatcaaagttcccaacctgtcccagtttgtctgaggatcaagtattggcctgaaatagagtccttaagacaagcaaagacaagcaaggcaagcacgtctggaaacagaacccattttgagccttagaagagtcaagcctcaggacctggaaactttgtgtctggggaagactgtttggcatggaatagggaagggattcctattgacactgctcgggtgcacccagttctcacatgtgcagtcatgccgttctctgatgcatacggccactgcagatgtgaggggccctgccttcctcagtagggagtcaacatgcccaagtcatttgcacctttacctctcacatggatgctcccaagggttagggactgcattgagcaggcccacctgcttcccagaacctcctcactagggctgagcaccttctctgagtagagtcttcatccttagcaccacagacttctgaggtcctgtgccctttacttgctggtgaggtgtcataggtagaaaagggctggcccttcagatctgggggtgtggtgagtggcaagtaagggcagaattttaggagaaccagagtcacccgctggctctactgagattgttacacccagaatccttttgtgtttttttgtggttttttttttttgaggtggagtcttgctctgtcacccaggctggagtgctgtggtgcaatctcggctcactgcaacctctgcttcccgggttcaagcatttctcctgtctcagcctccccagtagctgggattacaggcacccaccaccatgcccagctaattgttgtatgtttagtagagacagggtttcaccatgttggccaggctgggctcgaactcctggacctcaagtgatctacccgccttggcctcccaaagtgctggcattacaggtgtgagccaccgtgcccggccaccagaatcctttggtatagccaagccttttggttaccgcctcatgaagaatatgcttcccgcattgtcctagtcccagttgtattctcacaggtgttatgtgcaggacacaatccaaatcataaacctggctcatgcccaacacatttctgctaatagggagagggacccaccacacacccacacatgccagaggtccctcctcacagaggagagggcctgtgtctgtagaaggttaaagctgacaacatgtgaaacatcccagaattatgactcttcccaagtttaaaatacattctcctcatgagagcagaaggtttgttgctgtgttgtgaatgatgagctgcctccatagggaacccactgccacctgggccagcttctggagcatgagaacctgagccagggtcacccttgtggggcctggacatgacgcacgctggctgcgactaggagcagggctgcctcttctccctccccaaggtctgcttgtgggcacgctctgttccctcaggtgccattctcccagggcttaggcgcccataaatgttctttctgtggtggagtagggcctcctgcttccatactgtcgcatgggctagatctcaggtgtggtgttgagccaccttaagatgagggctgcttcgcagtaaagtttccagcctgggcccctcttgggccttctggctggggaccctcagcctcctgatgctgttgcagggcaggtctgagagggtgcccagcagcacccggtgtcagggccaccttgttttccatttttgaacagcgctccctgtggtttgtgcccactgctcaatacagcctccgatcctcactcttgaaagctccatgataagcacagagatgggcagtgtgggtcagaaggtgggccgcttcctgtggaagagggaagtgtaggtgaatagatatcaaaacccctgatgtcattcttttgaggggttggattttcttttttctggcagacatttcagtacattcacatttctctcacatttgctgaatgtgagatcagaataaaggagatcggcgtttatttcgtaccttctgtaagttggcatgagcaagatcattcaactgtccttacaacaggcattcttatccccattttgcagatgacgaaagtagacccagctccagtaaccttcccttagattacacggggctgagatctgagactgttcacttgactccactgtccttttctttcctcgctgcttaagatggcttctcccaatgttatcatcttcttttttatagataaggaaactgagcctcagagagtctgacttctcacaaaccgtggtctaaataggcttgattttctaaggtggccagtgatcatgtcatagagtataagagccaaagagtcgtctgtgtccctccatttaactgatgttgaagccgaagcccaaggtggtaaatgttatgttgagggtcacaaatccagagccacatccctcttcttgagttcgtttgttacgtggtttaatgcattactgcaggacagcccttatgctagatttcctgggatagcctagattttgaatgttttgcctgccagaaaccaatggttttaaaaaatcattgagtggtcctacagattcaaagcgagcatccaaacatccctcacatggcctcttacaatgacataaaactgaagcccacttttttatttggaaaactcaatccctttggacaagccacaataatttttcattaactacttgaggttgcctgcaaattcagctagctttccagcctgctatcagcaaagccataaacatcttttttaaaaataggttaaggttggccaggtgcggtggctcacgcctgtaatcccagcactttgggaggccgaggcgggcagatcacgaggtcaggagatcgagaccatcctagctaacacagtgaaaacccatctctactaaaaatacaaaaaattggccagccgtggtagtggacacctgtagtcccagctactcaggaggctgcggcaggagaatggcatgaacccgggaggcagagcttgcagtgagccaagatcgcaccactacactccagcctgggcaacacagcaagactccgtctc

SEQ ID NO: 24994 - protein, 124 aa, Homo sapiens
MIQAILVFNNHGKPRLVRFYQRFPEEIQQQIVRETFHLVLKRDDNICNFLEGGSLIGGSDYKLIYRHYATLYFVFCVDSSESELGILDLIQLKKRERKKSQCNTLQTGTLALWEQGPDIRTRRL

SEQ ID NO: 24995 - DNA, 3659 bp, Homo sapiens
gatcgtgttgtggcggaaggaggagctttctgggagtagccggtgctgagagaaccgtggctggcaaagatgattcaggcgattctggttttcaacaaccatgggaagccacggctagtccgcttctaccagcgtttcccagaagaaattcaacagcagattgttcgagagactttccatctagtcctcaagcgggatgacaacatctgtaacttcttggagggtggaagtttgattggtggctctgactacaaactgatctaccggcactatgctaccctctactttgtattttgtgtggattcctcagagagtgaacttggaatcttggacctcatccaggtttttgtggaaactctggataagtgtttcgaaaatgtgtgtgaattggatttgatcttccatatggataaggtgcactacatcctccaggaggtggtgatgggtgggatggtgttggaaacaaacatgaatgaaatcgtggctcagattgaggctcaaaacaggctggagaaatccgagggtggcctttcagcagcccctgcgcgggctgtgtctgctgtgaaaaacatcaacctgccagagattcctcggaacatcaacattggcgatctcaacatcaaagttcccaacctgtcccagtttgtctgaggatcaagtattggcctgaaatagagtccttaagacaagcaaagacaagcaaggcaagcacgtctggaaacagaacccattttgagccttagaagagtcaagcctcaggacctggaaactttgtgtctggggaagactgtttggcatggaatagggaagggattcctattgacactgctcgggtgcacccagttctcacatgtgcagtcatgccgttctctgatgcatacggccactgcagatgtgaggggccctgccttcctcagtagggagtcaacatgcccaagtcatttgcacctttacctctcacatggatgctcccaagggttagggactgcattgagcaggcccacctgcttcccagaacctcctcactagggctgagcaccttctctgagtagagtcttcatccttagcaccacagacttctgaggtcctgtgccctttacttgctggtgaggtgtcataggtagaaaagggctggcccttcagatctgggggtgtggtgagtggcaagtaagggcagaattttaggagaaccagagtcacccgctggctctactgagattgttacacccagaatccttttgtgtttttttgtggttttttttttttgaggtggagtcttgctctgtcacccaggctggagtgctgtggtgcaatctcggctcactgcaacctctgcttcccgggttcaagcatttctcctgtctcagcctccccagtagctgggattacaggcacccaccaccatgcccagctaattgttgtatgtttagtagagacagggtttcaccatgttggccaggctgggctcgaactcctggacctcaagtgatctacccgccttggcctcccaaagtgctggcattacaggtgtgagccaccgtgcccggccaccagaatcctttggtatagccaagccttttggttaccgcctcatgaagaatatgcttcccgcattgtcctagtcccagttgtattctcacaggtgttatgtgcaggacacaatccaaatcataaacctggctcatgcccaacacatttctgctaatagggagagggacccaccacacacccacacatgccagaggtccctcctcacagaggagagggcctgtgtctgtagaaggttaaagctgacaacatgtgaaacatcccagaattatgactcttcccaagtttaaaatacattctcctcatgagagcagaaggtttgttgctgtgttgtgaatgatgagctgcctccatagggaacccactgccacctgggccagcttctggagcatgagaacctgagccagggtcacccttgtggggcctggacatgacgcacgctggctgcgactaggagcagggctgcctcttctccctccccaaggtctgcttgtgggcacgctctgttccctcaggtgccattctcccagggcttaggcgcccataaatgttctttctgtggtggagtagggcctcctgcttccatactgtcgcatgggctagatctcaggtgtggtgttgagccaccttaagatgagggctgcttcgcagtaaagtttccagcctgggcccctcttgggccttctggctggggaccctcagcctcctgatgctgttgcagggcaggtctgagagggtgcccagcagcacccggtgtcagggccaccttgttttccatttttgaacagcgctccctgtggtttgtgcccactgctcaatacagcctccgatcctcactcttgaaagctccatgataagcacagagatgggcagtgtgggtcagaaggtgggccgcttcctgtggaagagggaagtgtaggtgaatagatatcaaaacccctgatgtcattcttttgaggggttggattttcttttttctggcagacatttcagtacattcacatttctctcacatttgctgaatgtgagatcagaataaaggagatcggcgtttatttcgtaccttctgtaagttggcatgagcaagatcattcaactgtccttacaacaggcattcttatccccattttgcagatgacgaaagtagacccagctccagtaaccttcccttagattacacggggctgagatctgagactgttcacttgactccactgtccttttctttcctcgctgcttaagatggcttctcccaatgttatcatcttcttttttatagataaggaaactgagcctcagagagtctgacttctcacaaaccgtggtctaaataggcttgattttctaaggtggccagtgatcatgtcatagagtataagagccaaagagtcgtctgtgtccctccatttaactgatgttgaagccgaagcccaaggtggtaaatgttatgttgagggtcacaaatccagagccacatccctcttcttgagttcgtttgttacgtggtttaatgcattactgcaggacagcccttatgctagatttcctgggatagcctagattttgaatgttttgcctgccagaaaccaatggttttaaaaaatcattgagtggtcctacagattcaaagcgagcatccaaacatccctcacatggcctcttacaatgacataaaactgaagcccacttttttatttggaaaactcaatccctttggacaagccacaataatttttcattaactacttgaggttgcctgcaaattcagctagctttccagcctgctatcagcaaagccataaacatcttttttaaaaataggttaaggttggccaggtgcggtggctcacgcctgtaatcccagcactttgggaggccgaggcgggcagatcacgaggtcaggagatcgagaccatcctagctaacacagtgaaaacccatctctactaaaaatacaaaaaattggccagccgtggtagtggacacctgtagtcccagctactcaggaggctgcggcaggagaatggcatgaacccgggaggcagagcttgcagtgagccaagatcgcaccactacactccagcctgggcaacacagcaagactccgtctc

SEQ ID NO: 24996 - protein, 193 aa, Homo sapiens; identical to SEQ ID NO: 3327

SEQ ID NO: 24997 - DNA, 1758 bp, Homo sapiens
agggtggcctttcagcagcccctgcgcgggctgtgtctgctgtgaaaaacatcaacctgccagagattcctcggaacatcaacattggcgatctcaacatcaaagttcccaacctgtcccagtttgtctgaggatcaagtattggcctgaaatagagtccttaagacaagcaaagacaagcaaggcaagcacgtctggaaacagaacccattttgagccttagaagagtcaagcctcaggacctggaaactttgtgtctggggaagactgtttggcatggaatagggaagggattcctattgacactgctcgggtgcacccagttctcacatgtgcagtcatgccgttctctgatgcatacggccactgcagatgtgaggggccctgccttcctcagtagggagtcaacatgcccaagtcatttgcacctttacctctcacatggatgctcccaagggttagggactgcattgagcaggcccacctgcttcccagaacctcctcactagggctgagcaccttctctgagtagagtcttcatccttagcaccacagacttctgaggtcctgtgccctttacttgctggtgaggtgtcataggtagaaaagggctggcccttcagatctgggggtgtggtgagtggcaagtaagggcagaattttaggagaaccagagtcacccgctggctctactgagattgttacacccagaatccttttggttaccgcctcatgaagaatatgcttcccgcattgtcctagtcccagttgtattctcacaggtgttatgtgcaggacacaatccaaatcataaacctggctcatgcccaacacatttctgctaatagggagagggacccaccacacacccacacatgccagaggtccctcctcacagaggagagggcctgtgtctgtagaaggttaaagctgacaacatgtgaaacatcccagaattatgactcttcccaagtttaaaatacattctcctcatgagagcagaaggtttgttgctgtgttgtgaatgatgagctgcctccatagggaacccactgccacctgggccagcttctggagcatgagaacctgagccagggtcacccttgtggggcctggacatgacgcacgctggctgcgactaggagcagggctgcctcttctccctccccaaggtctgcttgtgggcacgctctgttccctcaggtgccattctcccagggcttaggcgcccataaatgttctttctgtggtggagtagggcctcctgcttccatactgtcgcatgggctagatctcaggtgtggtgttgagccaccttaagatgagggctgcttcgcagtaaagtttccagcctgggcccctcttgggccttctggctggggaccctcagcctcctgatgctgttgcagggcaggtctgagagggtgcccagcagcacccggtgtcagggccaccttgttttccatttttgaacagcgctccctgtggtttgtgcccactgctcaatacagcctccgatcctcactcttgaaagctccatgataagcacagagatgggcagtgtgggtcagaaggtgggccgcttcctgtggaagagggaagtgtaggtgaatagatatcaaaacccctgatgtcattcttttgaggggttggattttcttttttctggcagacatttcagtacattcacatttctctcacatttgctgaatgtgagatcagaataaaggagatcggcgtttatttcgtaccttctgt

SEQ ID NO: 24998 - protein, 51 aa, Homo sapiens; identical to SEQ ID NO: 24986

SEQ ID NO: 24999 - DNA, 1962 bp, Homo sapiens
agggtggcctttcagcagcccctgcgcgggctgtgtctgctgtgaaaaacatcaacctgccagagattcctcggaacatcaacattggcgatctcaacatcaaagttcccaacctgtcccagtttgtctgaggatcaagtattggcctgaaatagagtccttaagacaagcaaagacaagcaaggcaagcacgtctggaaacagaacccattttgagccttagaagagtcaagcctcaggacctggaaactttgtgtctggggaagactgtttggcatggaatagggaagggattcctattgacactgctcgggtgcacccagttctcacatgtgcagtcatgccgttctctgatgcatacggccactgcagatgtgaggggccctgccttcctcagtagggagtcaacatgcccaagtcatttgcacctttacctctcacatggatgctcccaagggttagggactgcattgagcaggcccacctgcttcccagaacctcctcactagggctgagcaccttctctgagtagagtcttcatccttagcaccacagacttctgaggtcctgtgccctttacttgctggtgaggtgtcataggtagaaaagggctggcccttcagatctgggggtgtggtgagtggcaagtaagggcagaattttaggagaaccagagtcacccgctggctctactgagattgttacacccagaatccttttgtgtttttttgtggttttttttttttgaggtggagtcttgctctgtcacccaggctggagtgctgtggtgcaatctcggctcactgcaacctctgcttcccgggttcaagcatttctcctgtctcagcctccccagtagctgggattacaggcacccaccaccgtgcccggccaccagaatcctttggtatagccaagccttttggttaccgcctcatgaagaatatgcttcccgcattgtcctagtcccagttgtattctcacaggtgttatgtgcaggacacaatccaaatcataaacctggctcatgcccaacacatttctgctaatagggagagggacccaccacacacccacacatgccagaggtccctcctcacagaggagagggcctgtgtctgtagaaggttaaagctgacaacatgtgaaacatcccagaattatgactcttcccaagtttaaaatacattctcctcatgagagcagaaggtttgttgctgtgttgtgaatgatgagctgcctccatagggaacccactgccacctgggccagcttctggagcatgagaacctgagccagggtcacccttgtggggcctggacatgacgcacgctggctgcgactaggagcagggctgcctcttctccctccccaaggtctgcttgtgggcacgctctgttccctcaggtgccattctcccagggcttaggcgcccataaatgttctttctgtggtggagtagggcctcctgcttccatactgtcgcatgggctagatctcaggtgtggtgttgagccaccttaagatgagggctgcttcgcagtaaagtttccagcctgggcccctcttgggccttctggctggggaccctcagcctcctgatgctgttgcagggcaggtctgagagggtgcccagcagcacccggtgtcagggccaccttgttttccatttttgaacagcgctccctgtggtttgtgcccactgctcaatacagcctccgatcctcactcttgaaagctccatgataagcacagagatgggcagtgtgggtcagaaggtgggccgcttcctgtggaagagggaagtgtaggtgaatagatatcaaaacccctgatgtcattcttttgaggggttggattttcttttttctggcagacatttcagtacattcacatttctctcacatttgctgaatgtgagatcagaataaaggagatcggcgtttatttcgtaccttctgt

SEQ ID NO: 25000 - protein, 51 aa, Homo sapiens; identical to SEQ ID NO: 24986

SEQ ID NO: 25001 - DNA, 3000 bp, Homo sapiens
tatgtcagatgaaactcatcctggttgtaattatttttaggttgaattaccattggatttgccaagtactgaaaaatcagtagcacttttgtttaaactctgttaataaacacttctgagtgaattttgctagtgtcattatttcccatgcttgctgagtagaaggttgaattattattacttcataattcatatttgttcaatgcacactgtgtgaagctgagtttaggcctctcgaagacttagcctctttctttctgttcctgtggttttgaataccatttacatgactcacgtctcagattttctttccctaccagcctccctgtgttggtttgtgactttatctgtcagtgttctctcaggtatttacttagatttctgcaggcatcctcaaggtcagcgcatcagccaacttctgttgtttaacagaacccttctttgtgccctgactctatctccagttctttaggtacatgagttcagtgttgattcttgactgcttgctcccacacccatgcttggcagcctccaactttcttaagtcccatctatctccaatcagagaaatgttagccatctttcatggtcaacttcatattcagtggacaaggtctgaactgactagcaggactaacacgggcagctgttcgctcatccattgctcacttacacttgagtcattttgcttaccaaagaacccagtgtgtcctgggcaccaggctaggtgctttacacacatttatctcatccagtcctcactgcaatcctggaaggaggctgaagcactttaaaggtgcactacatcctccaggaggtggtgatgggtgggatggtgttggaaacaaacatgaatgaaatcgtggctcagattgaggctcaaaacaggctggagaaatccgagggtggcctttcagcagcccctgcgcgggctgtgtctgctgtgaaaaacatcaacctgccagagattcctcggaacatcaacattggcgatctcaacatcaaagttcccaacctgtcccagtttgtctgaggatcaagtattggcctgaaatagagtccttaagacaagcaaagacaagcaaggcaagcacgtctggaaacagaacccattttgagccttagaagagtcaagcctcaggacctggaaactttgtgtctggggaagactgtttggcatggaatagggaagggattcctattgacactgctcgggtgcacccagttctcacatgtgcagtcatgccgttctctgatgcatacggccactgcagatgtgaggggccctgccttcctcagtagggagtcaacatgcccaagtcatttgcacctttacctctcacatggatgctcccaagggttagggactgcattgagcaggcccacctgcttcccagaacctcctcactagggctgagcaccttctctgagtagagtcttcatccttagcaccacagacttctgaggtcctgtgccctttacttgctggtgaggtgtcataggtagaaaagggctggcccttcagatctgggggtgtggtgagtggcaagtaagggcagaattttaggagaaccagagtcacccgctggctctactgagattgttacacccagaatccttttgtgtttttttgtggttttttttttttgaggtggagtcttgctctgtcacccaggctggagtgctgtggtgcaatctcggctcactgcaacctctgcttcccgggttcaagcatttctcctgtctcagcctccccagtagctgggattacaggcacccaccaccatgcccagctaattgttgtatgtttagtagagacagggtttcaccatgttggccaggctgggctcgaactcctggacctcaagtgatctacccgccttggcctcccaaagtgctggcattacaggtgtgagccaccgtgcccggccaccagaatcctttggtatagccaagccttttggttaccgcctcatgaagaatatgcttcccgcattgtcctagtcccagttgtattctcacaggtgttatgtgcaggacacaatccaaatcataaacctggctcatgcccaacacatttctgctaatagggagagggacccaccacacacccacacatgccagaggtccctcctcacagaggagagggcctgtgtctgtagaaggttaaagctgacaacatgtgaaacatcccagaattatgactcttcccaagtttaaaatacattctcctcatgagagcagaaggtttgttgctgtgttgtgaatgatgagctgcctccatagggaacccactgccacctgggccagcttctggagcatgagaacctgagccagggtcacccttgtggggcctggacatgacgcacgctggctgcgactaggagcagggctgcctcttctccctccccaaggtctgcttgtgggcacgctctgttccctcaggtgccattctcccagggcttaggcgcccataaatgttctttctgtggtggagtagggcctcctgcttccatactgtcgcatgggctagatctcaggtgtggtgttgagccaccttaagatgagggctgcttcgcagtaaagtttccagcctgggcccctcttgggccttctggctggggaccctcagcctcctgatgctgttgcagggcaggtctgagagggtgcccagcagcacccggtgtcagggccaccttgttttccatttttgaacagcgctccctgtggtttgtgcccactgctcaatacagcctccgatcctcactcttgaaagctccatgataagcacagagatgggcagtgtgggtcagaaggtgggccgcttcctgtggaagagggaagtgtaggtgaatagatatcaaaacccctgatgtcattcttttgaggggttggattttcttttttctggcagacatttcagtacattcacatttctctcacatttgctgaatgtgagatcagaataaaggagatcggcgtttatttcgtaccttctgt

SEQ ID NO: 25002 - protein, 105 aa, Homo sapiens; identical to SEQ ID NO: 24990

SEQ ID NO: 25003 - DNA, 2630 bp, Homo sapiens
gctttctgggagtagccggtgctgagagaaccgtggctggcaaagatgattcaggcgattctggttttcaacaaccatgggaagccacggctagtccgcttctaccagcgtttcccagaagaaattcaacagcagattgttcgagagactttccatctagtcctcaagcgggatgacaacatctgtaacttcttggagggtggaagtttgattggtggctctgactacaaactgatctaccggcactatgctaccctctactttgtattttgtgtggattcctcagagagtgaacttggaatcttggacctcatccaggtacatctggaagttgttttcttcatagctcccaaggtttttgtggaaactctggataagtgtttcgaaaatgtgtgtgaattggatttgatcttccatatggataaggtgcactacatcctccaggaggtggtgatgggtgggatggtgttggaaacaaacatgaatgaaatcgtggctcagattgaggctcaaaacaggctggagaaatccgagggtggcctttcagcagcccctgcgcgggctgtgtctgctgtgaaaaacatcaacctgccagagattcctcggaacatcaacattggcgatctcaacatcaaagttcccaacctgtcccagtttgtctgaggatcaagtattggcctgaaatagagtccttaagacaagcaaagacaagcaaggcaagcacgtctggaaacagaacccattttgagccttagaagagtcaagcctcaggacctggaaactttgtgtctggggaagactgtttggcatggaatagggaagggattcctattgacactgctcgggtgcacccagttctcacatgtgcagtcatgccgttctctgatgcatacggccactgcagatgtgaggggccctgccttcctcagtagggagtcaacatgcccaagtcatttgcacctttacctctcacatggatgctcccaagggttagggactgcattgagcaggcccacctgcttcccagaacctcctcactagggctgagcaccttctctgagtagagtcttcatccttagcaccacagacttctgaggtcctgtgccctttacttgctggtgaggtgtcataggtagaaaagggctggcccttcagatctgggggtgtggtgagtggcaagtaagggcagaattttaggagaaccagagtcacccgctggctctactgagattgttacacccagaatccttttgtgtttttttgtggttttttttttttgaggtggagtcttgctctgtcacccaggctggagtgctgtggtgcaatctcggctcactgcaacctctgcttcccgggttcaagcatttctcctgtctcagcctccccagtagctgggattacaggcacccaccaccatgcccagctaattgttgtatgtttagtagagacagggtttcaccatgttggccaggctgggctcgaactcctggacctcaagtgatctacccgccttggcctcccaaagtgctggcattacaggtgtgagccaccgtgcccggccaccagaatcctttggtatagccaagccttttggttaccgcctcatgaagaatatgcttcccgcattgtcctagtcccagttgtattctcacaggtgttatgtgcaggacacaatccaaatcataaacctggctcatgcccaacacatttctgctaatagggagagggacccaccacacacccacacatgccagaggtccctcctcacagaggagagggcctgtgtctgtagaaggttaaagctgacaacatgtgaaacatcccagaattatgactcttcccaagtttaaaatacattctcctcatgagagcagaaggtttgttgctgtgttgtgaatgatgagctgcctccatagggaacccactgccacctgggccagcttctggagcatgagaacctgagccagggtcacccttgtggggcctggacatgacgcacgctggctgcgactaggagcagggctgcctcttctccctccccaaggtctgcttgtgggcacgctctgttccctcaggtgccattctcccagggcttaggcgcccataaatgttctttctgtggtggagtagggcctcctgcttccatactgtcgcatgggctagatctcaggtgtggtgttgagccaccttaagatgagggctgcttcgcagtaaagtttccagcctgggcccctcttgggccttctggctggggaccctcagcctcctgatgctgttgcagggcaggtctgagagggtgcccagcagcacccggtgtcagggccaccttgttttccatttttgaacagcgctccctgtggtttgtgcccactgctcaatacagcctccgatcctcactcttgaaagctccatgataagcacagagatgggcagtgtgggtcagaaggtgggccgcttcctgtggaagagggaagtgtaggtgaatagatatcaaaacccctgatgtcattcttttgaggggttggattttcttttttctggcagacatttcagtacattcacatttctctcacatttgctgaatgtgagatcagaataaaggagatcggcgtttatttcgtaccttctgt

SEQ ID NO: 25004 - protein, 205 aa, Homo sapiens; identical to SEQ ID NO: 24992

SEQ ID NO: 25005 - DNA, 2713 bp, Homo sapiens
gctttctgggagtagccggtgctgagagaaccgtggctggcaaagatgattcaggcgattctggttttcaacaaccatgggaagccacggctagtccgcttctaccagcgtttcccagaagaaattcaacagcagattgttcgagagactttccatctagtcctcaagcgggatgacaacatctgtaacttcttggagggtggaagtttgattggtggctctgactacaaactgatctaccggcactatgctaccctctactttgtattttgtgtggattcctcagagagtgaacttggaatcttggacctcatccagcttaaaaaaagagagaggaagaaaagccagtgcaacaccctacaaactggaacactagctctttgggaacaaggacctgacatcagaacaagaaggctataagttcccaaaccttaaaagtttttgtggaaactctggataagtgtttcgaaaatgtgtgtgaattggatttgatcttccatatggataaggtgcactacatcctccaggaggtggtgatgggtgggatggtgttggaaacaaacatgaatgaaatcgtggctcagattgaggctcaaaacaggctggagaaatccgagggtggcctttcagcagcccctgcgcgggctgtgtctgctgtgaaaaacatcaacctgccagagattcctcggaacatcaacattggcgatctcaacatcaaagttcccaacctgtcccagtttgtctgaggatcaagtattggcctgaaatagagtccttaagacaagcaaagacaagcaaggcaagcacgtctggaaacagaacccattttgagccttagaagagtcaagcctcaggacctggaaactttgtgtctggggaagactgtttggcatggaatagggaagggattcctattgacactgctcgggtgcacccagttctcacatgtgcagtcatgccgttctctgatgcatacggccactgcagatgtgaggggccctgccttcctcagtagggagtcaacatgcccaagtcatttgcacctttacctctcacatggatgctcccaagggttagggactgcattgagcaggcccacctgcttcccagaacctcctcactagggctgagcaccttctctgagtagagtcttcatccttagcaccacagacttctgaggtcctgtgccctttacttgctggtgaggtgtcataggtagaaaagggctggcccttcagatctgggggtgtggtgagtggcaagtaagggcagaattttaggagaaccagagtcacccgctggctctactgagattgttacacccagaatccttttgtgtttttttgtggttttttttttttgaggtggagtcttgctctgtcacccaggctggagtgctgtggtgcaatctcggctcactgcaacctctgcttcccgggttcaagcatttctcctgtctcagcctccccagtagctgggattacaggcacccaccaccatgcccagctaattgttgtatgtttagtagagacagggtttcaccatgttggccaggctgggctcgaactcctggacctcaagtgatctacccgccttggcctcccaaagtgctggcattacaggtgtgagccaccgtgcccggccaccagaatcctttggtatagccaagccttttggttaccgcctcatgaagaatatgcttcccgcattgtcctagtcccagttgtattctcacaggtgttatgtgcaggacacaatccaaatcataaacctggctcatgcccaacacatttctgctaatagggagagggacccaccacacacccacacatgccagaggtccctcctcacagaggagagggcctgtgtctgtagaaggttaaagctgacaacatgtgaaacatcccagaattatgactcttcccaagtttaaaatacattctcctcatgagagcagaaggtttgttgctgtgttgtgaatgatgagctgcctccatagggaacccactgccacctgggccagcttctggagcatgagaacctgagccagggtcacccttgtggggcctggacatgacgcacgctggctgcgactaggagcagggctgcctcttctccctccccaaggtctgcttgtgggcacgctctgttccctcaggtgccattctcccagggcttaggcgcccataaatgttctttctgtggtggagtagggcctcctgcttccatactgtcgcatgggctagatctcaggtgtggtgttgagccaccttaagatgagggctgcttcgcagtaaagtttccagcctgggcccctcttgggccttctggctggggaccctcagcctcctgatgctgttgcagggcaggtctgagagggtgcccagcagcacccggtgtcagggccaccttgttttccatttttgaacagcgctccctgtggtttgtgcccactgctcaatacagcctccgatcctcactcttgaaagctccatgataagcacagagatgggcagtgtgggtcagaaggtgggccgcttcctgtggaagagggaagtgtaggtgaatagatatcaaaacccctgatgtcattcttttgaggggttggattttcttttttctggcagacatttcagtacattcacatttctctcacatttgctgaatgtgagatcagaataaaggagatcggcgtttatttcgtaccttctgt

SEQ ID NO: 25006 - protein, 124 aa, Homo sapiens; identical to SEQ ID NO: 24994

SEQ ID NO: 25007 - DNA, 2618 bp, Homo sapiens
gatcgtgttgtggcggaaggaggagctttctgggagtagccggtgctgagagaaccgtggctggcaaagatgattcaggcgattctggttttcaacaaccatgggaagccacggctagtccgcttctaccagcgtttcccagaagaaattcaacagcagattgttcgagagactttccatctagtcctcaagcgggatgacaacatctgtaacttcttggagggtggaagtttgattggtggctctgactacaaactgatctaccggcactatgctaccctctactttgtattttgtgtggattcctcagagagtgaacttggaatcttggacctcatccaggtttttgtggaaactctggataagtgtttcgaaaatgtgtgtgaattggatttgatcttccatatggataaggtgcactacatcctccaggaggtggtgatgggtgggatggtgttggaaacaaacatgaatgaaatcgtggctcagattgaggctcaaaacaggctggagaaatccgagggtggcctttcagcagcccctgcgcgggctgtgtctgctgtgaaaaacatcaacctgccagagattcctcggaacatcaacattggcgatctcaacatcaaagttcccaacctgtcccagtttgtctgaggatcaagtattggcctgaaatagagtccttaagacaagcaaagacaagcaaggcaagcacgtctggaaacagaacccattttgagccttagaagagtcaagcctcaggacctggaaactttgtgtctggggaagactgtttggcatggaatagggaagggattcctattgacactgctcgggtgcacccagttctcacatgtgcagtcatgccgttctctgatgcatacggccactgcagatgtgaggggccctgccttcctcagtagggagtcaacatgcccaagtcatttgcacctttacctctcacatggatgctcccaagggttagggactgcattgagcaggcccacctgcttcccagaacctcctcactagggctgagcaccttctctgagtagagtcttcatccttagcaccacagacttctgaggtcctgtgccctttacttgctggtgaggtgtcataggtagaaaagggctggcccttcagatctgggggtgtggtgagtggcaagtaagggcagaattttaggagaaccagagtcacccgctggctctactgagattgttacacccagaatccttttgtgtttttttgtggttttttttttttgaggtggagtcttgctctgtcacccaggctggagtgctgtggtgcaatctcggctcactgcaacctctgcttcccgggttcaagcatttctcctgtctcagcctccccagtagctgggattacaggcacccaccaccatgcccagctaattgttgtatgtttagtagagacagggtttcaccatgttggccaggctgggctcgaactcctggacctcaagtgatctacccgccttggcctcccaaagtgctggcattacaggtgtgagccaccgtgcccggccaccagaatcctttggtatagccaagccttttggttaccgcctcatgaagaatatgcttcccgcattgtcctagtcccagttgtattctcacaggtgttatgtgcaggacacaatccaaatcataaacctggctcatgcccaacacatttctgctaatagggagagggacccaccacacacccacacatgccagaggtccctcctcacagaggagagggcctgtgtctgtagaaggttaaagctgacaacatgtgaaacatcccagaattatgactcttcccaagtttaaaatacattctcctcatgagagcagaaggtttgttgctgtgttgtgaatgatgagctgcctccatagggaacccactgccacctgggccagcttctggagcatgagaacctgagccagggtcacccttgtggggcctggacatgacgcacgctggctgcgactaggagcagggctgcctcttctccctccccaaggtctgcttgtgggcacgctctgttccctcaggtgccattctcccagggcttaggcgcccataaatgttctttctgtggtggagtagggcctcctgcttccatactgtcgcatgggctagatctcaggtgtggtgttgagccaccttaagatgagggctgcttcgcagtaaagtttccagcctgggcccctcttgggccttctggctggggaccctcagcctcctgatgctgttgcagggcaggtctgagagggtgcccagcagcacccggtgtcagggccaccttgttttccatttttgaacagcgctccctgtggtttgtgcccactgctcaatacagcctccgatcctcactcttgaaagctccatgataagcacagagatgggcagtgtgggtcagaaggtgggccgcttcctgtggaagagggaagtgtaggtgaatagatatcaaaacccctgatgtcattcttttgaggggttggattttcttttttctggcagacatttcagtacattcacatttctctcacatttgctgaatgtgagatcagaataaaggagatcggcgtttatttcgtaccttctgt

SEQ ID NO: 25008 - protein, 193 aa, Homo sapiens; identical to SEQ ID NO: 3327

SEQ ID NO: 25009 - DNA, 2244 bp, Homo sapiens
tatgtcagatgaaactcatcctggttgtaattatttttaggttgaattaccattggatttgccaagtactgaaaaatcagtagcacttttgtttaaactctgttaataaacacttctgagtgaattttgctagtgtcattatttcccatgcttgctgagtagaaggttgaattattattacttcataattcatatttgttcaatgcacactgtgtgaagctgagtttaggcctctcgaagacttagcctctttctttctgttcctgtggttttgaataccatttacatgactcacgtctcagattttctttccctaccagcctccctgtgttggtttgtgactttatctgtcagtgttctctcaggtatttacttagatttctgcaggcatcctcaaggtcagcgcatcagccaacttctgttgtttaacagaacccttctttgtgccctgactctatctccagttctttaggtacatgagttcagtgttgattcttgactgcttgctcccacacccatgcttggcagcctccaactttcttaagtcccatctatctccaatcagagaaatgttagccatctttcatggtcaacttcatattcagtggacaaggtctgaactgactagcaggactaacacgggcagctgttcgctcatccattgctcacttacacttgagtcattttgcttaccaaagaacccagtgtgtcctgggcaccaggctaggtgctttacacacatttatctcatccagtcctcactgcaatcctggaaggaggctgaagcactttaaaggtgcactacatcctccaggaggtggtgatgggtgggatggtgttggaaacaaacatgaatgaaatcgtggctcagattgaggctcaaaacaggctggagaaatccgagggtggcctttcagcagcccctgcgcgggctgtgtctgctgtgaaaaacatcaacctgccagagattcctcggaacatcaacattggcgatctcaacatcaaagttcccaacctgtcccagtttgtctgaggatcaagtattggcctgaaatagagtccttaagacaagcaaagacaagcaaggcaagcacgtctggaaacagaacccattttgagccttagaagagtcaagcctcaggacctggaaactttgtgtctggggaagactgtttggcatggaatagggaagggattcctattgacactgctcgggtgcacccagttctcacatgtgcagtcatgccgttctctgatgcatacggccactgcagatgtgaggggccctgccttcctcagtagggagtcaacatgcccaagtcatttgcacctttacctctcacatggatgctcccaagggttagggactgcattgagcaggcccacctgcttcccagaacctcctcactagggctgagcaccttctctgagtagagtcttcatccttagcaccacagacttctgaggtcctgtgccctttacttgctggtgaggtgtcataggtagaaaagggctggcccttcagatctgggggtgtggtgagtggcaagtaagggcagaattttaggagaaccagagtcacccgctggctctactgagattgttacacccagaatccttttgtgtttttttgtggttttttttttttgaggtggagtcttgctctgtcacccaggctggagtgctgtggtgcaatctcggctcactgcaacctctgcttcccgggttcaagcatttctcctgtctcagcctccccagtagctgggattacaggcacccaccaccatgcccagctaattgttgtatgtttagtagagacagggtttcaccatgttggccaggctgggctcgaactcctggacctcaagtgatctacccgccttggcctcccaaagtgctggcattacaggtgtgagccaccgtgcccggccaccagaatcctttggtatagccaagccttttggttaccgcctcatgaagaatatgcttcccgcattgtcctagtcccagttgtattctcacaggtgttatgtgcaggacacaatccaaatcataaacctggctcatgcccaacacatttctgctaatagggagagggacccaccacacacccacacatgccagaggtccctcctcacagaggagagggcctgtgtctgtagaaggttaaagctgacaacatgtgaaacatcccagaattatgactcttcccaagtttaaaatacattctcctcatgagagcag

SEQ ID NO: 25010 - protein, 105 aa, Homo sapiens; identical to SEQ ID NO: 24990

SEQ ID NO: 25011 - DNA, 1874 bp, Homo sapiens
gctttctgggagtagccggtgctgagagaaccgtggctggcaaagatgattcaggcgattctggttttcaacaaccatgggaagccacggctagtccgcttctaccagcgtttcccagaagaaattcaacagcagattgttcgagagactttccatctagtcctcaagcgggatgacaacatctgtaacttcttggagggtggaagtttgattggtggctctgactacaaactgatctaccggcactatgctaccctctactttgtattttgtgtggattcctcagagagtgaacttggaatcttggacctcatccaggtacatctggaagttgttttcttcatagctcccaaggtttttgtggaaactctggataagtgtttcgaaaatgtgtgtgaattggatttgatcttccatatggataaggtgcactacatcctccaggaggtggtgatgggtgggatggtgttggaaacaaacatgaatgaaatcgtggctcagattgaggctcaaaacaggctggagaaatccgagggtggcctttcagcagcccctgcgcgggctgtgtctgctgtgaaaaacatcaacctgccagagattcctcggaacatcaacattggcgatctcaacatcaaagttcccaacctgtcccagtttgtctgaggatcaagtattggcctgaaatagagtccttaagacaagcaaagacaagcaaggcaagcacgtctggaaacagaacccattttgagccttagaagagtcaagcctcaggacctggaaactttgtgtctggggaagactgtttggcatggaatagggaagggattcctattgacactgctcgggtgcacccagttctcacatgtgcagtcatgccgttctctgatgcatacggccactgcagatgtgaggggccctgccttcctcagtagggagtcaacatgcccaagtcatttgcacctttacctctcacatggatgctcccaagggttagggactgcattgagcaggcccacctgcttcccagaacctcctcactagggctgagcaccttctctgagtagagtcttcatccttagcaccacagacttctgaggtcctgtgccctttacttgctggtgaggtgtcataggtagaaaagggctggcccttcagatctgggggtgtggtgagtggcaagtaagggcagaattttaggagaaccagagtcacccgctggctctactgagattgttacacccagaatccttttgtgtttttttgtggttttttttttttgaggtggagtcttgctctgtcacccaggctggagtgctgtggtgcaatctcggctcactgcaacctctgcttcccgggttcaagcatttctcctgtctcagcctccccagtagctgggattacaggcacccaccaccatgcccagctaattgttgtatgtttagtagagacagggtttcaccatgttggccaggctgggctcgaactcctggacctcaagtgatctacccgccttggcctcccaaagtgctggcattacaggtgtgagccaccgtgcccggccaccagaatcctttggtatagccaagccttttggttaccgcctcatgaagaatatgcttcccgcattgtcctagtcccagttgtattctcacaggtgttatgtgcaggacacaatccaaatcataaacctggctcatgcccaacacatttctgctaatagggagagggacccaccacacacccacacatgccagaggtccctcctcacagaggagagggcctgtgtctgtagaaggttaaagctgacaacatgtgaaacatcccagaattatgactcttcccaagtttaaaatacattctcctcatgagagcag

SEQ ID NO: 25012 - protein, 205 aa, Homo sapiens; identical to SEQ ID NO: 24992

SEQ ID NO: 25013 - DNA, 1957 bp, Homo sapiens
gctttctgggagtagccggtgctgagagaaccgtggctggcaaagatgattcaggcgattctggttttcaacaaccatgggaagccacggctagtccgcttctaccagcgtttcccagaagaaattcaacagcagattgttcgagagactttccatctagtcctcaagcgggatgacaacatctgtaacttcttggagggtggaagtttgattggtggctctgactacaaactgatctaccggcactatgctaccctctactttgtattttgtgtggattcctcagagagtgaacttggaatcttggacctcatccagcttaaaaaaagagagaggaagaaaagccagtgcaacaccctacaaactggaacactagctctttgggaacaaggacctgacatcagaacaagaaggctataagttcccaaaccttaaaagtttttgtggaaactctggataagtgtttcgaaaatgtgtgtgaattggatttgatcttccatatggataaggtgcactacatcctccaggaggtggtgatgggtgggatggtgttggaaacaaacatgaatgaaatcgtggctcagattgaggctcaaaacaggctggagaaatccgagggtggcctttcagcagcccctgcgcgggctgtgtctgctgtgaaaaacatcaacctgccagagattcctcggaacatcaacattggcgatctcaacatcaaagttcccaacctgtcccagtttgtctgaggatcaagtattggcctgaaatagagtccttaagacaagcaaagacaagcaaggcaagcacgtctggaaacagaacccattttgagccttagaagagtcaagcctcaggacctggaaactttgtgtctggggaagactgtttggcatggaatagggaagggattcctattgacactgctcgggtgcacccagttctcacatgtgcagtcatgccgttctctgatgcatacggccactgcagatgtgaggggccctgccttcctcagtagggagtcaacatgcccaagtcatttgcacctttacctctcacatggatgctcccaagggttagggactgcattgagcaggcccacctgcttcccagaacctcctcactagggctgagcaccttctctgagtagagtcttcatccttagcaccacagacttctgaggtcctgtgccctttacttgctggtgaggtgtcataggtagaaaagggctggcccttcagatctgggggtgtggtgagtggcaagtaagggcagaattttaggagaaccagagtcacccgctggctctactgagattgttacacccagaatccttttgtgtttttttgtggttttttttttttgaggtggagtcttgctctgtcacccaggctggagtgctgtggtgcaatctcggctcactgcaacctctgcttcccgggttcaagcatttctcctgtctcagcctccccagtagctgggattacaggcacccaccaccatgcccagctaattgttgtatgtttagtagagacagggtttcaccatgttggccaggctgggctcgaactcctggacctcaagtgatctacccgccttggcctcccaaagtgctggcattacaggtgtgagccaccgtgcccggccaccagaatcctttggtatagccaagccttttggttaccgcctcatgaagaatatgcttcccgcattgtcctagtcccagttgtattctcacaggtgttatgtgcaggacacaatccaaatcataaacctggctcatgcccaacacatttctgctaatagggagagggacccaccacacacccacacatgccagaggtccctcctcacagaggagagggcctgtgtctgtagaaggttaaagctgacaacatgtgaaacatcccagaattatgactcttcccaagtttaaaatacattctcctcatgagagcag

SEQ ID NO: 25014 - protein, 124 aa, Homo sapiens; identical to SEQ ID NO: 24994

SEQ ID NO: 25015 - DNA, 1862 bp, Homo sapiens
gatcgtgttgtggcggaaggaggagctttctgggagtagccggtgctgagagaaccgtggctggcaaagatgattcaggcgattctggttttcaacaaccatgggaagccacggctagtccgcttctaccagcgtttcccagaagaaattcaacagcagattgttcgagagactttccatctagtcctcaagcgggatgacaacatctgtaacttcttggagggtggaagtttgattggtggctctgactacaaactgatctaccggcactatgctaccctctactttgtattttgtgtggattcctcagagagtgaacttggaatcttggacctcatccaggtttttgtggaaactctggataagtgtttcgaaaatgtgtgtgaattggatttgatcttccatatggataaggtgcactacatcctccaggaggtggtgatgggtgggatggtgttggaaacaaacatgaatgaaatcgtggctcagattgaggctcaaaacaggctggagaaatccgagggtggcctttcagcagcccctgcgcgggctgtgtctgctgtgaaaaacatcaacctgccagagattcctcggaacatcaacattggcgatctcaacatcaaagttcccaacctgtcccagtttgtctgaggatcaagtattggcctgaaatagagtccttaagacaagcaaagacaagcaaggcaagcacgtctggaaacagaacccattttgagccttagaagagtcaagcctcaggacctggaaactttgtgtctggggaagactgtttggcatggaatagggaagggattcctattgacactgctcgggtgcacccagttctcacatgtgcagtcatgccgttctctgatgcatacggccactgcagatgtgaggggccctgccttcctcagtagggagtcaacatgcccaagtcatttgcacctttacctctcacatggatgctcccaagggttagggactgcattgagcaggcccacctgcttcccagaacctcctcactagggctgagcaccttctctgagtagagtcttcatccttagcaccacagacttctgaggtcctgtgccctttacttgctggtgaggtgtcataggtagaaaagggctggcccttcagatctgggggtgtggtgagtggcaagtaagggcagaattttaggagaaccagagtcacccgctggctctactgagattgttacacccagaatccttttgtgtttttttgtggttttttttttttgaggtggagtcttgctctgtcacccaggctggagtgctgtggtgcaatctcggctcactgcaacctctgcttcccgggttcaagcatttctcctgtctcagcctccccagtagctgggattacaggcacccaccaccatgcccagctaattgttgtatgtttagtagagacagggtttcaccatgttggccaggctgggctcgaactcctggacctcaagtgatctacccgccttggcctcccaaagtgctggcattacaggtgtgagccaccgtgcccggccaccagaatcctttggtatagccaagccttttggttaccgcctcatgaagaatatgcttcccgcattgtcctagtcccagttgtattctcacaggtgttatgtgcaggacacaatccaaatcataaacctggctcatgcccaacacatttctgctaatagggagagggacccaccacacacccacacatgccagaggtccctcctcacagaggagagggcctgtgtctgtagaaggttaaagctgacaacatgtgaaacatcccagaattatgactcttcccaagtttaaaatacattctcctcatgagagcag

SEQ ID NO: 25016 - protein, 193 aa, Homo sapiens; identical to SEQ ID NO: 3327

SEQ ID NO: 25017 - DNA, 2516 bp, Homo sapiens
gccattcccggatccgccggctgggaatcgcgggtccccgcgcgtcctgcagcacttcccgcgccgcgcccccagcccagtgcgccggctctgtgccggggtgcccgggcggtcgggagaatgagccgcatctaccacgacggcgcgctccggaacaaggcggtgcagagcgtccggctgccaggggcctgggaccccgccgcccaccaggggggaaatggtgtcctgctggagggagaactgatcgatgtatctcggcacagcatcttggacactcatggcaggaaggagcgctactacgtgctgtatatccggcccagtcacatccatcgccgtaaattcgacgccaagggaaatgaaatcgagcccaacttcagcgccaccaggaaggtgaacacgggcttcctcatgtcgtcctacaaggtggaagccaagggggacactgacaggctcacgcccgaggcgctgaaggggctggtcaacaagccagagctgctcgcgctgacagagagcctcacccccgaccacacagtggcgttctggatgcccgagtcagagatggaggtgatggaactcgagctgggggccggggtacggctgaagactcggggcgatggtcccttcctggattcattggccaaacttgaggctggaacagtgaccaagtgtaatttcactggtgatggaaagacaggggcatcctggacagacaacatcatggcccaaaagtgttcgaagggggctgcagcggagatccgagagcagggggatggggcagaggacgaggagtggccagaagaaattcaacagcagattgttcgagagactttccatctagtcctcaagcgggatgacaacatctgtaacttcttggagggtggaagtttgattggtggctctgactacaaactgatctaccggcactatgctaccctctactttgtattttgtgtggattcctcagagagtgaacttggaatcttggacctcatccaggtttttgtggaaactctggataagtgtttcgaaaatgtgtgtgaattggatttgatcttccatatggataaggtgcactacatcctccaggaggtggtgatgggtgggatggtgttggaaacaaacatgaatgaaatcgtggctcagattgaggctcaaaacaggctggagaaatccgagggtggcctttcagcagcccctgcgcgggctgtgtctgctgtgaaaaacatcaacctgccagagattcctcggaacatcaacattggcgatctcaacatcaaagttcccaacctgtcccagtttgtctgaggatcaagtattggcctgaaatagagtccttaagacaagcaaagacaagcaaggcaagcacgtctggaaacagaacccattttgagccttagaagagtcaagcctcaggacctggaaactttgtgtctggggaagactgtttggcatggaatagggaagggattcctattgacactgctcgggtgcacccagttctcacatgtgcagtcatgccgttctctgatgcatacggccactgcagatgtgaggggccctgccttcctcagtagggagtcaacatgcccaagtcatttgcacctttacctctcacatggatgctcccaagggttagggactgcattgagcaggcccacctgcttcccagaacctcctcactagggctgagcaccttctctgagtagagtcttcatccttagcaccacagacttctgaggtcctgtgccctttacttgctggtgaggtgtcataggtagaaaagggctggcccttcagatctgggggtgtggtgagtggcaagtaagggcagaattttaggagaaccagagtcacccgctggctctactgagattgttacacccagaatccttttgtgtttttttgtggttttttttttttgaggtggagtcttgctctgtcacccaggctggagtgctgtggtgcaatctcggctcactgcaacctctgcttcccgggttcaagcatttctcctgtctcagcctccccagtagctgggattacaggcacccaccaccatgcccagctaattgttgtatgtttagtagagacagggtttcaccatgttggccaggctgggctcgaactcctggacctcaagtgatctacccgccttggcctcccaaagtgctggcattacaggtgtgagccaccgtgcccggccaccagaatcctttggtatagccaagccttttggttaccgcctcatgaagaatatgcttcccgcattgtcctagtcccagttgtattctcacaggtgttatgtgcaggacacaatccaaatcataaacctggctcatgcccaacacatttctgctaatagggagagggacccaccacacacccacacatgccagaggtccctcctcacagaggagagggcctgtgtctgtagaaggttaaagctgacaacatgtgaaacatcccagaattatgactcttcccaagtttaaaatacattctcctcatgagagcag

SEQ ID NO: 25018 - protein, 394 aa, Homo sapiens
MSRIYHDGALRNKAVQSVRLPGAWDPAAHQGGNGVLLEGELIDVSRHSILDTHGRKERYYVLYIRPSHIHRRKFDAKGNEIEPNFSATRKVNTGFLMSSYKVEAKGDTDRLTPEALKGLVNKPELLALTESLTPDHTVAFWMPESEMEVMELELGAGVRLKTRGDGPFLDSLAKLEAGTVTKCNFTGDGKTGASWTDNIMAQKCSKGAAAEIREQGDGAEDEEWPEEIQQQIVRETFHLVLKRDDNICNFLEGGSLIGGSDYKLIYRHYATLYFVFCVDSSESELGILDLIQVFVETLDKCFENVCELDLIFHMDKVHYILQEVVMGGMVLETNMNEIVAQIEAQNRLEKSEGGLSAAPARAVSAVKNINLPEIPRNINIGDLNIKVPNLSQFV

SEQ ID NO: 25019 - DNA, 628 bp, Homo sapiens
agctttctgggagtagccggtgctgagagaaccgtggctggcaaagatgattcaggcgattctggttttcaacaaccatgggaagccacggctagtccgcttctaccagcgtttcccagaagaaattcaacagcagattgttcgagagactttccatctagtcctcaagcgggatgacaacatctgtaacttcttggagggtggaagtttgattggtggctctgactacaaactgatctaccggcactatgctaccctctactttgtattttgtgtggattcctcagagagtgaacttggaatcttggacctcatccaggtttttgtggaaactctggataagtgtttcgaaaatgtgtgtgaattggatttgatcttccatatggataagtgcaattcctgggtcataggtgaggcctctagaaggaagaaacaggcctctagaaggaagcacaaaagcaccagcagggctgcagcactggcaaaagaagtctgaggctcaaggcctctggactgtagaccatagtatctgccactttgttagataatgccagagtgattgtatccatttatacttctaccaatcgggggtgagtgttcccagtgctctgtatgctcaccaaaggtt

SEQ ID NO: 25020 - protein, 149 aa, Homo sapiens
MIQAILVFNNHGKPRLVRFYQRFPEEIQQQIVRETFHLVLKRDDNICNFLEGGSLIGGSDYKLIYRHYATLYFVFCVDSSESELGILDLIQVFVETLDKCFENVCELDLIFHMDKCNSWVIGEASRRKKQASRRKHKSTSRAAALAKEV

SEQ ID NO: 25021 - DNA, 1642 bp, Homo sapiens
gagtgagaagatctgatctgtgtttcaaaggtcacttgactgccgagcagctggaggcgagttgctcctttaggagactgctgcagttgcctgggtgagaggctagaggggtctggtctatagcagtggcaggggagatggaaagaagagaatgatttgaggggcattcggggggcaaaatcaacaggacctggggggagacgaagggatcaagaatgatgcccagattctgggtgagtggcagtgctgtggtgcacaagtagtgatgttatgtttccgggtgacctgctgtttagcaggagcccagcctgtggctaagaagtatagagaactgaaactagctccctagggatgggaaaaccaagtgggctgaggataagaacagggccccagggctgggtgcagtcgctcacgcctcctcccaaattgctgggattacaggcgtgagccaccacgcccacctgtaaccattatttttaagattgctaccattggatagttctgtcatggtccaacttttggatatttaaaattgatccctgtgtggctaacagaattaatgtttccaaaaatgttgaaaattatatagttctcttaattccccacctctaactatatttttgggttatttctttaggaacagatgcccaggagtcatattactgagaatctagaaatcttttgcaaagttcttgttatattgccaaattgcttcccaaaagggttgttctaaaccataatttcaccagcaatgtaggggagaaccatttttatgctgcccttgtgagaattgggtatgaaaacatttttaaaatgatttttgatgaggtgaaaataatatttgaatatattttaatttgcctttcccccacttatagtgagcttaaacattttttccttttcctagctgtatttctccctttgttattcgttctttcgtccatttatctactggggagatggggagtgttatctttttagtttatcagttatttgcattttaaatataaccatttgccatattttaacaacgatttttccattaaataattctttttataaaaaaactttatatatctgttgatgttttgtgatttttattgcttctaagctaatacagatttttggatcttattcaatttcgctttcttctgtttaggttattatctggttttatacctaactacttattttcaaattgctaaccagttatcctaatagtatttactgaattccttcccactcctacatcacatattaaaattattttatgcctaaattatttataatatttcagttattcttcctataattacaatttgaaccatcaaagtaggttttcatagttggcagagctagttcttcttcataattctgtttcagaattttctttgatattcttcctcaacattttaaacattttgtcaagtttcagtgcaactgacttttggtttttatttatttaaaaactgggccatgccgggcgcagtggctcacgcctgtaatcccagcacttcgggagactgagatgggtgaatcacttgaggtcaggagtttgagaccagactggccaatgtggtgaaaccccatctctactaaaaatacaaaaatttgctgggcatggtggcatgtgcctgtaatc

SEQ ID NO: 25022 - protein, 31 aa, Homo sapiens
MGKPSGLRIRTGPQGWVQSLTPPPKLLGLQA

SEQ ID NO: 25023 - DNA, 3936 bp, Homo sapiens
aacaggatcgggtgggggggtgggatgcgggtgggggaaaactggggttgccaaagccgcctctccgccttcagtccgcccctccagtccgccgctcccggcgcccctgccgccgcgcccgcccagcgaccccatgacacagatcggcttaaagctccccgcctgtccgcctgccctcgagagagggtcccgacccccagacaggtctccgaaggctgggcttcgcctcacgccgacctccggccccaccccacccgcgtaactataaactccagctacttgccgcgctgcttttgcacagactcatgccctgccccagaagggacagtggccgtgctgtggcgggaacagcgggcgggctggtccagagcagggcctgcctgggtgaggaggatttggagggccaggccctgtcgtcacagggttatgaggccgaagggaccattccatttacaactgcgctgaagaattgtgctaagtgaaataagccagatacagaaagacaaatactgtgtgatctcgtatatggaacctataaaagcgttgaaccatagaaacggcagaacagaccaggcgctgtggttcacgcctgtaatcccagcactttgggaggccgaggcgggtggatcacttgaggggaaatggtgtcctgctggagggagaactgatcgatgtatctcggcacagcatcttggacactcatggcaggaaggagcgctactacgtgctgtatatccggcccagtcacatccatcgccgtaaattcgacgccaagggaaatgaaatcgagcccaacttcagcgccaccaggaaggtgaacacgggcttcctcatgtcgtcctacaaggtggaagccaagggggacactgacaggctcacgcccgaggcgctgaaggggctggtcaacaagccagagctgctcgcgctgacagagagcctcacccccgaccacacagtggcgttctggatgcccgagtcagagatggaggtgatggaactcgagctgggggccggggtacggctgaagactcggggcgatggtcccttcctggattcattggccaaacttgaggctggaacagtgaccaagtgtaatttcactggtgatggaaagacaggggcatcctggacagacaacatcatggcccaaaagtgttcgaagggggctgcagcggagatccgagagcagggggatggggcagaggacgaggagtgggatgactgagggacgtggctgcctctgggggcaccagcaccttctgtagcattgtggaacatttcttccatgaacttctactctggagctggagagaacagtctgccaagtcttacctggttcttccccatagccaccttggaatactctttgaacaagctctgctaaaaccaaacccatgaccactgtgttggtggtggggcctcatgctgtggctcagggagggcccctccctgcatgtgagtctagccttcctagacattacatgatgaccctttaaaaaaaaattagagatggaggtctcactatgttgcccaggctgatctcaaactcctggactcaagcgatccacccccctccacctcccaaggtgttgggattacaggcgtgagccactgcacccagcctcatgttgaccctggccctggatagcagctttgtttgtagaggcaggtggtgggagagaccctaggacagcctgagagtaactggacctggtattggtgcggagtggggaatatcccttgtctaaatgcagagcagctgagagaagttagcggggctcttcctccgttctcattgtttcctgctttccttccccacccaccccttcctcagcactctgtgttgtagcctgtactatcctgcttcaagcctccgtgtcccttgtaccttccccctaccttgagttgccagttctttactccctcaaatgttcccatgccacctctggggtttctgttatctgacatccctggctgctttcctggtagatgccattcccagagaggccaacagcgttcccaggcgtggctggctggtccgcatctctcagactcactctgccaggctacagttttgagaataccttttttgttgttgttttgtacctggagaactttttatgaatgagtaaatcttcagaaaggaattcctccacccttactgggttattgtcaggtgtaaacggcctttcagctgagcaatgttcctatgagaaggaagccatttctcttggctcatgaacactgccttttgggtagtatacccacacccagatctgtgaagagacctggaattgaagtctccatgtcgtcaggacttggtggcatgtggatcttgcttgacttgggaaaagagagggtggtggtgaactaataattatggagtccccctaatgtgtcgaacacaatgctagatgatttccatgataataattactcatacttgtgctaagcacttgcgatatcgtacttctcacaacagtccatgaggtactgattattattcccattttctcatgagactaaagctcagagctctaggatagtatacagtggcaagaggaatttacatccaagcactcagatttcaaagcccacattcttaactaccggactattcatattacagagcaggaaaagggtctcagacaggttaagcaacctgcccagagtcacacagctaatgagtagcagaatcaggattcaaacccagagctgtcaaaagcaaaccttatgttccttccactgtcccctgcttccttgcccttcagaaaggtcttggaaacaggggccagaggatgtggtagccacttcactggtgttctgtgtctgaatgggactttctcacaggcaggccatgctgggacctcagccatgggggtggccagggaggtggttgagcagaaggatagctggggacactgactgggggtagagtcacccagtgtctttagacatcctgctgtctaaagcactgtgtccaaagggtatggcacacttatatggacaggtcaccattccaaacaaggaggcccagtgtgtcaataggagaggtcctaaagcaacaaaaagggcggggtgtcttggatgggcttcaggaagggaaagaccattgtgtctggagctcagagaatgggggctggtgtttgagatgaggctggagattgggcatggcatcctcacgcatgttaaggaattggggactttatccttaacatcctggaagccagtgatcccatggagagtgagaagatctgatctgtgtttcaaaggtcacttgactgccgagcagctggaggcgagttgctcctttaggagactgctgcagttgcctgggtgagaggctagaggggtctggtctatagcagtggcaggggagatggaaagaagagaatgatttgaggggcattcggggggcaaaatcaacaggacctggggggagacgaagggatcaagaatgatgcccagattctgggtgagtggcagtgctgtggtgcacaagtagtgatgttatgtttccgggtgacctgctgtttagcaggagcccagcctgtggctaagaagtatagagaactgaaactagctccctagggatgggaaaaccaagtgggctgaggataagaacagggccccagggctgggtgcagtcgctcacgcctgtaatcttagcactttgggaggccgaggtgggcggatcacttgaggtcaggagttcgaaaccagcctgatcaacacagtgaaaccccgtctctaccaaaaaatacaaaaattacccggacatggtggcacatgcctgtagttccagcgccttgggaggctgaggcatgagaatttcttgaacccgggaggtggaggttgcagtgagctgagattgccactgcactccagcctgggcaacacagtgagaccctgtctcaaaaaaaaaaaaaaaaaaaa

SEQ ID NO: 25024 - protein, 130 aa, Homo sapiens
MSSYKVEAKGDTDRLTPEALKGLVNKPELLALTESLTPDHTVAFWMPESEMEVMELELGAGVRLKTRGDGPFLDSLAKLEAGTVTKCNFTGDGKTGASWTDNIMAQKCSKGAAAEIREQGDGAEDEEWDD

SEQ ID NO: 25025 - DNA, 3512 bp, Homo sapiens
gccattcccggatccgccggctgggaatcgcgggtccccgcgcgtcctgcagcacttcccgcgccgcgcccccagcccagtgcgccggctctgtgccggggtgcccgggcggtcgggagaatgagccgcatctaccacgacggcgcgctccggaacaaggcggtgcagagcgtccggctgccaggggcctgggaccccgccgcccaccaggggggaaatggtgtcctgctggagggagaactgatcgatgtatctcggcacagcatcttggacactcatggcaggaaggagcgctactacgtgctgtatatccggcccagtcacatccatcgccgtaaattcgacgccaagggaaatgaaatcgagcccaacttcagcgccaccaggaaggtgaacacgggcttcctcatgtcgtcctacaaggtggaagccaagggggacactgacaggctcacgcccgaggcgctgaaggggctggtcaacaagccagagctgctcgcgctgacagagagcctcacccccgaccacacagtggcgttctggatgcccgagtcagagatggaggtgatggaactcgagctgggggccggggtacggctgaagactcggggcgatggtcccttcctggattcattggccaaacttgaggctggaacagtgaccaagtgtaatttcactggtgatggaaagacaggggcatcctggacagacaacatcatggcccaaaagtgttcgaagggggctgcagcggagatccgagagcagggggatggggcagaggacgaggagtgggatgactgagggacgtggctgcctctgggggcaccagcaccttctgtagcattgtggaacatttcttccatgaacttctactctggagctggagagaacagtctgccaagtcttacctggttcttccccatagccaccttggaatactctttgaacaagctctgctaaaaccaaacccatgaccactgtgttggtggtggggcctcatgctgtggctcagggagggcccctccctgcatgtgagtctagccttcctagacattacatgatgaccctttaaaaaaaaattagagatggaggtctcactatgttgcccaggctgatctcaaactcctggactcaagcgatccacccccctccacctcccaaggtgttgggattacaggcgtgagccactgcacccagcctcatgttgaccctggccctggatagcagctttgtttgtagaggcaggtggtgggagagaccctaggacagcctgagagtaactggacctggtattggtgcggagtggggaatatcccttgtctaaatgcagagcagctgagagaagttagcggggctcttcctccgttctcattgtttcctgctttccttccccacccaccccttcctcagcactctgtgttgtagcctgtactatcctgcttcaagcctccgtgtcccttgtaccttccccctaccttgagttgccagttctttactccctcaaatgttcccatgccacctctggggtttctgttatctgacatccctggctgctttcctggtagatgccattcccagagaggccaacagcgttcccaggcgtggctggctggtccgcatctctcagactcactctgccaggctacagttttgagaataccttttttgttgttgttttgtacctggagaactttttatgaatgagtaaatcttcagaaaggaattcctccacccttactgggttattgtcaggtgtaaacggcctttcagctgagcaatgttcctatgagaaggaagccatttctcttggctcatgaacactgccttttgggtagtatacccacacccagatctgtgaagagacctggaattgaagtctccatgtcgtcaggacttggtggcatgtggatcttgcttgacttgggaaaagagagggtggtggtgaactaataattatggagtccccctaatgtgtcgaacacaatgctagatgatttccatgataataattactcatacttgtgctaagcacttgcgatatcgtacttctcacaacagtccatgaggtactgattattattcccattttctcatgagactaaagctcagagctctaggatagtatacagtggcaagaggaatttacatccaagcactcagatttcaaagcccacattcttaactaccggactattcatattacagagcaggaaaagggtctcagacaggttaagcaacctgcccagagtcacacagctaatgagtagcagaatcaggattcaaacccagagctgtcaaaagcaaaccttatgttccttccactgtcccctgcttccttgcccttcagaaaggtcttggaaacaggggccagaggatgtggtagccacttcactggtgttctgtgtctgaatgggactttctcacaggcaggccatgctgggacctcagccatgggggtggccagggaggtggttgagcagaaggatagctggggacactgactgggggtagagtcacccagtgtctttagacatcctgctgtctaaagcactgtgtccaaagggtatggcacacttatatggacaggtcaccattccaaacaaggaggcccagtgtgtcaataggagaggtcctaaagcaacaaaaagggcggggtgtcttggatgggcttcaggaagggaaagaccattgtgtctggagctcagagaatgggggctggtgtttgagatgaggctggagattgggcatggcatcctcacgcatgttaaggaattggggactttatccttaacatcctggaagccagtgatcccatggagagtgagaagatctgatctgtgtttcaaaggtcacttgactgccgagcagctggaggcgagttgctcctttaggagactgctgcagttgcctgggtgagaggctagaggggtctggtctatagcagtggcaggggagatggaaagaagagaatgatttgaggggcattcggggggcaaaatcaacaggacctggggggagacgaagggatcaagaatgatgcccagattctgggtgagtggcagtgctgtggtgcacaagtagtgatgttatgtttccgggtgacctgctgtttagcaggagcccagcctgtggctaagaagtatagagaactgaaactagctccctagggatgggaaaaccaagtgggctgaggataagaacagggccccagggctgggtgcagtcgctcacgcctgtaatcttagcactttgggaggccgaggtgggcggatcacttgaggtcaggagttcgaaaccagcctgatcaacacagtgaaaccccgtctctaccaaaaaatacaaaaattacccggacatggtggcacatgcctgtagttccagcgccttgggaggctgaggcatgagaatttcttgaacccgggaggtggaggttgcagtgagctgagattgccactgcactccagcctgggcaacacagtgagaccctgtctcaaaaaaaaaaaaaaaaaaaa

SEQ ID NO: 25026 - protein, 226 aa, Homo sapiens; identical to SEQ ID NO: 3329

SEQ ID NO: 25027 - DNA, 2428 bp, Homo sapiens
aacaggatcgggtgggggggtgggatgcgggtgggggaaaactggggttgccaaagccgcctctccgccttcagtccgcccctccagtccgccgctcccggcgcccctgccgccgcgcccgcccagcgaccccatgacacagatcggcttaaagctccccgcctgtccgcctgccctcgagagagggtcccgacccccagacaggtctccgaaggctgggcttcgcctcacgccgacctccggccccaccccacccgcgtaactataaactccagctacttgccgcgctgcttttgcacagactcatgccctgccccagaagggacagtggccgtgctgtggcgggaacagcgggcgggctggtccagagcagggcctgcctgggtgaggaggatttggagggccaggccctgtcgtcacagggttatgaggccgaagggaccattccatttacaactgcgctgaagaattgtgctaagtgaaataagccagatacagaaagacaaatactgtgtgatctcgtatatggaacctataaaagcgttgaaccatagaaacggcagaacagaccaggcgctgtggttcacgcctgtaatcccagcactttgggaggccgaggcgggtggatcacttgaggggaaatggtgtcctgctggagggagaactgatcgatgtatctcggcacagcatcttggacactcatggcaggaaggagcgctactacgtgctgtatatccggcccagtcacatccatcgccgtaaattcgacgccaagggaaatgaaatcgagcccaacttcagcgccaccaggaaggtgaacacgggcttcctcatgtcgtcctacaaggtggaagccaagggggacactgacaggctcacgcccgaggcgctgaaggggctggtcaacaagccagagctgctcgcgctgacagagagcctcacccccgaccacacagtggcgttctggatgcccgagtcagagatggaggtgatggaactcgagctgggggccggggtacggctgaagactcggggcgatggtcccttcctggattcattggccaaacttgaggctggaacagtgaccaagtgtaatttcactggtgatggaaagacaggggcatcctggacagacaacatcatggcccaaaagtgttcgaagggggctgcagcggagatccgagagcagggggatggggcagaggacgaggagtgggatgactgagggacgtggctgcctctgggggcaccagcaccttctgtagcattgtggaacatttcttccatgaacttctactctggagctggagagaacagtctgccaagtcttacctggttcttccccatagccaccttggaatactctttgaacaagctctgctaaaaccaaacccatgaccactgtgttggtggtggggcctcatgctgtggctcagggagggcccctccctgcatgtgagtctagccttcctagacattacatgatgaccctttaaaaaaaaattagagatggaggtctcactatgttgcccaggctgatctcaaactcctggactcaagcgatccacccccctccacctcccaaggtgttgggattacaggcgtgagccactgcacccagcctcatgttgaccctggccctggatagcagctttgtttgtagaggcaggtggtgggagagaccctaggacagcctgagagtaactggacctggtattggtgcggagtggggaatatcccttgtctaaatgcagagcagctgagagaagttagcggggctcttcctccgttctcattgtttcctgctttccttccccacccaccccttcctcagcactctgtgttgtagcctgtactatcctgcttcaagcctccgtgtcccttgtaccttccccctaccttgagttgccagttctttactccctcaaatgttcccatgccacctctggggtttctgttatctgacatccctggctgctttcctggtagatgccattcccagagaggccaacagcgttcccaggcgtggctggctggtccgcatctctcagactcactctgccaggctacagttttgagaataccttttttgttgttgttttgtacctggagaactttttatgaatgagtaaatcttcagaaaggaattcctccacccttactgggttattgtcaggtgtaaacggcctttcagctgagcaatgttcctatgagaaggaagccatttctcttggctcatgaacactgccttttgggtagtatacccacacccagatctgtgaagagacctggaattgaagtctccatgtcgtcaggacttggtggcatgtggatcttgcttgacttgggaaaagagagggtggtggtgaactaataattatggagtccccctaatgtgtcgaacacaatgctagatgatttccatgat

SEQ ID NO: 25028 - protein, 130 aa, Homo sapiens; identical to SEQ ID NO: 25024

SEQ ID NO: 25029 - DNA, 2004 bp, Homo sapiens
gccattcccggatccgccggctgggaatcgcgggtccccgcgcgtcctgcagcacttcccgcgccgcgcccccagcccagtgcgccggctctgtgccggggtgcccgggcggtcgggagaatgagccgcatctaccacgacggcgcgctccggaacaaggcggtgcagagcgtccggctgccaggggcctgggaccccgccgcccaccaggggggaaatggtgtcctgctggagggagaactgatcgatgtatctcggcacagcatcttggacactcatggcaggaaggagcgctactacgtgctgtatatccggcccagtcacatccatcgccgtaaattcgacgccaagggaaatgaaatcgagcccaacttcagcgccaccaggaaggtgaacacgggcttcctcatgtcgtcctacaaggtggaagccaagggggacactgacaggctcacgcccgaggcgctgaaggggctggtcaacaagccagagctgctcgcgctgacagagagcctcacccccgaccacacagtggcgttctggatgcccgagtcagagatggaggtgatggaactcgagctgggggccggggtacggctgaagactcggggcgatggtcccttcctggattcattggccaaacttgaggctggaacagtgaccaagtgtaatttcactggtgatggaaagacaggggcatcctggacagacaacatcatggcccaaaagtgttcgaagggggctgcagcggagatccgagagcagggggatggggcagaggacgaggagtgggatgactgagggacgtggctgcctctgggggcaccagcaccttctgtagcattgtggaacatttcttccatgaacttctactctggagctggagagaacagtctgccaagtcttacctggttcttccccatagccaccttggaatactctttgaacaagctctgctaaaaccaaacccatgaccactgtgttggtggtggggcctcatgctgtggctcagggagggcccctccctgcatgtgagtctagccttcctagacattacatgatgaccctttaaaaaaaaattagagatggaggtctcactatgttgcccaggctgatctcaaactcctggactcaagcgatccacccccctccacctcccaaggtgttgggattacaggcgtgagccactgcacccagcctcatgttgaccctggccctggatagcagctttgtttgtagaggcaggtggtgggagagaccctaggacagcctgagagtaactggacctggtattggtgcggagtggggaatatcccttgtctaaatgcagagcagctgagagaagttagcggggctcttcctccgttctcattgtttcctgctttccttccccacccaccccttcctcagcactctgtgttgtagcctgtactatcctgcttcaagcctccgtgtcccttgtaccttccccctaccttgagttgccagttctttactccctcaaatgttcccatgccacctctggggtttctgttatctgacatccctggctgctttcctggtagatgccattcccagagaggccaacagcgttcccaggcgtggctggctggtccgcatctctcagactcactctgccaggctacagttttgagaataccttttttgttgttgttttgtacctggagaactttttatgaatgagtaaatcttcagaaaggaattcctccacccttactgggttattgtcaggtgtaaacggcctttcagctgagcaatgttcctatgagaaggaagccatttctcttggctcatgaacactgccttttgggtagtatacccacacccagatctgtgaagagacctggaattgaagtctccatgtcgtcaggacttggtggcatgtggatcttgcttgacttgggaaaagagagggtggtggtgaactaataattatggagtccccctaatgtgtcgaacacaatgctagatgatttccatgat

SEQ ID NO: 25030 - protein, 226 aa, Homo sapiens; identical to SEQ ID NO: 3329

SEQ ID NO: 25031 - DNA, 2145 bp, Homo sapiens
aacaggatcgggtgggggggtgggatgcgggtgggggaaaactggggttgccaaagccgcctctccgccttcagtccgcccctccagtccgccgctcccggcgcccctgccgccgcgcccgcccagcgaccccatgacacagatcggcttaaagctccccgcctgtccgcctgccctcgagagagggtcccgacccccagacaggtctccgaaggctgggcttcgcctcacgccgacctccggccccaccccacccgcgtaactataaactccagctacttgccgcgctgcttttgcacagactcatgccctgccccagaagggacagtggccgtgctgtggcgggaacagcgggcgggctggtccagagcagggcctgcctgggtgaggaggatttggagggccaggccctgtcgtcacagggttatgaggccgaagggaccattccatttacaactgcgctgaagaattgtgctaagtgaaataagccagatacagaaagacaaatactgtgtgatctcgtatatggaacctataaaagcgttgaaccatagaaacggcagaacagaccaggcgctgtggttcacgcctgtaatcccagcactttgggaggccgaggcgggtggatcacttgaggggaaatggtgtcctgctggagggagaactgatcgatgtatctcggcacagcatcttggacactcatggcaggaaggagcgctactacgtgctgtatatccggcccagtcacatccatcgccgtaaattcgacgccaagggaaatgaaatcgagcccaacttcagcgccaccaggaaggtgaacacgggcttcctcatgtcgtcctacaaggtggaagccaagggggacactgacaggctcacgcccgaggcgctgaaggggctggtcaacaagccagagctgctcgcgctgacagagagcctcacccccgaccacacagtggcgttctggatgcccgagtcagagatggaggtgatggaactcgagctgggggccggggtacggctgaagactcggggcgatggtcccttcctggattcattggccaaacttgaggctggaacagtgaccaagtgtaatttcactggtgatggaaagacaggggcatcctggacagacaacatcatggcccaaaagtgttcgaagggggctgcagcggagatccgagagcagggggatggggcagaggacgaggagtgggatgactgagggacgtggctgcctctgggggcaccagcaccttctgtagcattgtggaacatttcttccatgaacttctactctggagctggagagaacagtctgccaagtcttacctggttcttccccatagccaccttggaatactctttgaacaagctctgctaaaaccaaacccatgaccactgtgttggtggtggggcctcatgctgtggctcagggagggcccctccctgcatgtgagtctagccttcctagacattacatgatgaccctttaaaaaaaaattagagatggaggtctcactatgttgcccaggctgatctcaaactcctggactcaagcgatccacccccctccacctcccaaggtgttgggattacaggcgtgagccactgcacccagcctcatgttgaccctggccctggatagcagctttgtttgtagaggcaggtggtgggagagaccctaggacagcctgagagtaactggacctggtattggtgcggagtggggaatatcccttgtctaaatgcagagcagctgagagaagttagcggggctcttcctccgttctcattgtttcctgctttccttccccacccaccccttcctcagcactctgtgttgtagcctgtactatcctgcttcaagcctccgtgtcccttgtaccttccccctaccttgagttgccagttctttactccctcaaatgttcccatgccacctctggggtttctgttatctgacatccctggctgctttcctggtagatgccattcccagagaggccaacagcgttcccaggcgtggctggctggtccgcatctctcagactcactctgccaggctacagttttgagaataccttttttgttgttgttttgtacctggagaactttttatgaatgagtaaatcttcagaaagg

SEQ ID NO: 25032 - protein, 130 aa, Homo sapiens; identical to SEQ ID NO: 25024

SEQ ID NO: 25033 - DNA, 1721 bp, Homo sapiens
gccattcccggatccgccggctgggaatcgcgggtccccgcgcgtcctgcagcacttcccgcgccgcgcccccagcccagtgcgccggctctgtgccggggtgcccgggcggtcgggagaatgagccgcatctaccacgacggcgcgctccggaacaaggcggtgcagagcgtccggctgccaggggcctgggaccccgccgcccaccaggggggaaatggtgtcctgctggagggagaactgatcgatgtatctcggcacagcatcttggacactcatggcaggaaggagcgctactacgtgctgtatatccggcccagtcacatccatcgccgtaaattcgacgccaagggaaatgaaatcgagcccaacttcagcgccaccaggaaggtgaacacgggcttcctcatgtcgtcctacaaggtggaagccaagggggacactgacaggctcacgcccgaggcgctgaaggggctggtcaacaagccagagctgctcgcgctgacagagagcctcacccccgaccacacagtggcgttctggatgcccgagtcagagatggaggtgatggaactcgagctgggggccggggtacggctgaagactcggggcgatggtcccttcctggattcattggccaaacttgaggctggaacagtgaccaagtgtaatttcactggtgatggaaagacaggggcatcctggacagacaacatcatggcccaaaagtgttcgaagggggctgcagcggagatccgagagcagggggatggggcagaggacgaggagtgggatgactgagggacgtggctgcctctgggggcaccagcaccttctgtagcattgtggaacatttcttccatgaacttctactctggagctggagagaacagtctgccaagtcttacctggttcttccccatagccaccttggaatactctttgaacaagctctgctaaaaccaaacccatgaccactgtgttggtggtggggcctcatgctgtggctcagggagggcccctccctgcatgtgagtctagccttcctagacattacatgatgaccctttaaaaaaaaattagagatggaggtctcactatgttgcccaggctgatctcaaactcctggactcaagcgatccacccccctccacctcccaaggtgttgggattacaggcgtgagccactgcacccagcctcatgttgaccctggccctggatagcagctttgtttgtagaggcaggtggtgggagagaccctaggacagcctgagagtaactggacctggtattggtgcggagtggggaatatcccttgtctaaatgcagagcagctgagagaagttagcggggctcttcctccgttctcattgtttcctgctttccttccccacccaccccttcctcagcactctgtgttgtagcctgtactatcctgcttcaagcctccgtgtcccttgtaccttccccctaccttgagttgccagttctttactccctcaaatgttcccatgccacctctggggtttctgttatctgacatccctggctgctttcctggtagatgccattcccagagaggccaacagcgttcccaggcgtggctggctggtccgcatctctcagactcactctgccaggctacagttttgagaataccttttttgttgttgttttgtacctggagaactttttatgaatgagtaaatcttcagaaagg

SEQ ID NO: 25034 - protein, 226 aa, Homo sapiens; identical to SEQ ID NO: 3329

SEQ ID NO: 25035 - DNA, 4517 bp, Homo sapiens
gcgcgcgtggaggcgggcggcgggcgcacagcagcagcccgggcggtgggcagccaggagcccccggcccggcccggcccggcccgccgagggccccagcgcaggagccgcgcccggacccaggcgatgccctcctagctagccgtcacgggatggagggcttcatggactcagggacacagacggacgccgtggtggtgctgtccttggctcaggccgccgtgcttggcctggtctccgaaaatgagctctttggagctaccataagcgccgaggccttctacccggacctggggcccgagctttcaggggcagccatgggagagcccgagccaccaggccccgacgtctaccagctggcctgcaacgggagggccttggaggagccggcggaggaggaggtgctggaggtggaggcagcctgtgagaagcacacccggcggaagacgcggccacctgtgcggttggtgcccaaggtcaagttcgagaaggtggaggaggaggaacaggaggtctatgaggtttctgtgccaggtgacgacaaggacgcagggccagcagaagcccccgccgaggcggccagtggcggctgcgacgccctggtgcagagcagcgccgtcaagatgatcgacctcagcgccttcagccgcaagccccggacgctccggcatctgccccgaaccccgaggccggagctgaacgtggccccatatgaccctcacttcccggccccggcccgggatggcttccccgagcccagcatggcgctgcctgggccagaggccttgcccacagagtgtgggttcgagccaccccacctggcccccctgagtgaccccgaggcccccagcatggagtccccggagcctgtcaagccggaacagggcttcgtgtggcaggaggccagtgagttcgaggctgacacggcgggttcgaccgtggaacgccacaagaaggcccagctggatcggctggacatcaacgtgcagattgacgactcctatctggtggaggcgggcgaccgccagaagcgctggcagtgccgcatgtgcgagaagtcctacacgtccaagtacaacctggtgacgcacatcctgggccacaacggcatcaagccacactcgtgcccacactgcagcaagctcttcaagcagcccagccacctgcagacgcacctgctgacgcaccagggcacccggccccacaagtgccaggtatgccacaaggccttcacgcagaccagccacctcaagcgccacatgctgctgcactcggaggtcaagccctacagctgccacttctgcggccgcggcttcgcctaccccagcgagctcaaggcccacgaagtgaagcatgagagtggccgctgccatgtctgcgtcgagtgcggcctggacttctccaccctgacccagctcaagcgccacctggcctcccaccagggccccaccctctaccagtgcctcgagtgtgacaagtccttccactaccgcagccagttgcagaaccacatgctcaagcaccagaacgtgcgacccttcgtgtgcactgaatgcggcatggagttcagccagattcaccacctcaagcagcactccctcacccacaagggcgtgaaggagttcaagtgcgaggtgtgtggccgggagttcaccctacaggcgaacatgaagcggcacatgctgatccacaccagcgtccggccctaccagtgccacatctgcttcaagacctttgtacagaagcagactctcaagacccacatgattgtacactcgcccgtgaagccattcaaatgcaaggtgtgcgggaagtccttcaaccgcatgtacaacctgctgggccacatgcacctgcacgccggcagcaagcccttcaagtgcccctactgctccagcaagtttaatctcaagggcaacctgagccggcacatgaaggtcaagcatggcgtcatggacatcggcctggacagccaagaccccatgatggagctgacaggcactgacccttcagagctcgacggccagcaggagatggaggacttcgaggagaacgcctacagctatgcgagcgtggacagcagcgccgaggccagtgtcctcactgaacaggccatgaaagagatggcctactacaatgtgctatagcgcaagctgggccacccctaacgggggccgggggcgagggcatgggggtgagacccatgggctgcaggctgcacctcctgcagccgagaaacaagctactgccccactgttctgagccctccctccccgagtcatttgcaccactagggacctttagaccaaatggagactgtactactggccccggctgtgagccagcacaggcccaggcatcccagcaagggaaggagaacacgcgaggcccagatctgggtctccctggcctgcttccgtggggagtgggagaagtggggccactggggacaggtcacaagggcaccggccctcggggtctctccaggcccagcagagctcttcaggggtcctgacactggaagaagagaccacttgagccatgtctttttcacggccaactcctgcctctaaggatgtctgagctcccctctggccagtactgcccacctctaccttgtccaggcccccttccccgccctgtcgacggaccgccaggcagggcactctgccttctacctcccggggtctcccatgcgctcctcaagccaggtgtgcacgtggccctggccctggcctgcaggacagctggggggcacccagcccccagaagacccctgtcctacatccctttctggaagtgagtgtccctacagtggattgcaacacatgtcgtccacttcgaccctagctggagtgcctcaccagggggccccactaggaacaaagccaggacaggccccgcgtcaggcacacactaacaaaaccagaagcatggggcagggcagggcggagtgagggcatcacaggggaccaagaagggctgtccttgggggaggcccaggaccacctgtcggggagggggaccgcagtcatttctcattcctcagtgtccaccttgcgacggggatagccacgagtcagcagcttcccggaaagagcaacgtattttaaaaaggaaagtaaagcccacagagggaaatcaagggtttttttgagcaaagggggtcttctgaaggtaacttattatttttttctttccaactgtgtgtcacctatgaccttttctgatggagatgcattttctttttccaagcgtaagcttcctaatgtgctgtgcgtgcttcctacccacccaccccgagcagcctggccgggcaggactggggctccatggggactgtcaccctggccctggaggtgcagccgctggcagcagcctcagcaggctggggtgggaggcaggagaaggcagagctgggaagccctccacccctgcctggctcctgcagtcgctgacttgctctgtcccatgtcccatcctcggctgtcagggctgctgactctgctcagccaacagctagctccctcgctcgcctgctctcttcccctctgttcccacgccagctcctgcccctggaaccagagatgacaggcccagggcagtgaaatagcacattcaggaactctagggcacccggacccccccacccacttgcctcctgaggcctcagtggggaggggcaagcaggggtcttccccaaaggcacagatgaagccactagcttcagcctagaaacccggagaagggaacagcctgcggtgggaggaaccaatctgcagcgcagccacccccaaggctggatccttaagtgaaggaccaagccaggcctcagggtgactgtgatcaggactgaggggtggacaaggtggcccaagtatggcttccagaccccgaagccccacgacctcccaggtgcccgccatgatgaccctcaggtggcagtgaccccgtcactgtataagacattttctcctgctgagcagaaggcatcatcccctgcaactacctcttcccacgtctttctcccctggtaccaaaaagaaccctgtacctctcctcctcctcctccctcctgccagtgcagtggccttggtcttggaaactgaagggagaaggtctggcccccagggtggggctctcctttccctcccccagccccgccgtcagcactggccctctgtgaggttcgatacttgaacgccccctgccctgtgccttggacctgggcaaagctaggaggaggaaacagcacaactcacagtttgagctggggggtggtcttggcaaggctcctgtctgtacccctccctaaccttctcaaaagaggtgcacagcctctcgggtgacttggaaactcctggacaaattccattctaacttattttgacatgtatacaaaccaactgtttagagattccacttgtgcaaagccctactgtgtttttatgttcctgtttaaaagagaagtttacttagcaataattataaataaatgaatattctttagtgaggtg

SEQ ID NO: 25036 - protein, 664 aa, Homo sapiens
MEGFMDSGTQTDAVVVLSLAQAAVLGLVSENELFGATISAEAFYPDLGPELSGAAMGEPEPPGPDVYQLACNGRALEEPAEEEVLEVEAACEKHTRRKTRPPVRLVPKVKFEKVEEEEQEVYEVSVPGDDKDAGPAEAPAEAASGGCDALVQSSAVKMIDLSAFSRKPRTLRHLPRTPRPELNVAPYDPHFPAPARDGFPEPSMALPGPEALPTECGFEPPHLAPLSDPEAPSMESPEPVKPEQGFVWQEASEFEADTAGSTVERHKKAQLDRLDINVQIDDSYLVEAGDRQKRWQCRMCEKSYTSKYNLVTHILGHNGIKPHSCPHCSKLFKQPSHLQTHLLTHQGTRPHKCQVCHKAFTQTSHLKRHMLLHSEVKPYSCHFCGRGFAYPSELKAHEVKHESGRCHVCVECGLDFSTLTQLKRHLASHQGPTLYQCLECDKSFHYRSQLQNHMLKHQNVRPFVCTECGMEFSQIHHLKQHSLTHKGVKEFKCEVCGREFTLQANMKRHMLIHTSVRPYQCHICFKTFVQKQTLKTHMIVHSPVKPFKCKVCGKSFNRMYNLLGHMHLHAGSKPFKCPYCSSKFNLKGNLSRHMKVKHGVMDIGLDSQDPMMELTGTDPSELDGQQEMEDFEENAYSYASVDSSAEASVLTEQAMKEMAYYNVL

SEQ ID NO: 25037 - DNA, 4541 bp, Homo sapiens
gcgcgcgtggaggcgggcggcgggcgcacagcagcagcccgggcggtgggcagccaggagcccccggcccggcccggcccggcccgccgagggccccagcgcaggagccgcgcccggacccaggcgatgccctcctagctagccgtcacgggatggagggcttcatggactcagggacacagacggacgccgtggtggtgctgtccttggctcaggccgccgtgcttggcctggtctccgaaaatgagctctttggagctaccataagcgccgaggccttctacccggacctggggcccgagctttcaggggcagccatgggagagcccgagccaccaggccccgacgtctaccagctggcctgcaacgggagggccttggaggagccggcggaggaggaggtgctggaggtggaggcagcctgtgagaagcacacccggcggaagacgcggccacctgtgcggttggtgcccaaggtcaagttcgagaaggtggaggaggaggaacaggaggtctatgaggtttctgtgccaggtgacgacaaggacgcagggccagcagaagcccccgccgaggcggccagtggcggctgcgacgccctggtgcagagcagcgccgtcaagatgatcgacctcagcgccttcagccgcaagccccggacgctccggcatctgccccgaaccccgaggccggagctgaacgtggccccatatgaccctcacttcccggccccggcccgggatggcttccccgagcccagcatggcgctgcctgggccagaggccttgcccacagagtgtgggttcgagccaccccacctggcccccctgagtgaccccgaggcccccagcatggagtccccggagcctgtcaagccggaacagggcttcgtgtggcaggaggccagtgagttcgaggctgacacggcgggttcgaccgtggaacgccacaagaaggcccagctggatcggctggacatcaacgtgcagattgacgactcctatctggtggaggcgggcgaccgccagaagcgctggcagtgccgcatgtgcgagaagtcctacacgtccaagtacaacctggtgacgcacatcctgggccacaacggcatcaagccacactcgtgcccacactgcagcaagctcttcaagcagcccagccacctgcagacgcacctgctgacgcaccagggcacccggccccacaagtgccaggtatgccacaaggccttcacgcagaccagccacctcaagcgccacatgctgctgcactcggaggtcaagccctacagctgccacttctgcggccgcggcttcgcctaccccagcgagctcaaggcccacgaagtgaagcatgagagtggccgctgccatgtctgcgtcgagtgcggcctggacttctccaccctgacccagctcaagcgccacctggcctcccaccagggccccaccctctaccagtgcctcgagtgtgacaagtccttccactaccgcagccagttgcagaaccacatgctcaagcaccagaacgtgcgacccttcgtgtgcactgaatgcggcatggagttcagccagattcaccacctcaagcagcactccctcacccacaagggcgtgaaggagttcaagtgcgaggtgtgtggccgggagttcaccctacaggcgaacatgaagcggcacatgctgatccacaccagcgtccggccctaccagtgccacatctgcttcaagacctttgtacagaagcagactctcaagacccacatgattgtacactcgcccgtgaagccattcaaatgcaaggtgtgcgggaagtccttcaaccgcatgtacaacctgctgggccacatgcacctgcacgccggcagcaagcccttcaagtgcccctactgctccagcaagtttaatctcaagggcaacctgagccggcacatgaaggtcaagcatggcgtcatggacatcggcctggacagccaagaccccatgatggagctgacaggcactgacccttcagagctcgacggccagcaggagatggaggacttcgaggagaacgcctacagctatgcgagcgtggacagcagcgccgaggccagtgtcctcactgaacaggccatgaaagagatggcctactacaatgtgctatagcgcaagctgggccacccctaacgggggccgggggcgagggcatgggggtgagacccatgggctgcaggctgcacctcctgcagccgagaaacaagctactgccccactgttctgagccctccctccccgagtcatttgcaccactagggacctttagaccaaatggagactgtactactggccccggctgtgagccagcacaggcccaggcatcccagcaagggaaggagaacacgcgaggcccagatctgggtctccctggcctgcttccgtggggagtgggagaagtggggccactggggacaggtcacaagggcaccggccctcggggtctctccaggcccagcagagctcttcaggggtcctgacactggaagaagagaccacttgagccatgtctttttcacggccaactcctgcctctaaggatgtctgagctcccctctggccagtactgcccacctctaccttgtccaggcccccttccccgccctgtcgacggaccgccaggcagggcactctgccttctacctcccggggtctcccatgcgctcctcaagccaggtgtgcacgtggccctggccctggcctgcaggacagctggggggcacccagcccccagaagacccctgtcctacatccctttctggaagtgagtgtccctacagtggattgcaacacatgtcgtccacttcgaccctagctggagtgcctcaccagggggccccactaggaacaaagccaggacaggccccgcgtcaggcacacactaacaaaaccagaagcatggggcagggcagggcggagtgagggcatcacaggggaccaagaagggctgtccttgggggaggcccaggaccacctgtcggggagggggaccgcagtcatttctcattcctcagtgtccaccttgcgacggggatagccacgagtcagcagcttcccggaaagagcaacgtattttaaaaaggaaagtaaagcccacagagggaaatcaagggtttttttgagcaaagggggtcttctgaaggtaacttattatttttttctttccaactgtgtgtcacctatgaccttttctgatggagatgcattttctttttccaagcgtaagcttcctaatgtgctgtgcgtgcttcctacccacccaccccgagcagcctggccgggcaggactggggctccatggggactgtcaccctggccctggaggtgcagccgctggcagcagcctcagcaggctggggtgggaggcaggagaaggcagagctgggaagccctccacccctgcctggctcctgcagtcgctgacttgctctgtcccatgtcccatcctcggctgtcagggctgctgactctgctcagccaacagctagctccctcgctcgcctgctctcttcccctctgttcccacgccagctcctgcccctggaaccagagatgacaggcccagggcagtgaaatagcacattcaggaactctagggcacccggacccccccacccacttgcctcctgaggcctcagtggggaggggcaagcaggggtcttccccaaaggcacagatgaagccactagcttcagcctagaaacccggagaagggaacagcctgcggtgggaggaaccaatctgcagcgcagccacccccaaggctggatccttaagtgaaggaccaagccaggcctcagggtgactgtgatcaggactgaggggtggacaaggtggcccaagtatggcttccagaccccgaagccccacgacctcccaggtgcccgccatgatgaccctcaggtggcagtgaccccgtcactgtataagacattttctcctgctgagcagaaggcatcatcccctgcaactacctcttcccacgtctttctcccctggtaccaaaaagaaccctgtacctctcctcctcctcctccctcctgccagtgcagtggccttggtcttggaaactgaagggagaaggtctggcccccagggtggggctctcctttccctcccccagccccgccgtcagcactggccctctgtgaggttcgatacttgaacgccccctgccctgtgccttggacctgggcaaagctaggaggaggaaacagcacaactcacagtttgagctggggggtggtcttggcaaggctcctgtctgtacccctccctaaccttctcaaaagaggtgcacagcctctcgggtgacttggaaactcctggacaaattccattctaacttattttgacatgtatacaaaccaactgtttagagattccacttgtgcaaagccctactgtgtttttatgttcctgtttaaaagagaagtttacttagcaataattataaataaatgaatattctttagtgaggtgactgcaaatgcttctttccccagc

SEQ ID NO: 25038 - protein, 664 aa, Homo sapiens; identical to SEQ ID NO: 25036

SEQ ID NO: 25039 - DNA, 1249 bp, Homo sapiens
cctaattggatggagctgtggggcgtgagcaccagcgtcagatcggggccctcaggctaccagcgatgccctcctagctagccgtcacgggatggagggcttcatggactcagggacacagacggacgccgtggtggtgctgtccttggctcaggccgccgtgcttggcctggtctccgaaaatgagctctttggagctaccataagcgccgaggccttctacccggacctggggcccgagctttcaggggcagccatgggagagcccgagccaccaggccccgacgtctaccagctggcctgcaacgggagggccttggaggagccggcggaggaggaggtgctggaggtggaggcagcctgtgagaagcacacccggcggaagacgcggccacctgtgcggttggtgcccaaggtcaagttcgagaaggtggaggaggaggaacaggaggtctatgaggtttctgtgccaggtgacgacaaggacgcagggccagcagaagcccccgccgaggcggccagtggcggctgcgacgccctggtgcagagcagcgccgtcaagatgatcgacctcagcgccttcagccgcaagccccggacgctccggcatctgccccgaaccccgaggccggagctgaacgtggccccatatgaccctcacttcccggccccggcccgggatggcttccccgagcccagcatggcgctgcctgggccagaggccttgcccacagagtgtgggttcgagccaccccacctggcccccctgagtgaccccgaggcccccagcatggagtccccggagcctgtcaagccggaacagggcttcgtgtggcaggaggccagtgagttcgaggctgacacggcgggttcgaccgtggaacgccacaagaaggcccagctggatcggctggacatcaacgtgcagattgacgactcctatctggtggaggcgggcgaccgccagaagcgctggcagtgccgcatgtgcgagaagtcctacacgtccaagtacaacctggtgacgcacatcctgggccacaacggcatcaagccacactcgtgcccacactgcagcaagctcttcaagcagcccagccacctgcagacgcacctgctgacgcaccagggcacccggccccacaagtgccaggtatgccacaaggccttcacgcagaccagccacctcaagcgccacatgctgctgcactcggaggtcaagccctacagctgccacttctgcggccgc

SEQ ID NO: 25040 - protein, 385 aa, Homo sapiens
MEGFMDSGTQTDAVVVLSLAQAAVLGLVSENELFGATISAEAFYPDLGPELSGAAMGEPEPPGPDVYQLACNGRALEEPAEEEVLEVEAACEKHTRRKTRPPVRLVPKVKFEKVEEEEQEVYEVSVPGDDKDAGPAEAPAEAASGGCDALVQSSAVKMIDLSAFSRKPRTLRHLPRTPRPELNVAPYDPHFPAPARDGFPEPSMALPGPEALPTECGFEPPHLAPLSDPEAPSMESPEPVKPEQGFVWQEASEFEADTAGSTVERHKKAQLDRLDINVQIDDSYLVEAGDRQKRWQCRMCEKSYTSKYNLVTHILGHNGIKPHSCPHCSKLFKQPSHLQTHLLTHQGTRPHKCQVCHKAFTQTSHLKRHMLLHSEVKPYSCHFCG

SEQ ID NO: 25041 - DNA, 1736 bp, Homo sapiens
tgtgaatgtgctgggcctgctgttaatggtgcttgctcccagccctttgacttcaaagctggaagaaggccttagagattgtctgaaagcaactgaggcaggaagaaagctctgtacccaggattacacagtaagtggcagagccagcactcaacctgagctttcagagcctgttcccagtgctgtttctacaaggccactgtctctgctactgctggggatcccgaatcaagctcacttcaaagaatgtagctatgagagcatgaaaccgtgcgctcacgccgcacacgagttgggtaaatggagcgcctcattttccagatgtgttacagaaactgtgctggaggatgtgactggccagtgagacaactagggggaactgggtgattcaggctgtttcaacactgacttcttcaaagtccaacaatcagagaagcagtttagtcatcgggattttctcacatcacaccattttttgatctggaatgctttcttcatactttgacttgtatgtgatttatttaggattggtcaggagagaagagaaggacgatgccctcctagctagccgtcacgggatggagggcttcatggactcagggacacagacggacgccgtggtggtgctgtccttggctcaggccgccgtgcttggcctggtctccgaaaatgagctctttggagctaccataagcgccgaggccttctacccggacctggggcccgagctttcaggggcagccatgggagagcccgagccaccaggccccgacgtctaccagctggcctgcaacgggagggccttggaggagccggcggaggaggaggtgctggaggtggaggcagcctgtgagaagcacacccggcggaagacgcggccacctgtgcggttggtgcccaaggtcaagttcgagaaggtggaggaggaggaacaggaggtctatgaggtttctgtgccaggtgacgacaaggacgcagggccagcagaagcccccgccgaggcggccagtggcggctgcgacgccctggtgcagagcagcgccgtcaagatgatcgacctcagcgccttcagccgcaagccccggacgctccggcatctgccccgaaccccgaggccggagctgaacgtggccccatatgaccctcacttcccggccccggcccgggatggcttccccgagcccagcatggcgctgcctgggccagaggccttgcccacagagtgtgggttcgagccaccccacctggcccccctgagtgaccccgaggcccccagcatggagtccccggagcctgtcaagccggaacagggcttcgtgtggcaggaggccagtgagttcgaggctgacacggcgggttcgaccgtggaacgccacaagaaggcccagctggatcggctggacatcaacgtgcagattgacgactcctatctggtggaggcgggcgaccgccagaagcgctggcagtgccgcatgtgcgagaagtcctacacgtccaagtacaacctggtgacgcacatcctgggccacaacggcatcaagccacactcgtgcccacactgcagcaagctcttcaagcagcccagccacctgcagacgcacctgctgacgcaccagggcacccggccccacaagtgccaggtatgccacaaggccttcacgcagaccagccacctcaagcgccacatgctgctgcactcggaggtcaagccctacagctgccacttctgcggccgc

SEQ ID NO: 25042 - protein, 416 aa, Homo sapiens
MLSSYFDLYVIYLGLVRREEKDDALLASRHGMEGFMDSGTQTDAVVVLSLAQAAVLGLVSENELFGATISAEAFYPDLGPELSGAAMGEPEPPGPDVYQLACNGRALEEPAEEEVLEVEAACEKHTRRKTRPPVRLVPKVKFEKVEEEEQEVYEVSVPGDDKDAGPAEAPAEAASGGCDALVQSSAVKMIDLSAFSRKPRTLRHLPRTPRPELNVAPYDPHFPAPARDGFPEPSMALPGPEALPTECGFEPPHLAPLSDPEAPSMESPEPVKPEQGFVWQEASEFEADTAGSTVERHKKAQLDRLDINVQIDDSYLVEAGDRQKRWQCRMCEKSYTSKYNLVTHILGHNGIKPHSCPHCSKLFKQPSHLQTHLLTHQGTRPHKCQVCHKAFTQTSHLKRHMLLHSEVKPYSCHFCG

SEQ ID NO: 25043 - DNA, 1007 bp, Homo sapiens
tgaacatgggtgatcgattacggacatgcaagatggaaaattgcttgtggcatccagataagggaaaacaagtaggacaccagattgtatacactgtgatcaaaaccatgtgaaaaacacatgcatgaagaggactgggaagaaatacacaagaagtggttgcattagggtgagaaggagtattcatgtttttctcatccgtctttttcaaaccttttgtaatgggtggttttattaattttataatggaaaatgttaatttaaaagcaagttatttacagtttagtaagctcatggcagggaaaggctgtgctctgtttattgctcttactttttcccaacgcctactcccatgcctggcaattatagagataataaatgtgggtgtggaatgagtgcccactgggaaacctctcagaggactttgacccaggaacatatttgcacagggtttccctcagctggagaaggtttctctgggagagcaccagccaggtgtgtgtcatgggatatatttacagggtggtgagctctcctggtccaacctaaaaggtcccagcaaggtgtaggggcccttctggccatttgacatcaccagggcagttagtgctgatacaaaccacagagaatgaacaaactccaactcaaacgggaatggattttatgtcattctgggactttcaaacttgataatagaccaagcatggtggctcacacatgtaatcctagcactttgggaagccaaggtgggaggatcgcttgcggccaggagattgagaccagcctgggaaaggtagcaagacccagtctctacaaaaaaattttttgttctgttttgtttttgagacagagtctcaactctgtcgtctaggctggagtgcagtggtttgatcttggctcactacaacctccacctccgggaaaatcactggaacctgggaggcagaggttgcagtgagccaatatcacgccattgcattccggcctgggcaacaagagcaaaactc

SEQ ID NO: 25044 - protein, 80 aa, Homo sapiens
MNKLQLKREWILCHSGTFKLDNRPSMVAHTCNPSTLGSQGGRIACGQEIETSLGKVARPSLYKKIFCSVLFLRQSLNSVV

SEQ ID NO: 25045 - DNA, 522 bp, Homo sapiens
ggcttcgcctaccccagcgagctcaaggcccacgaagtgaagcatgagagtggccgctgccatgtctgcgtcgagtgcggcctggacttctccaccctgacccagctcaagcgccacctggcctcccaccagggccccaccctctaccagtgcctcgagtgtgacaagtccttccactaccgcagccagttgcagaaccacatgctcaagcaccagaacgtgcgacccttcgtgtgcactgaatgcggcatggagttcagccagattcaccacctcaagcagcactccctcacccacaagggcgtgaaggagttcaagtgcgaggtgtgtggccgggagttcaccctacaggcgaacatgaagcggctggccaaggctgagacttcgttggggtgggctcaggtctggaaggggggtaccctggaaggccatgatgacaataacgatgggatatttatgtcttcttcaaaggacttaaatgagatcacgtaaacaatataataaaaatcataactaacattt

SEQ ID NO: 25046 - protein, 96 aa, Homo sapiens
MLKHQNVRPFVCTECGMEFSQIHHLKQHSLTHKGVKEFKCEVCGREFTLQANMKRLAKAETSLGWAQVWKGGTLEGHDDNNDGIFMSSSKDLNEIT

SEQ ID NO: 25047 - DNA, 2533 bp, Homo sapiens
ggtgatccgcctgcctcggcctctcaaagtgctgggattacaggcgtgagccactgcgcctggccccatttcttttctttttttgacaaggtcttgctctattgccaaggctggggtgcagtggtgcaatcatggctcactgcagcctcaaactcaaatgttgggattataggcgtgagccagtacgcccagcctaacaaattctaaaagagctgtaacactgacagtctcttcatggtcccagttatttccaaaagggcacgttctgctctggttccttctggtgggttagcaacagggcagatccactagaatacagctctcaaaatctactgcacatggactcacccaaagtgctttacaaaaatcctgatcccaggccacattccagatcacttacatttgaacctcaggtccaaactcaggcatcagcatttaaaacattcctcaggtgactcccaacatgcagctgatttgccagccagccctctgcagtctggatcaaaggttctcaacatgaggtccctgaaccagcggctgctttgctaagaactgggaacttgtgggaaaggcagcgtctcagaccccaccccagatctactgaatcagaaactctgggggtggggccagcactttgtttcaacaagccctccaggagactctgaggcactagtctggtccagtgggtctcaaacttgactgcaacaaatggcccagagatctttttgaagtgtagagtctgactcagcaggtgtgggtggagctgagaggccagcaagatcccaggtggggccgaggctgctcatcctcctaccacattttgagtagcaaggagctaccaagagcagccgacggggtttcattctcgtctactggaagcaaccttaatagacaactgaaaaacaaaacaaaacaactgagatacctgtttctgccagaaaacccaggccattcactggtcagctgttccaaaaccagagttaagctactgcagctgttcccgcgtgcctgcctgcattccagtaaataatcccacgtggcaagtcagctcacctggttactgccaaagcatgttcccagctggtgtgactcagaggcacaccagaatttctttattataatttggcgatagggtcttgctttgccacgcaggctggagtgccgtggtccgatcacagttcactacagccttgaactcctgggctcaagtgatcttcctgccttagactcccaagtagctgagattataggcacacgccaccacacccagctaatttaaaaatatttttgtagagaccaggtctcactatgttgcctggtttggtatcaaactcctggccttaagggatcctcctgcctcggcctcccaaagtgccaggattataggtgtgagccatcatgcccagccagagcaccagaaatagctcccaactgtagaaggagcctccctgtagcgctgttggctccctccttcctgtggagtctccacagcagtccctccccaccatgaggccagagaggctaacagctttgctgtcacccaacagaaatgctttaagtactgaccactgctggagggaaaggctaccgctaacacttgggatgttttctgacagcctctgaaacttctacgaactgctgaggcataggatcctctcctaaaatttctcccagatcttaacgtcagggctgtctggccctttcatgagtatgtgggttatagtctctggcaggcacttgtgaagagtgtgactgattgacacttttttgccttggttgctgggaagctcagatctcccctctgcatgtcccttgcttaggacctcccatggtgtacttggagttgggacctcacctggctctcccttatctttccggctgccattttttcccctttctaactttctttcccatacacttatttgaaatattatctcacggtaacgaaataaagtgtctgtcacctcctgctgtgttgtcatcttgcatgagctatctaagttctctgttcttcagtttctgcatctgtaaaacgatgacaatgacagagccaacctcgctttgaggatcacatgagttaataaaggcctggcacacagttagcactcaataaatgttagttatgatttttattatattgtttacgtgatctcatttaagtcctttgaagaagacataaatatcccatcgttattgtcatcatggccttccagggtaccccccttccagacctgagcccaccccaacgaagtctcagccttggccagcctccccactcctctaactgggcaggaggctcctgagtgcgtcatgttggtatcattcctgctctgtccattgcgcttggcccacccaccttggctgtccaggccgatgtccatgacgccatgcttgaccttcatgtgccggctcaggttgcccttgagattaaacttgctggagcagtaggggcacttgaagggcttgctgccggcgtgcaggtgcatgtggcccagcaggttgtacatgcggttgaaggacttcccgcacacct

SEQ ID NO: 25048 - protein, 78 aa, Homo sapiens
MVYLELGPHLALPYLSGCHFFPFLTFFPIHLFEILSHGNEIKCLSPPAVLSSCMSYLSSLFFSFCICKTMTMTEPTSL

SEQ ID NO: 25049 - DNA, 3121 bp, Homo sapiens
tccactggatgtgaacaaggaagcacacaccctgacggccactggcagccatcttgtgaccatgaggatattcgcagctaatgctgtggacagaggaagcctcaccctgatgtcactgttggcaagctgaatcagccagctctgaagagggcctagactttgaaccatttcttttctcttctttttttttttttttttgagaccgagtttcgctcttgttgcccaggctggagtgcaatggtgcaatcttggctcatcacaacctccacctcctggggtcaagcgattctcctgcctcagcctcccaagtagctgagattacaggcatgcgccaccatacccggctaattttttttgtatttttagtagagacggggtttctccatgttggtcaggctggtcttgaactcccaatctcaggtgatccgcctgcctcggcctctcaaagtgctgggattacaggcgtgagccactgcgcctggccccatttcttttctttttttgacaaggtcttgctctattgccaaggctggggtgcagtggtgcaatcatggctcactgcagcctcaaactcaaagtgatcctcccaactcaacctcccgagtagctgggattacacgcatgtgccaacacgcccagctaatttttgtatttttagtagagacggggtttcatcatgttagccaggctggtctcgaactcccaacctcaggtgatctgcccaccttgggatttgcctcccaaagtgttgggattataggcgtgagccagtacgcccagcctaacaaattctaaaagagctgtaacactgacagtctcttcatggtcccagttatttccaaaagggcacgttctgctctggttccttctggtgggttagcaacagggcagatccactagaatacagctctcaaaatctactgcacatggactcacccaaagtgctttacaaaaatcctgatcccaggccacattccagatcacttacatttgaacctcaggtccaaactcaggcatcagcatttaaaacattcctcaggtgactcccaacatgcagctgatttgccagccagccctctgcagtctggatcaaaggttctcaacatgaggtccctgaaccagcggctgctttgctaagaactgggaacttgtgggaaaggcagcgtctcagaccccaccccagatctactgaatcagaaactctgggggtggggccagcactttgtttcaacaagccctccaggagactctgaggcactagtctggtccagtgggtctcaaacttgactgcaacaaatggcccagagatctttttgaagtgtagagtctgactcagcaggtgtgggtggagctgagaggccagcaagatcccaggtggggccgaggctgctcatcctcctaccacattttgagtagcaaggagctaccaagagcagccgacggggtttcattctcgtctactggaagcaaccttaatagacaactgaaaaacaaaacaaaacaactgagatacctgtttctgccagaaaacccaggccattcactggtcagctgttccaaaaccagagttaagctactgcagctgttcccgcgtgcctgcctgcattccagtaaataatcccacgtggcaagtcagctcacctggttactgccaaagcatgttcccagctggtgtgactcagaggcacaccagaatttctttattataatttggcgatagggtcttgctttgccacgcaggctggagtgccgtggtccgatcacagttcactacagccttgaactcctgggctcaagtgatcttcctgccttagactcccaagtagctgagattataggcacacgccaccacacccagctaatttaaaaatatttttgtagagaccaggtctcactatgttgcctggtttggtatcaaactcctggccttaagggatcctcctgcctcggcctcccaaagtgccaggattataggtgtgagccatcatgcccagccagagcaccagaaatagctcccaactgtagaaggagcctccctgtagcgctgttggctccctccttcctgtggagtctccacagcagtccctccccaccatgaggccagagaggctaacagctttgctgtcacccaacagaaatgctttaagtactgaccactgctggagggaaaggctaccgctaacacttgggatgttttctgacagcctctgaaacttctacgaactgctgaggcataggatcctctcctaaaatttctcccagatcttaacgtcagggctgtctggccctttcatgagtatgtgggttatagtctctggcaggcacttgtgaagagtgtgactgattgacacttttttgccttggttgctgggaagctcagatctcccctctgcatgtcccttgcttaggacctcccatggtgtacttggagttgggacctcacctggctctcccttatctttccggctgccattttttcccctttctaactttctttcccatacacttatttgaaatattatctcacggtaacgaaataaagtgtctgtcacctcctgctgtgttgtcatcttgcatgagctatctaagttctctgttcttcagtttctgcatctgtaaaacgatgacaatgacagagccaacctcgctttgaggatcacatgagttaataaaggcctggcacacagttagcactcaataaatgttagttatgatttttattatattgtttacgtgatctcatttaagtcctttgaagaagacataaatatcccatcgttattgtcatcatggccttccagggtaccccccttccagacctgagcccaccccaacgaagtctcagccttggccagcctccccactcctctaactgggcaggaggctcctgagtgcgtcatgttggtatcattcctgctctgtccattgcgcttggcccacccaccttggctgtccaggccgatgtccatgacgccatgcttgaccttcatgtgccggctcaggttgcccttgagattaaacttgctggagcagtaggggcacttgaagggcttgctgccggcgtgcaggtgcatgtggcccagcaggttgtacatgcggttgaaggacttcccgcacacct

SEQ ID NO: 25050 - protein, 84 aa, Homo sapiens [sequence omitted]

SEQ ID NO: 25051 - DNA, 2134 bp, Homo sapiens
ggtgatccgcctgcctcggcctctcaaagtgctgggattacaggcgtgagccactgcgcctggccccatttcttttctttttttgacaaggtcttgctctattgccaaggctggggtgcagtggtgcaatcatggctcactgcagcctcaaactcaaatgttgggattataggcgtgagccagtacgcccagcctaacaaattctaaaagagctgtaacactgacagtctcttcatggtcccagttatttccaaaagggcacgttctgctctggttccttctggtgggttagcaacagggcagatccactagaatacagctctcaaaatctactgcacatggactcacccaaagtgctttacaaaaatcctgatcccaggccacattccagatcacttacatttgaacctcaggtccaaactcaggcatcagcatttaaaacattcctcaggtgactcccaacatgcagctgatttgccagccagccctctgcagtctggatcaaaggttctcaacatgaggtccctgaaccagcggctgctttgctaagaactgggaacttgtgggaaaggcagcgtctcagaccccaccccagatctactgaatcagaaactctgggggtggggccagcactttgtttcaacaagccctccaggagactctgaggcactagtctggtccagtgggtctcaaacttgactgcaacaaatggcccagagatctttttgaagtgtagagtctgactcagcaggtgtgggtggagctgagaggccagcaagatcccaggtggggccgaggctgctcatcctcctaccacattttgagtagcaaggagctaccaagagcagccgacggggtttcattctcgtctactggaagcaaccttaatagacaactgaaaaacaaaacaaaacaactgagatacctgtttctgccagaaaacccaggccattcactggtcagctgttccaaaaccagagttaagctactgcagctgttcccgcgtgcctgcctgcattccagtaaataatcccacgtggcaagtcagctcacctggttactgccaaagcatgttcccagctggtgtgactcagaggcacaccagaatttctttattataatttggcgatagggtcttgctttgccacgcaggctggagtgccgtggtccgatcacagttcactacagccttgaactcctgggctcaagtgatcttcctgccttagactcccaagtagctgagattataggcacacgccaccacacccagctaatttaaaaatatttttgtagagaccaggtctcactatgttgcctggtttggtatcaaactcctggccttaagggatcctcctgcctcggcctcccaaagtgccaggattataggtgtgagccatcatgcccagccagagcaccagaaatagctcccaactgtagaaggagcctccctgtagcgctgttggctccctccttcctgtggagtctccacagcagtccctccccaccatgaggccagagaggctaacagctttgctgtcacccaacagaaatgctttaagtactgaccactgctggagggaaaggctaccgctaacacttgggatgttttctgacagcctctgaaacttctacgaactgctgaggcataggatcctctcctaaaatttctcccagatcttaacgtcagggctgtctggccctttcatgagtatgtgggttatagtctctggcaggcacttgtgaagagtgtgactgattgacacttttttgccttggttgctgggaagctcagatctcccctctgcatgtcccttgcttaggacctcccatggtgtacttggagttgggacctcacctggctctcccttatctttccggctgccattttttcccctttctaactttctttcccatacacttatttgaaatattatctcacggtaacgaaataaagtgtctgtcacctcctgctgtgttgtcatcttgcatgagctatctaagttctctgttcttcagtttctgcatctgtaaaacgatgacaatgacagagccaacctcgctttgaggatcacatgagttaataaaggcctggcacacagttagcactcaataaatgttagttatgatttttatt

SEQ ID NO: 25052 - protein, 78 aa, Homo sapiens; identical to SEQ ID NO: 25048

SEQ ID NO: 25053 - DNA, 2722 bp, Homo sapiens
tccactggatgtgaacaaggaagcacacaccctgacggccactggcagccatcttgtgaccatgaggatattcgcagctaatgctgtggacagaggaagcctcaccctgatgtcactgttggcaagctgaatcagccagctctgaagagggcctagactttgaaccatttcttttctcttctttttttttttttttttgagaccgagtttcgctcttgttgcccaggctggagtgcaatggtgcaatcttggctcatcacaacctccacctcctggggtcaagcgattctcctgcctcagcctcccaagtagctgagattacaggcatgcgccaccatacccggctaattttttttgtatttttagtagagacggggtttctccatgttggtcaggctggtcttgaactcccaatctcaggtgatccgcctgcctcggcctctcaaagtgctgggattacaggcgtgagccactgcgcctggccccatttcttttctttttttgacaaggtcttgctctattgccaaggctggggtgcagtggtgcaatcatggctcactgcagcctcaaactcaaagtgatcctcccaactcaacctcccgagtagctgggattacacgcatgtgccaacacgcccagctaatttttgtatttttagtagagacggggtttcatcatgttagccaggctggtctcgaactcccaacctcaggtgatctgcccaccttgggatttgcctcccaaagtgttgggattataggcgtgagccagtacgcccagcctaacaaattctaaaagagctgtaacactgacagtctcttcatggtcccagttatttccaaaagggcacgttctgctctggttccttctggtgggttagcaacagggcagatccactagaatacagctctcaaaatctactgcacatggactcacccaaagtgctttacaaaaatcctgatcccaggccacattccagatcacttacatttgaacctcaggtccaaactcaggcatcagcatttaaaacattcctcaggtgactcccaacatgcagctgatttgccagccagccctctgcagtctggatcaaaggttctcaacatgaggtccctgaaccagcggctgctttgctaagaactgggaacttgtgggaaaggcagcgtctcagaccccaccccagatctactgaatcagaaactctgggggtggggccagcactttgtttcaacaagccctccaggagactctgaggcactagtctggtccagtgggtctcaaacttgactgcaacaaatggcccagagatctttttgaagtgtagagtctgactcagcaggtgtgggtggagctgagaggccagcaagatcccaggtggggccgaggctgctcatcctcctaccacattttgagtagcaaggagctaccaagagcagccgacggggtttcattctcgtctactggaagcaaccttaatagacaactgaaaaacaaaacaaaacaactgagatacctgtttctgccagaaaacccaggccattcactggtcagctgttccaaaaccagagttaagctactgcagctgttcccgcgtgcctgcctgcattccagtaaataatcccacgtggcaagtcagctcacctggttactgccaaagcatgttcccagctggtgtgactcagaggcacaccagaatttctttattataatttggcgatagggtcttgctttgccacgcaggctggagtgccgtggtccgatcacagttcactacagccttgaactcctgggctcaagtgatcttcctgccttagactcccaagtagctgagattataggcacacgccaccacacccagctaatttaaaaatatttttgtagagaccaggtctcactatgttgcctggtttggtatcaaactcctggccttaagggatcctcctgcctcggcctcccaaagtgccaggattataggtgtgagccatcatgcccagccagagcaccagaaatagctcccaactgtagaaggagcctccctgtagcgctgttggctccctccttcctgtggagtctccacagcagtccctccccaccatgaggccagagaggctaacagctttgctgtcacccaacagaaatgctttaagtactgaccactgctggagggaaaggctaccgctaacacttgggatgttttctgacagcctctgaaacttctacgaactgctgaggcataggatcctctcctaaaatttctcccagatcttaacgtcagggctgtctggccctttcatgagtatgtgggttatagtctctggcaggcacttgtgaagagtgtgactgattgacacttttttgccttggttgctgggaagctcagatctcccctctgcatgtcccttgcttaggacctcccatggtgtacttggagttgggacctcacctggctctcccttatctttccggctgccattttttcccctttctaactttctttcccatacacttatttgaaatattatctcacggtaacgaaataaagtgtctgtcacctcctgctgtgttgtcatcttgcatgagctatctaagttctctgttcttcagtttctgcatctgtaaaacgatgacaatgacagagccaacctcgctttgaggatcacatgagttaataaaggcctggcacacagttagcactcaataaatgttagttatgatttttatt

SEQ ID NO: 25054 - protein, 84 aa, Homo sapiens [sequence omitted]

SEQ ID NO: 25055 - DNA, 1189 bp, Homo sapiens
gctggggaaagaagcatttgcagtcacctcactaaagaatattcatttatttataattattgctaagtaaacttctcttttaaacaggaacataaaaacacagtagggctttgcacaagtggaatctctaaacagttggtttgtatacatgtcaaaataagttagaatggaatttgtccaggagtttccaagtcacccgagaggctgtgcacctcttttgagaaggttagggaggggtacagacaggagccttgccaagaccaccccccagctcaaactgtgagttgtgctgtttcctcctcctagctttgcccaggtccaaggcacagggcagggggcgttcaagtatcgaacctcacagagggccagtgctgacggcggggctgggggagggaaaggagagccccaccctgggggccagaccttctcccttcagtttccaagaccaaggccactgcactggcaggagggaggaggaggaggagaggtacagggttctttttggtaccaggggagaaagacgtgggaagaggtagttgcaggggatgatgccttctgctcagcaggagaaaatgtcttatacagtgacggggtcactgccacctgagggtcatcatggcgggcacctgggaggtcgtggggcttcggggtctggaagccatacttgggccaccttgtccacccctcagtcctgatcacagtcaccctgaggcctggcttggtccttcacttaaggatccagccttgggggtggctgcgctgcagattggttcctcccaccgcaggctgcacttgtgaagagtgtgactgattgacacttttttgccttggttgctgggaagctcagatctcccctctgcatgtcccttgcttaggacctcccatggtgtacttggagttgggacctcacctggctctcccttatctttccggctgccattttttcccctttctaactttctttcccatacacttatttgaaatattatctcacggtaacgaaataaagtgtctgtcacctcctgctgtgttgtcatcttgcatgagctatctaagttctctgttcttcagtttctgcatctgtaaaacgatgacaatgacagagccaacctcgctttgaggatcacatgagttaataaaggcctggcacacagttagcactcaataaatgttagttatgatttttatt

SEQ ID NO: 25056 - protein, 60 aa, Homo sapiens [sequence omitted]

SEQ ID NO: 25057 - DNA, 582 bp, Homo sapiens
ttctcctgcctcagcctcccaagtagctgagattacaggcatgcgccaccatacccggctaattttttttgtatttttagtagagacggggtttctccatgttggtcaggctggtcttgaactcccaatctcaggtgatccgcctgcctcggcctctcaaagtgctgggattacaggcgtgagccactgcgcctggccccatttcttttctttttttgacaaggtcactgcactccagcctgggtgaaagagcaagactccgtctcaaaaaaaaaaaaaaaaaaaaaagcaccttgagaaaatttctacttgtggatctctgtacaccgtccccattttgtttattaagtctatggtcccgtcctgtgggccccagagaatagtctgtagcattttttataaggacattgatccacctccccaaatgacagccccatagttactagatcgttctgtctagaatgtatgctgccttccttctgcatacgcatcaagcctgggcttcccagaccaaggctgtatgagggaggtggggacctggagcccagtcattccagggccaatcgcttccttctgtcatct

SEQ ID NO: 25058 - protein, 68 aa, Homo sapiens
MRHHTRLIFFVFLVETGFLHVGQAGLELPISGDPPASASQSAGITGVSHCAWPHFFSFFDKVTALQPG

SEQ ID NO: 25059 - DNA, 1215 bp, Homo sapiens
cagcttcccggaaagagcaacgtattttaaaaaggaaagtaaagcccacagagggaaatcaagggtttttttgagcaaagggggtcttctgaaggtaacttattatttttttctttccaactgtgtgtcacctatgaccttttctgatggagatgcattttctttttccaagcgtaagcttcctaatgtgctgtgcgtgcttcctacccacccaccccgagcagcctggccgggcaggactggggctccatggggactgtcaccctggccctggaggtgcagccgctggcagcagcctcagcaggctggggtgggaggcaggagaaggcagagctgggaagccctccacccctgcctggctcctgcagtcgctgacttgctctgtcccatgtcccatcctcggctgtcagggctgctgactctgctcagccaacagctagctccctcgctcgcctgctctcttcccctctgttcccacgccagctcctgcccctggaaccagagatgacaggcccagggcagtgaaatagcacattcaggaactctagggcacccggacccccccacccacttgcctcctgaggcctcagtggggaggggcaagcaggggtcttccccaaaggcacagatgaagccactagcttcagcctagaaacccggagaagggaacagcctgcggtgggaggaaccaatctgcagcgcagccacccccaaggctggatccttaagtgaaggaccaagccaggcctcagggtgactgtgatcaggactgaggggtggacaagtggccttggtcttggaaactgaagggagaaggtctggcccccagggtggggctctcctttccctcccccagccccgccgtcagcactggccctctgtgaggttcgatacttgaacgccccctgccctgtgccttggacctgggcaaagctaggaggaggaaacagcacaactcacagtttgagctggggggtggtcttggcaaggctcctgtctgtacccctccctaaccttctcaaaagaggtgcacagcctctcgggtgacttggaaactcctggacaaattccattctaacttattttgacatgtatacaaaccaactgtttagagattccacttgtgcaaagccctactgtgtttttatgttcctgtttaaaagagaagtttacttagcaataattataaataaatgaatattctttagtgaggtg

SEQ ID NO: 25060 - protein, 124 aa, Homo sapiens
MTFSDGDAFSFSKRKLPNVLCVLPTHPPRAAWPGRTGAPWGLSPWPWRCSRWQQPQQAGVGGRRRQSWEALHPCLAPAVADLLCPMSHPRLSGLLTLLSQQLAPSLACSLPLCSHASSCPWNQR

SEQ ID NO: 25061 - DNA, 1686 bp, Homo sapiens
cagctaaagtattttgacctcgggctcccaaaccgtgaccagactgatgaccaggtcaccattgactctgcactggccacccagaagtacagtgtggctgtcaagtgtgccaccatcacccctgatgggaagacgattgaggctgaggccgctcatgggaccgtcacccgccactatcgggagcaccagaagggccggcccaccagcaccaaccccatcgccagcatctttgcctggacacgtggcctggagcaccgggggaagctggatgggaaccaagacctcatcaggtttgcccagatgctggagaaggtgtgcgtggagacggtggagagtggagccatgaccaaggacctggcgggctgcattcacggcctcagcaatgtgaagctgaacgagcacttcctgaacaccacggacttcctcgacaccatcaagagcaacctggacagagccctgggcaggcagtagggggaggcgccacccatggctgcagtggaggggccagggctgagccggcgggtcctcctgagcgcggcagagggtgagcctcacagcccctctctggaggcctttctaggggatgtttttttataagccagatgtttttaaaagcatatgtgtgtttcccctcatggtgacgtgaggcaggagcagtgcgttttacctcagccagtcagtatgttttgcatactgtaatttatattgcccttggaacacatggtgccatatttagctactaaaaagctcttcacaaaattgtctgctgtgtttgtccctgaggggaggaggtagtgggaccctgaggcagaggccctgctagagctggcaggttcccctggggcagaccagagcacctcaggaaggggctgccacggcagggaagggaccaggcagccctgggagcccgcattccacaggggcccactgcggagttctcggacactcagggcacaggcctgtgggttccctggaattttctagcatgatccagtttctgtgtccagttctccattctgagagtcaatcagttcctgataggttgtcattgatttttttcttcgttggttttaaccttctaaacatctccaggccactttcttagcctttttctaggtactaaaaagaggtcctacccacacctgcctcacacttctcctttccaaggctgcctgagtttggaggggcttgggtgtgtgtgaacaagggccctgcattgtctaggcctgcagttcccaggcttgggttcactttcaccatgcattggcaaaactagaaaagtaagcttgtgacaaattgttctcggccgggcacagtggcgcacgcctataatccctgtactttgggaggctgaggtgggtggatcacttgaggccaggagttcgagaccagcctggccaacatggtgaaaccccatctctactcaaaatacaaaaattagccaggcgtggtgatgcgcacctgcagtcccagctactcgggaggctgaggcaggaaaatggcttgaacctgggaggcagaggttgcagtgagccgagactgcaccactgcactccagcctgggtgacagagcaagactctgtctcaaaaaaaaaaaaaaaaaaaaaaaaaaaaaaattgctctatgcaagttttttagccccatgtaaaaaggaaaaataaaagttgctctaaagctacatataa

SEQ ID NO: 25062 - protein, 99 aa, Homo sapiens
MTRSPLTLHWPPRSTVWLSSVPPSPLMGRRLRLRPLMGPSPATIGSTRRAGPPAPTPSPASLPGHVAWSTGGSWMGTKTSSGLPRCWRRCAWRRWRVEP

SEQ ID NO: 25063 - DNA, 1329 bp, Homo sapiens
agctcatcctgccccacgtggacatccagctaaagtattttgacctcgggctcccaaaccgtgaccagactgatgaccaggtcaccattgactagagccctgggcaggcagtagggggaggcgccacccatggctgcagtggaggggccagggctgagccggcgggtcctcctgagcgcggcagagggtgagcctcacagcccctctctggaggcctttctaggggatgtttttttataagccagatgtttttaaaagcatatgtgtgtttcccctcatggtgacgtgaggcaggagcagtgcgttttacctcagccagtcagtatgttttgcatactgtaatttatattgcccttggaacacatggtgccatatttagctactaaaaagctcttcacaaaattgtctgctgtgtttgtccctgaggggaggaggtagtgggaccctgaggcagaggccctgctagagctggcaggttcccctggggcagaccagagcacctcaggaaggggctgccacggcagggaagggaccaggcagccctgggagcccgcattccacaggggcccactgcggagttctcggacactcagggcacaggcctgtgggttccctggaattttctagcatgatccagtttctgtgtccagttctccattctgagagtcaatcagttcctgataggttgtcattgatttttttcttcgttggttttaaccttctaaacatctccaggccactttcttagcctttttctaggtactaaaaagaggtcctacccacacctgcctcacacttctcctttccaaggctgcctgagtttggaggggcttgggtgtgtgtgaacaagggccctgcattgtctaggcctgcagttcccaggcttgggttcactttcaccatgcattggcaaaactagaaaagtaagcttgtgacaaattgttctcggccgggcacagtggcgcacgcctataatccctgtactttgggaggctgaggtgggtggatcacttgaggccaggagttcgagaccagcctggccaacatggtgaaaccccatctctactcaaaatacaaaaattagccaggcgtggtgatgcgcacctgcagtcccagctactcgggaggctgaggcaggaaaatggcttgaacctgggaggcagaggttgcagtgagccgagactgcaccactgcactccagcctgggtgacagagcaagactctgtctcaaaaaaaaaaaaaaaaaaaaaaaaaaaaaaattgctctatgcaagttttttagccccatgtaaaaaggaaaaataaaagttgctctaaagctacatataa

SEQ ID NO: 25064 - protein, 39 aa, Homo sapiens
MIQFLCPVLHSESQSVPDRLSLIFFFVGFNLLNISRPLS

SEQ ID NO: 25065 - DNA, 1446 bp, Homo sapiens
agcccgcggccaggcagccgggaggagcggcgcgcgctcggacctctcccgccctgctcgttcgctctccagcttgggatggccggctacctgcgggtcgtgcgctcgctctgcagagcctcaggctcgcggccggcctgggcgccggcggccctgacagcccccacctcgcaagagcagccgcggcgccacatcaagagcaacctggacagagccctgggcaggcagtagggggaggcgccacccatggctgcagtggaggggccagggctgagccggcgggtcctcctgagcgcggcagagggtgagcctcacagcccctctctggaggcctttctaggggatgtttttttataagccagatgtttttaaaagcatatgtgtgtttcccctcatggtgacgtgaggcaggagcagtgcgttttacctcagccagtcagtatgttttgcatactgtaatttatattgcccttggaacacatggtgccatatttagctactaaaaagctcttcacaaaattgtctgctgtgtttgtccctgaggggaggaggtagtgggaccctgaggcagaggccctgctagagctggcaggttcccctggggcagaccagagcacctcaggaaggggctgccacggcagggaagggaccaggcagccctgggagcccgcattccacaggggcccactgcggagttctcggacactcagggcacaggcctgtgggttccctggaattttctagcatgatccagtttctgtgtccagttctccattctgagagtcaatcagttcctgataggttgtcattgatttttttcttcgttggttttaaccttctaaacatctccaggccactttcttagcctttttctaggtactaaaaagaggtcctacccacacctgcctcacacttctcctttccaaggctgcctgagtttggaggggcttgggtgtgtgtgaacaagggccctgcattgtctaggcctgcagttcccaggcttgggttcactttcaccatgcattggcaaaactagaaaagtaagcttgtgacaaattgttctcggccgggcacagtggcgcacgcctataatccctgtactttgggaggctgaggtgggtggatcacttgaggccaggagttcgagaccagcctggccaacatggtgaaaccccatctctactcaaaatacaaaaattagccaggcgtggtgatgcgcacctgcagtcccagctactcgggaggctgaggcaggaaaatggcttgaacctgggaggcagaggttgcagtgagccgagactgcaccactgcactccagcctgggtgacagagcaagactctgtctcaaaaaaaaaaaaaaaaaaaaaaaaaaaaaaattgctctatgcaagttttttagccccatgtaaaaaggaaaaataaaagttgctctaaagctacatataa

SEQ ID NO: 25066 - protein, 50 aa, Homo sapiens
MAGYLRVVRSLCRASGSRPAWAPAALTAPTSQEQPRRHIKSNLDRALGRQ

SEQ ID NO: 25067 - DNA, 2687 bp, Homo sapiens
tgcccgcgcggccagcgcccgccaggcccagcgttagcccgcggccaggcagccgggaggagcggcgcgcgctcggacctctcccgccctgctcgttcgctctccagcttgggatggccggctacctgcgggtcgtgcgctcgctctgcagagcctcaggctcgcggccggcctgggcgccggcggccctgacagcccccacctcgcaagagcagccgcggcgccactatgccgacaaaaggatcaaggtggcgaagcccgtggtggagatggatggtgatgagatgacccgtattatctggcagttcatcaaggagaagctcatcctgccccacgtggacatccagctaaagtattttgacctcgggctcccaaaccgtgaccagactgatgaccaggtcaccattgactctgcactggccacccagaagtacagtgtggctgtcaagtgtgccaccatcacccctgatgaggcccgtgtggaagagttcaagctgaagaagatgtggaaaagtcccaatggaactatccggaacatcctgggggggactgtcttccgggagcccatcatctgcaaaaacatcccacgcctagtccctggctggaccaagcccatcaccattggcaggcacgcccatggcgaccagtacaaggccacagactttgtggcagaccgggccggcactttcaaaatggtcttcaccccaaaagatggcagtggtgtcaaggagtgggaagtgtacaacttccccgcaggcggcgtgggcatgggcatgtacaacaccgacgagtccatctcaggttttgcgcacagctgcttccagtatgccatccagaagaaatggccgctgtacatgagcaccaagaacaccatactgaaagcctacgatgggcgtttcaaggacatcttccaggagatctttgacaagcactataagaccgacttcgacaagaataagatctggtatgagcaccggctcattgatgacatggtggctcaggtcctcaagtcttcgggtggctttgtgtgggcctgcaagaactatgacggagatgtgcagtcagacatcctggcccagggctttggctcccttggcctgatgacgtccgtcctggtctgccctgatgggaagacgattgaggctgaggccgctcatgggaccgtcacccgccactatcgggagcaccagaagggccggcccaccagcaccaaccccatcgccagcatctttgcctggacacgtggcctggagcaccgggggaagctggatgggaaccaagacctcatcaggtttgcccagatgctggagaaggtgtgcgtggagacggtggagagtggagccatgaccaaggacctggcgggctgcattcacggcctcagcaatgtgaagctgaacgagcacttcctgaacaccacggacttcctcgacaccatcaagagcaacctggacagagccctgggcaggcagtagggggaggcgccacccatggctgcagtggaggggccagggctgagccggcgggtcctcctgagcgcggcagagggtgagcctcacagcccctctctggaggcctttctaggggatgtttttttataagccagatgtttttaaaagcatatgtgtgtttcccctcatggtgacgtgaggcaggagcagtgcgttttacctcagccagtcagtatgttttgcatactgtaatttatattgcccttggaacacatggtgccatatttagctactaaaaagctcttcacaaaattgtctgctgtgtttgtccctgaggggaggaggtagtgggaccctgaggcagaggccctgctagagctggcaggttcccctggggcagaccagagcacctcaggaaggggctgccacggcagggaagggaccaggcagccctgggagcccgcattccacaggggcccactgcggagttctcggacactcagggcacaggcctgtgggttccctggaattttctagcatgatccagtttctgtgtccagttctccattctgagagtcaatcagttcctgataggttgtcattgatttttttcttcgttggttttaaccttctaaacatctccaggccactttcttagcctttttctaggtactaaaaagaggtcctacccacacctgcctcacacttctcctttccaaggctgcctgagtttggaggggcttgggtgtgtgtgaacaagggccctgcattgtctaggcctgcagttcccaggcttgggttcactttcaccatgcattggcaaaactagaaaagtaagcttgtgacaaattgttctcggccgggcacagtggcgcacgcctataatccctgtactttgggaggctgaggtgggtggatcacttgaggccaggagttcgagaccagcctggccaacatggtgaaaccccatctctactcaaaatacaaaaattagccaggcgtggtgatgcgcacctgcagtcccagctactcgggaggctgaggcaggaaaatggcttgaacctgggaggcagaggttgcagtgagccgagactgcaccactgcactccagcctgggtgacagagcaagactctgtctcaaaaaaaaaaaaaaaaaaaaaaaaaaaaaaattgctctatgcaagttttttagccccatgtaaaaaggaaaaataaaagttgctctaaagctacatataa

SEQ ID NO: 25068 - protein, 452 aa, Homo sapiens; identical to SEQ ID NO: 3333

SEQ ID NO: 25069 - DNA, 755 bp, Homo sapiens
cagctaaagtattttgacctcgggctcccaaaccgtgaccagactgatgaccaggtcaccattgactctgcactggccacccagaagtacagtgtggctgtcaagtgtgccaccatcacccctgatgggaagacgattgaggctgaggccgctcatgggaccgtcacccgccactatcgggagcaccagaagggccggcccaccagcaccaaccccatcgccagcatctttgcctggacacgtggcctggagcaccgggggaagctggatgggaaccaagacctcatcaggtttgcccagatgctggagaaggtgtgcgtggagacggtggagagtggagccatgaccaaggacctggcgggctgcattcacggcctcagcaatgtgaagctgaacgagcacttcctgaacaccacggacttcctcgacaccatcaagagcaacctggacagagccctgggcaggcagtagggggaggcgccacccatggctgcagtggaggggccagggctgagccggcgggtcctcctgagcgcggcagagggtgagcctcacagcccctctctggaggcctttctaggggatgtttttttataagccagatgtttttaaaagcatatgtgtgtttcccctcatggtgacgtgaggcaggagcagtgcgttttacctcagccagtcagtatgttttgcatactgtaatttatattgcccttggaacacatggtgccatatttagctactaaaaagctcttcac

SEQ ID NO: 25070 - protein, 99 aa, Homo sapiens; identical to SEQ ID NO: 25062

SEQ ID NO: 25071 - DNA, 398 bp, Homo sapiens
agctcatcctgccccacgtggacatccagctaaagtattttgacctcgggctcccaaaccgtgaccagactgatgaccaggtcaccattgactagagccctgggcaggcagtagggggaggcgccacccatggctgcagtggaggggccagggctgagccggcgggtcctcctgagcgcggcagagggtgagcctcacagcccctctctggaggcctttctaggggatgtttttttataagccagatgtttttaaaagcatatgtgtgtttcccctcatggtgacgtgaggcaggagcagtgcgttttacctcagccagtcagtatgttttgcatactgtaatttatattgcccttggaacacatggtgccatatttagctactaaaaagctcttcac

SEQ ID NO: 25072 - protein, 36 aa, Homo sapiens [sequence omitted]

SEQ ID NO: 25073 - DNA, 1756 bp, Homo sapiens
tgcccgcgcggccagcgcccgccaggcccagcgttagcccgcggccaggcagccgggaggagcggcgcgcgctcggacctctcccgccctgctcgttcgctctccagcttgggatggccggctacctgcgggtcgtgcgctcgctctgcagagcctcaggctcgcggccggcctgggcgccggcggccctgacagcccccacctcgcaagagcagccgcggcgccactatgccgacaaaaggatcaaggtggcgaagcccgtggtggagatggatggtgatgagatgacccgtattatctggcagttcatcaaggagaagctcatcctgccccacgtggacatccagctaaagtattttgacctcgggctcccaaaccgtgaccagactgatgaccaggtcaccattgactctgcactggccacccagaagtacagtgtggctgtcaagtgtgccaccatcacccctgatgaggcccgtgtggaagagttcaagctgaagaagatgtggaaaagtcccaatggaactatccggaacatcctgggggggactgtcttccgggagcccatcatctgcaaaaacatcccacgcctagtccctggctggaccaagcccatcaccattggcaggcacgcccatggcgaccagtacaaggccacagactttgtggcagaccgggccggcactttcaaaatggtcttcaccccaaaagatggcagtggtgtcaaggagtgggaagtgtacaacttccccgcaggcggcgtgggcatgggcatgtacaacaccgacgagtccatctcaggttttgcgcacagctgcttccagtatgccatccagaagaaatggccgctgtacatgagcaccaagaacaccatactgaaagcctacgatgggcgtttcaaggacatcttccaggagatctttgacaagcactataagaccgacttcgacaagaataagatctggtatgagcaccggctcattgatgacatggtggctcaggtcctcaagtcttcgggtggctttgtgtgggcctgcaagaactatgacggagatgtgcagtcagacatcctggcccagggctttggctcccttggcctgatgacgtccgtcctggtctgccctgatgggaagacgattgaggctgaggccgctcatgggaccgtcacccgccactatcgggagcaccagaagggccggcccaccagcaccaaccccatcgccagcatctttgcctggacacgtggcctggagcaccgggggaagctggatgggaaccaagacctcatcaggtttgcccagatgctggagaaggtgtgcgtggagacggtggagagtggagccatgaccaaggacctggcgggctgcattcacggcctcagcaatgtgaagctgaacgagcacttcctgaacaccacggacttcctcgacaccatcaagagcaacctggacagagccctgggcaggcagtagggggaggcgccacccatggctgcagtggaggggccagggctgagccggcgggtcctcctgagcgcggcagagggtgagcctcacagcccctctctggaggcctttctaggggatgtttttttataagccagatgtttttaaaagcatatgtgtgtttcccctcatggtgacgtgaggcaggagcagtgcgttttacctcagccagtcagtatgttttgcatactgtaatttatattgcccttggaacacatggtgccatatttagctactaaaaagctcttcac

SEQ ID NO: 25074 - protein, 452 aa, Homo sapiens; identical to SEQ ID NO: 3333

SEQ ID NO: 25075 - DNA, 804 bp, Homo sapiens
tgcccgcgcggccagcgcccgccaggcccagcgttagcccgcggccaggcagccgggaggagcggcgcgcgctcggacctctcccgccctgctcgttcgctctccagcttgggatggccggctacctgcgggtcgtgcgctcgctctgcagagcctcaggctcgcggccggcctgggcgccggcggccctgacagcccccacctcgcaagagcagccgcggcgccactatgccgacaaaaggatcaaggtggcgaagcccgtggtggagatggatggtgatgagatgacccgtattatctggcagttcatcaaggagaagctcatcctgccccacgtggacatccagctaaagtattttgacctcgggctcccaaaccgtgaccagactgatgaccaggtcaccattgactctgcactggccacccagaagtacagtgtggctgtcaagtgtgccaccatcacccctgatgaggcccgtgtggaagagttcaagctgaagaagatgtggaaaagtcccaatggaactatccggaacatcctgggggggactgtcttccgggagcccatcatctgcaaaaacatcccacgcctagtccctggctggaccaagcccatcaccattggcaggcacgcccatggcgaccagtacaaggccacagactttgtggcagaccgggccggcactttcaaaatggtcttcaccccaaaagatggcagtggtgtcaaggagtgggaagtgtacaacttccccgcaggcggcgtgggcatgggcatgtacaacaccgacgagaaaagaaatggcc

SEQ ID NO: 25076 - protein, 229 aa, Homo sapiens
MAGYLRVVRSLCRASGSRPAWAPAALTAPTSQEQPRRHYADKRIKVAKPVVEMDGDEMTRIIWQFIKEKLILPHVDIQLKYFDLGLPNRDQTDDQVTIDSALATQKYSVAVKCATITPDEARVEEFKLKKMWKSPNGTIRNILGGTVFREPIICKNIPRLVPGWTKPITIGRHAHGDQYKATDFVADRAGTFKMVFTPKDGSGVKEWEVYNFPAGGVGMGMYNTDEKRN

SEQ ID NO: 25077 - DNA, 349 bp, Homo sapiens
cagctccgcaggagctacaggcgtgagacccaccgggacccgcgagcgggatcagggctgggggattagcagagccgcttgcgaggctgaccctctccaggatgccccatcattccttccttctgagtacggggcaggactctctctgggatggaggggtcttaggacctgcaagcaaacaagggggagatgcattagagtgcagtgatacgatcacagctcattgcagccttgacctcctgggctcaagcaatccttccacctcagcctcccaagtagcgccactgaaatctatgttcttactcagcccacctgcactgaggtgaaataaacagctttattgctcaca

SEQ ID NO: 25078 - protein, 74 aa, Homo sapiens
MPHHSFLLSTGQDSLWDGGVLGPASKQGGDALECSDTITAHCSLDLLGSSNPSTSASQVAPLKSMFLLSPPALR

SEQ ID NO: 25079 - DNA, 3378 bp, Homo sapiens
taagagctgggcatggcagaatgtgcctacagtcccagttacttgggaggccgaggtgggagaatcgcttgagcctcggaggttgaggctgcagtgagctatgattgcaccactgcactccagcctgggataacagtgagacccccatctctaaataaaatcaatcgatcttcaattatgtctcattatacagtttacttaaccagatttttacaatggtgccatggtgtaggcaatcccggattaagaggtcccttttacaaataaggaaatagactttaagatggctgccagtaagtggcagtgctgggacttaactcgggtctcatcattaatccagggcttctggaattccgggaatatggcactgtctgccataattttgttaatttactgcttgttttagaaatacatctgttataactagaaattcggggacagcttagtcaatttgttttccttacaagcaaaataaagtaaaatgtagcagtctgctcattagtgctctggtgggatggtttacctgtgaaccttggagaaccatgtcctgctttcacaatttaccaggaaaaatggctactccgaatttaaatatatgtaggacattaatggaaacacctacattccaactcagtcattgccactctgtagaatcttactgctatttcaaatgtccaattacagcaattaaaatactgattactgttgcttttatcaattattattgataacttgaggatctgttctcagtataaatgacaaagccctgtcacatgccaagcaaaattctacgatccagatgctggtaatacaacagtgggcagataggacctttgctgtcactgccctgtcactatcatgtagttcatagtagaagcttatcagtatttttatggttttgttatatttatggtatttaattgttaaagatgtgttagatgctgtttgattgtttaaatttgcatttctcactcctgcaaatatctgatcatgccatacccttttcgcagtgggctatagaaacctaaaggctgttcttaaaactttgttttttaatttatttttgacacggactctcgctctgtcgcccaggctggagtacagtggcacaatctcagctcactgcaacctccgcctcccaggttcaactgattctcctgcttcaacctcccgagtagctgggattacaggcgtctgccactgtgcccagctaatttttgtgtttttagtagagatggggtttcaccatgttggccaggctggtctcaaactctgacctcaagtgatctgcctgtctcggcctcctacagtgctaggattacaggtgtgagccaccacgcctggcctttatttttcttttgagacagggtctcactcttgtcgtccacactggagtacagtggctcaatcttgcctcactgcaacctctgcctcccaggttcaagcggttctcattcttcagcctcccgagtagctggaactacaggcgggcaccaccatgcccagctaattttttttatatttttagtagagacaggatttcaccatgttggccaagctggtctcaaactcctgacctcaagttatctacctgccttggcctcccaaagtgctgggattataggcgtgagccaacacgcctgacctttatttcttttgagacagggtcttgctctgtcatccatgctggagtgcagtggctcaatctcagctcactgcaatctctgcctcctgggttcaaactattctcattccttagcctcccgagtagctgggactacaggcatgcaccaccacacccagctaatcttttatttttagtagagataggatttcactatcttggccaggctggtctcgaactcctgtgctcaggtgatctgcctgcttcggcctcccaaaatgctgagattacaacgtgagccaccacgtgaggcaggcggatcacctgaggtcaggagtttcagaccagcctggccaacatggcaaaaccccatctctactaaaaatacaaaaattatctgggtgtggtggcagatgcctgtaatcccagctactgggaaggctgaggcaggagaattgcttgaacccgggaggcagaggttgcagtgagccgagattgtgccactgcacttcaccttgggtgacagtgagactccatctcaaacaaacaaacacctccaatgctgtatctcaaataccatgtctacccttcttcctgctttacttcatctattacacaagtaatacatactcattaaagaaaaagacaagcaaaatgaaaacaaaagtcatccctgatcccaccagtgaagagttactatcctaccaacatttttctaagcatatgtacaactttaagacaagcacgaaagaataatacgcgcccagccctgaataattcattcttgctaagcttcatgttgactctatatatcatctaagaaagtattgttttgtggtccaaacctgttgccgtggttagtaaggctttcttaggtgtgaaatatttagatgaaattttctcttttaaagttctgtatagggttagggtgttggaaaatgctatattaataaatctgtagtgttttgtgtttataggttcagaaccagagtaactggattgaaagatggactgatagattagatatatcagtctaatttatcatgactgatagatctggttaagttgtgtactaaaggattaggagagcccttcctgtcacaaaagtgccactaaaacagcctaaggagaaaaatggcttgcttttctaaacttcagatgtatctgggctctaatcatatagacaggcttctgatagattgcaactgtaagtagaaacctacatatagttaaaatcctggtctttcttggtaaacagatttaaaatgtctgatgtaaaacatgccacaggagaattcagggatttgagtttccctgaatagcatatatatgatgcatcaaatgggttattactattttttaccatttccacttacataatgaaaaacaattcattttaaatatcacattattattttgtaagtcatggaaaagggcaattgaagttttcattatgaagttttcccaataaaccaggaattctaaacttgaaaaaaaaaaatagaattagccaggtatggttgcacaggcctgtaatcccagctacccgggaggctgaggcaggagaatcacctgaacctgagaggcagaggcttcagtgagccgaggccacaccactgcactccggccttggtgacagagactctgcctcgaaagataaaaataataatgaaagtaatattgggattatactgtacattctttcttacatgtatggtgaatatattttgacaataaatatctttacatcagtt

SEQ ID NO: 25080 - protein, 69 aa, Homo sapiens [sequence omitted]

SEQ ID NO: 25081 - DNA, 615 bp, Homo sapiens
ttattattgataacttgaggatctgttctcagtataaatgacaaagccctgtcacatgccaagcaaaattctacgatccagatgctggtaatacaacagtgggcagataggacctttgctgtcactgccctgtcactatcatgtagttcatagtagaagcttatcagtatttttatggttttgttatatttatggtatttaattgttaaagatgtgttagatgctgtttgattgtttaaatttgcatttctcactcctgcaaatatctgatcatgccatacccttttcgcagtgggctatagaaacctaaaggctgttcttaaaactttgttttttaatttatttttgacacggactctcgctctgtcgcccaggctggagtacagtggcacaatctcagctcactgcaacctccgcctcccaggagaatcacctgaacctgagaggcagaggcttcagtgagccgaggccacaccactgcactccggccttggtgacagagactctgcctcgaaagataaaaataataatgaaagtaatattgggattatactgtacattctttcttacatgtatggtgaatatattttgacaataaatatctttacatcagtt

SEQ ID NO: 25082 - protein, 63 aa, Homo sapiens
SCHTLFAVGYRNLKAVLKTLFFNLFLTRTLALSPRLEYSGTISAHCNLRLPGESPEPERQRLQ

SEQ ID NO: 25083 - DNA, 481 bp, Homo sapiens
gtgactggaggcattcatcagtgctcactgggatttcactgatgtggcccaaccccgcctccctccacaccccatgatgtcagaaaaaacacgacagggcaaatgggccgcagccaggaaaaaggtggcatttttcaactccgctggaaccagtgcccaggaggagcaaaggatgtgctgccagcccctggctcacccagtggcctcgtcccagaagaagccagaagcagcagccccagccccagggactgggggaaagtacatcaccccatatgggagccaggggacagtgccaaagatgcggcaccgggaggaggaggagatcgtcaggctggcccaggaccgggaggagatgaaggtgaacctgctggagatgcaggggcaggtgttgcggcttgtgagagaccacaatgagggacatggcaagttcctggccactgcccagaaccctgctgatgagcccactctaggagccccagcc

SEQ ID NO: 25084 - protein, 135 aa, Homo sapiens
MMSEKTRQGKWAAARKKVAFFNSAGTSAQEEQRMCCQPLAHPVASSQKKPEAAAPAPGTGGKYITPYGSQGTVPKMRHREEEEIVRLAQDREEMKVNLLEMQGQVLRLVRDHNEGHGKFLATAQNPADEPTLGAP

SEQ ID NO: 25085 - DNA, 873 bp, Homo sapiens
atgcccagggacttccagcaggtggagctgaagagccaagaggctcagagtctgcagcagcagcgaggccagtacctgggtcacctgaagcagtacgtggccacttatcagcagcaggagcacctggaagctaccagccagcagaaccagcaactacaggcccagttgagcctcatggctctccctggggaagtaaaaataaagaacagctcattcccctctggggaggggctggctcaaggttacacagagatggaggaggaggcgcctcagcccatgccgaacatcccaggggacctggagagccgggagacggtggtggcatttttcaactccgctggaaccagtgcccaggaggagcaaaggatgtgctgccagcccctggctcacccagtggcctcgtcccagaagaagccagaagcagcagccccagccccagggactgggggaaagtacatcaccccatatgggagccaggggacagtgccaaagatgcggcaccgggaggaggaggagatcgtcaggctggcccaggaccgggaggagatgaaggtgaacctgctggagatgcaggggcaggtgttgcggcttgtgagagaccacaatgagggacatggcaagttcctggccactgcccagaaccctgctgatgagcccactctaggagccccagccccccaagagcttgtgagcctcactgacagcgtggagcccgcaccaggagaggccagggagggttctccccacgacaaccccactgcacagcagatcatgcagctgcttcctgtaacgcaggactccccaggagcacccaggcttgggcagcaatctctgcatgcctttcttttcgagctgccgagaacagggagataa

SEQ ID NO: 25086 - protein, 290 aa, Homo sapiens
MPRDFQQVELKSQEAQSLQQQRGQYLGHLKQYVATYQQQEHLEATSQQNQQLQAQLSLMALPGEVKIKNSSFPSGEGLAQGYTEMEEEAPQPMPNIPGDLESRETVVAFFNSAGTSAQEEQRMCCQPLAHPVASSQKKPEAAAPAPGTGGKYITPYGSQGTVPKMRHREEEEIVRLAQDREEMKVNLLEMQGQVLRLVRDHNEGHGKFLATAQNPADEPTLGAPAPQELVSLTDSVEPAPGEAREGSPHDNPTAQQIMQLLPVTQDSPGAPRLGQQSLHAFLFELPRTGR

SEQ ID NO: 25087 - DNA, 436 bp, Homo sapiens
ggtggcatttttcaactccgctggaaccagtgcccaggaggagcaaaggatgtgctgccagcccctggctcacccagtggcctcgtcccagaagaagccagaagcagcagccccagccccagggactgggggaaagtacatcaccccatatgggagccaggggacagtgccaaagatgcggcaccgggaggaggaggagatcgtcaggctggcccaggaccgggaggagatgaaggtactctgcataacaactggttatgatcagggccaatgactccccaccacttcccagcagataaggctcaggcattgaagcagagagtccctttgggccctgaggatgcaggaagtacctgcacccacctaagacctccatcattggttcatccaaactacttcctaatgtcagaataagaaacaagtctcttttgggctc

SEQ ID NO: 25088 - protein, 74 aa, Homo sapiens
MCCQPLAHPVASSQKKPEAAAPAPGTGGKYITPYGSQGTVPKMRHREEEEIVRLAQDREEMKVLCITTGYDQGQ

SEQ ID NO: 25089 - DNA, 722 bp, Homo sapiens
gtggcatttttcaactccgctggaaccagtgcccaggaggagcaaaggatgtgctgccagcccctggctcacccagtggcctcgtcccagaagaagccagaagcagcagccccagccccagggactgggggaaagtacatcaccccatatgggagccaggggacagtgccaaagatgcggcaccgggaggaggaggagatcgtcaggctggcccaggaccgggaggagatgaaggtgaacctgctggagatgcaggggcaggtgttgcggcttgtgagagaccacaatgagggacatggcaagttcctggccactgcccagaaccctgctgatgagcccactctaggagccccagccccccaagagcttgtgtgtgctgacaagcaggatggccagtagaaccttcaggcagggtgagcaggcaggagcaggggaggctcgcatggcgctccgatcccctcctccctctctccgaagatctttgtgaggtgagcctcactgacagcgtggagcccgcaccaggagaggccagggagggttctccccacgacaaccccactgcacagcagatcatgcagctgcttcctgtaacgcaggactccccaggagcacccaggcttgggcagcaatctctgcatgcctttcttttcgagctgccgagaacagggagataaacaccaccatcatctaagagctggtcaagaaattaaaaaaaaaaaaaa

SEQ ID NO: 25090 - protein, 116 aa, Homo sapiens
MCCQPLAHPVASSQKKPEAAAPAPGTGGKYITPYGSQGTVPKMRHREEEEIVRLAQDREEMKVNLLEMQGQVLRLVRDHNEGHGKFLATAQNPADEPTLGAPAPQELVCADKQDGQ

SEQ ID NO: 25091 - DNA, 1772 bp, Homo sapiens
ccggtcgggttctgggaggcacagcctcggggttgcgggccgggtgcggctcggcggtggaggactcacttcctgctccatccccggctgggccctggggcggaactgatgacgcttgataatgtggctggggacttcagggaagagtgggttacctggacactgcttagagaatcctctccaggaatgccacccagcacagttagaagaatgggctctcaaaggaatttccaggcctagtgtaatctcccagccggagcagaaagaagagccatgggtcctaccactccaaaactttgaggcgaggaagatcccgagggaaagccacacagactgtgagcatcaggtggcaaagctcaatcaggacaattctgaaacagcagaacaatgtggaacatcctcagaaaggaccaataaagatctttctcatactcttagttggggaggaaactgggagcaaggcctagaattagaagggcaacatggaacccttccaggagagggccagctggagtccttttcacaggagagggatttaaacaagctcctggatggatatgtaggagagaagcctatgtgtgcagaatgcgggaaaagctttaaccagagttcctatctcataagacacctaagaacccacactggcgagaggccctatacgtgcattgagtgtgggaaaggcttcaaacagagctcagaccttgtcacccatcgcagaacacacacaggagagaagccctaccaatgcaaggggtgtgagaagaaattcagcgacagctcaacactcatcaaacatcagagaacccacacaggggagagaccctatgagtgcccagagtgtggaaagacttttgggcggaagccacacctcataatgcaccaaagaacccacacaggcgagaagccctacgcgtgcctggaatgtcacaaaagcttcagtcgaagctcaaatttcatcactcaccagaggacccacacaggggtgaagccttacaggtgtaatgactgtggggagagttttagccagagctcggatttgattaagcaccaacgaacccacacgggagaacggcccttcaaatgcccggagtgcgggaagggcttcagagatagttctcattttgtagctcacatgagcactcattcaggagagaggcctttcagttgtcctgactgccacaaaagcttcagtcagagctcacatttggtcacgcaccaaagaacacacacaggtgagagaccttttaagtgcgaaaactgtgggaaaggattcgccgacagctccgccctcattaagcaccaacgaatccacaccggagaaagaccctacaaatgtggagagtgtgggaagagcttcaatcagagctcccactttattacccatcagcgaatccacttaggagacaggccctatcgatgtcctgagtgtggcaagaccttcaatcagcgttcccatttcctcacacaccagagaacgcatacaggagaaaaacctttccactgtagtaaatgtaacaagagcttccgtcagaaagcgcatcttttatgccatcaaaacacccatttgatttaggaagtagtctttggtgttcagctgctcccttgcacattttcattgctactgtcttcaagcaccccaaatagagaaaacctgggcgtcagtggctcaatttgggccctgatctattctccctctttcttgtctatgttataacagagaggataaacttaaagggtccaaataacggtccgaatacaaaaggcattccttc

SEQ ID NO: 25092 - protein, 483 aa, Homo sapiens
MWLGTSGKSGLPGHCLENPLQECHPAQLEEWALKGISRPSVISQPEQKEEPWVLPLQNFEARKIPRESHTDCEHQVAKLNQDNSETAEQCGTSSERTNKDLSHTLSWGGNWEQGLELEGQHGTLPGEGQLESFSQERDLNKLLDGYVGEKPMCAECGKSFNQSSYLIRHLRTHTGERPYTCIECGKGFKQSSDLVTHRRTHTGEKPYQCKGCEKKFSDSSTLIKHQRTHTGERPYECPECGKTFGRKPHLIMHQRTHTGEKPYACLECHKSFSRSSNFITHQRTHTGVKPYRCNDCGESFSQSSDLIKHQRTHTGERPFKCPECGKGFRDSSHFVAHMSTHSGERPFSCPDCHKSFSQSSHLVTHQRTHTGERPFKCENCGKGFADSSALIKHQRIHTGERPYKCGECGKSFNQSSHFITHQRIHLGDRPYRCPECGKTFNQRSHFLTHQRTHTGEKPFHCSKCNKSFRQKAHLLCHQNTHLI

SEQ ID NO: 25093 - DNA, 2506 bp, Homo sapiens
cggtcgggttctgggaggcacagcctcggggttgcgggccgggtgcggctcggcggtggaggactcacttcctgctccatccccggctgggccctggggcggaactgatgacgcttgataatgtggctggggacttcagggaagagtgggttacctggacactgcttagagaatcctctccaggaatgccacccagcacagttagaagaatgggctctcaaaggaatttccaggcctagtgtaatctcccagccggagcagaaagaagagccatgggtcctaccactccaaaactttgaggcgaggaagatcccgagggaaagccacacagactgtgagcatcaggtggcaaagctcaatcaggacaattctgaaacagcagaacaatgtggaacatcctcagaaaggaccaataaagatctttctcatactcttagttggggaggaaactgggagcaaggcctagaattagaagggcaacatggaacccttccaggagagggccagctggagtccttttcacaggagagggatttaaacaagctcctggatggatatgtaggagagaagcctatgtgtgcagaatgcgggaaaagctttaaccagagttcctatctcataagacacctaagaacccacactggcgagaggccctatacgtgcattgagtgtgggaaaggcttcaaacagagctcagaccttgtcacccatcgcagaacacacacaggagagaagccctaccaatgcaaggggtgtgagaagaaattcagcgacagctcaacactcatcaaacatcagagaacccacacaggggagagaccctatgagtgcccagagtgtggaaagacttttgggcggaagccacacctcataatgcaccaaagaacccacacaggcgagaagccctacgcgtgcctggaatgtcacaaaagcttcagtcgaagctcaaatttcatcactcaccagaggacccacacaggggtgaagccttacaggtgtaatgactgtggggagagttttagccagagctcggatttgattaagcaccaacgaacccacacgggagaacggcccttcaaatgcccggagtgcgggaagggcttcagagatagttctcattttgtagctcacatgagcactcattcaggagagaggcctttcagttgtcctgactgccacaaaagcttcagtcagagctcacatttggtcacgcaccaaagaacacacacaggtgagagaccttttaagtgcgaaaactgtgggaaaggattcgccgacagctccgccctcattaagcaccaacgaatccacaccggagaaagaccctacaaatgtggagagtgtgggaagagcttcaatcagagctcccactttattacccatcagcgaatccacttaggagacaggccctatcgatgtcctgagtgtggcaagaccttcaatcagcgttcccatttcctcacacaccagagaacgcatacaggagaaaaacctttccactgtagtaaatgtaacaagagcttccgtcagaaagcgcatcttttatgccatcaaaacacccatttgatttaggaagtagtctttggtgttcagctgctcccttgcacattttcattgctactgtcttcaagcaccccaaatagagaaaacctgggcgtcagtggctcaatttgggccctgatctattctccctctttcttgtctatgttataacagagaggataaacttaaagggtccaaataacggtccgaatacaaaaggcattccttcagtgtgtgactgactcttagggaaatgtgagtttaatagttgatgcccgccaggcgtggtggctcacccctgtaatcccagcacttttgggaggccaaggtgggtggatcacttgaggtcaggagttgagaccagcctggtgagcatggtgaaacctcatctctactaaaaatgcaaaaattagctgggcatggtggcacgtgcctgtagtcccagctactcgggaggccgaggcagaagaatcatttgaactcagaaggtgcaggttgcagtgagttgagatcatgccactgcactccagcctgggcaacagagagagactctgtctccaaaaaaattaaaaagttgatgcctagttactaaatgagaagtgagaaaaatgtggcctagagatcacatgttcaccacctagtacagtgcctggcacaacatagatgctcaataactaaatggtcccatcattattaatgattaatagttgaggtcttatataaaggctttaatgcagtacctggcccttaaaagacactcagtacaagattggtggcttttatcagtcttattactcaattagaaatttattagtgtagtccccccgccccaaactcagaacgtgaaagaaattagattggaactagaaggtttggggttggaatacacaaattgaataaaatggaaatgcactgccagttcagtgctgtgcaggcattagtcaccagaggtctcactgccatg

SEQ ID NO: 25094 - protein, 483 aa, Homo sapiens; identical to SEQ ID NO: 25092

SEQ ID NO: 25095 - DNA, 6542 bp, Homo sapiens
gacggcacggggcggggcctcggggaccccggcaagcccgcgcacttggcaggagctgtagctaccgccgtccgcgcctccaaggtttcacggcttcctcagcagagactcgggctcgtccgccatgtccgccgcagacgaggttgacgggctgggcgtggcccggccgcactatggctctgtcctggataatgaaagacttactgcagaggagatggatgaaaggagacgtcagaacgtggcttatgagtacctttgtcatttggaagaagcgaagaggtggatggaagcatgcctaggggaagatctgcctcccaccacagaactggaggaggggcttaggaatggggtctaccttgccaaactggggaacttcttctctcccaaagtagtgtccctgaaaaaaatctatgatcgagaacagaccagatacaaggcgactggcctccactttagacacactgataatgtgattcagtggttgaatgccatggatgagattggattgcctaagattttttacccagaaactacagatatctatgatcgaaagaacatgccaagatgtatctactgtatccatgcactcagtttgtacctgttcaagctaggcctggcccctcagattcaagacctatatggaaaggttgacttcacagaagaagaaatcaacaacatgaagactgagttggagaagtatggcatccagatgcctgcctttagcaagattgggggcatcttggctaatgaactgtcagtggatgaagccgcattacatgctgctgttattgctattaatgaagctattgaccgtagaattccagccgacacatttgcagctttgaaaaatccgaatgccatgcttgtaaatcttgaagagcccttggcatccacttaccaggatatactttaccaggctaagcaggacaaaatgacaaatgctaaaaacaggacagaaaactcagagagagaaagagatgtttatgaggagctgctcacgcaagctgaaattcaaggcaatataaacaaagtcaatacattttctgcattagcaaatatcgacctggctttagaacaaggagatgcactggccttgttcagggctctgcagtcaccagccctggggcttcgaggactgcagcaacagaatagcgactggtacttgaagcagctcctgagtgataaacagcagaagagacagagtggtcagactgaccccctgcagaaggaggagctgcagtctggagtggatgctgcaaacagtgctgcccagcaatatcagagaagattggcagcagtagcactgattaatgctgcaatccagaagggtgttgctgagaagactgttttggaactgatgaatcccgaagcccagctgccccaggtgtatccatttgccgccgatctctatcagaaggagctggctaccctgcagcgacaaagtcctgaacataatctcacccacccagagctctctgtcgcagtggagatgttgtcatcggtggccctgatcaacagggcattggaatcaggagatgtgaatacagtgtggaagcaattgagcagttcagttactggtcttaccaatattgaggaagaaaactgtcagaggtatctcgatgagttgatgaaactgaaggctcaggcacatgcagagaataatgaattcattacatggaatgatatccaagcttgcgtggaccatgtgaacctggtggtgcaagaggaacatgagaggattttagccattggtttaattaatgaagccctggatgaaggtgatgcccaaaagactctgcaggccctacagattcctgcagctaaacttgagggagtccttgcagaagtggcccagcattaccaagacacgctgattagagcgaagagagagaaagcccaggaaatccaggatgagtcagctgtgttatggttggatgaaattcaaggtggaatctggcagtccaacaaagacacccaagaagcacagaagtttgccttaggaatctttgccattaatgaggcagtagaaagtggtgatgttggcaaaacactgagtgcccttcgctcccctgatgttggcttgtatggagtcatccctgagtgtggtgaaacttaccacagtgatcttgctgaagccaagaagaaaaaactggcagtaggagataataacagcaagtgggtgaagcactgggtaaaaggtggatattattattaccacaatctggagacccaggaaggaggatgggatgaacctccaaattttgtgcaaaattctatgcagctttctcgggaggagatccagagttctatctctggggtgactgccgcatataaccgagaacagctgtggctggccaatgaaggcctgatcaccaggctgcaggctcgctgccgtggatacttagttcgacaggaattccgatccaggatgaatttcctgaagaaacaaatccctgccatcacctgcattcagtcacagtggagaggatacaagcagaagaaggcatatcaagatcggttagcttacctgcgctcccacaaagatgaagttgtaaagattcagtccctggcaaggatgcaccaagctcgaaagcgctatcgagatcgcctgcagtacttccgggaccatataaatgacattatcaaaatccaggcttttattcgggcaaacaaagctcgggatgactacaagactctcatcaatgctgaggatcctcctatggttgtggtccgaaaatttgtccacctgctggaccaaagtgaccaggattttcaggaggagcttgaccttatgaagatgcgggaagaggttatcaccctcattcgttctaaccagcagctggagaatgacctcaatctcatggatatcaaaattggactgctagtgaaaaataagattacgttgcaggatgtggtttcccacagtaaaaaacttaccaaaaaaaataaggaacagttgtctgatatgatgatgataaataaacagaagggaggtctcaaggctttgagcaaggagaagagagagaagttggaagcttaccagcacctgttttatttattgcaaaccaatcccacctatctggccaagctcatttttcagatgccccagaacaagtccaccaagttcatggactctgtaatcttcacactctacaactacgcgtccaaccagcgagaggagtacctgctcctgcggctctttaagacagcactccaagaggaaatcaagtcgaaggtagatcagattcaagagattgtgacaggaaatcctacggttattaaaatggttgtaagtttcaaccgtggtgcccgtggccagaatgccctgagacagatcttggccccagtcgtgaaggaaattatggatgacaaatctctcaacatcaaaactgaccctgtggatatttacaaatcttgggttaatcagatggagtctcagacaggagaggcaagcaaactgccctatgatgtgacccctgagcaggcgctagctcatgaagaagtgaagacacggctagacagctccatcaggaacatgcgggctgtgacagacaagtttctctcagccattgtcagctctgtggacaaaatcccttatgggatgcgcttcattgccaaagtgctgaaggactcgttgcatgagaagttccctgatgctggtgaggatgagctgctgaagattattggtaacttgctttattatcgatacatgaatccagccattgttgctcctgatgcctttgacatcattgacctgtcagcaggaggccagcttaccacagaccaacgccgaaatctgggctccattgcaaaaatgcttcagcatgctgcttccaataagatgtttctgggagataatgcccacttaagcatcattaatgaatatctttcccagtcctaccagaaattcagacggtttttccaaactgcttgtgatgtcccagagcttcaggataaatttaatgtggatgagtactctgatttagtaaccctcaccaaaccagtaatctacatttccattggtgaaatcatcaacacccacactctcctgttggatcaccaggatgccattgctccggagcacaatgatccaatccacgaactgctggacgacctcggcgaggtgcccaccatcgagtccctgataggggaaagctctggcaatttaaatgacccaaataaggaggcactggctaagacggaagtgtctctcaccctgaccaacaagttcgacgtgcctggagatgagaatgcagaaatggatgctcgaaccatcttactgaatacaaaacgtttaattgtggatgtcatccggttccagccaggagagaccttgactgaaatcctagaaacaccagccaccagtgaacaggaagcagaacatcagagagccatgcagagacgtgctatccgtgatgccaaaacacctgacaagatgaaaaagtcaaaatctgtaaaggaagacagcaacctcactcttcaagagaagaaagagaagatccagacaggtttaaagaagctaacagagcttggaaccgtggacccaaagaacaaataccaggaactgatcaacgacattgccagggatattcggaatcagcggaggtaccgacagaggagaaaggccgaactagtgaaactgcaacagacatacgctgctctgaactctaaggccaccttttatggggagcaggtggattactataaaagctatatcaaaacctgcttggataacttagccagcaagggcaaagtctccaaaaagcctagggaaatgaaaggaaagaaaagcaaaaagatttctctgaaatatacagcagcaagactacatgaaaaaggagttcttctggaaattgaggacctgcaagtgaatcagtttaaaaatgttatatttgaaatcagtccaacagaagaagttggagacttcgaagtgaaagccaaattcatgggagttcaaatggagacttttatgttacattatcaggacctgctgcagctacagtatgaaggagttgcagtcatgaaattatttgatagagctaaagtaaatgtcaacctcctgatcttccttctcaacaaaaagttctacgggaagtaattgatcgtttgctgccagcccagaaggatgaaggaaagaagcacctcacagctcctttctaggtccttctttcctcattggaagcaaagacctagccaacaacagcacctcaatctgatacactcccgatgccacatttttaactcctctcgctctgatgggacatttgttacccttttttcatagtgaaattgtgtttcaggcttagtctgacctttctggtttcttcattttcttccattacttaggaaagagtggaaactccactaaaatttctctgtgttgttacagtcttagaggttgcagtactatattgtaagctttggtgtttgtttaattagcaatagggatggtaggattcaaatgtgtgtcatttagaagtggaagctattagcaccaatgacataaatacatacaagacacacaactaaaatgtcatgttattaacagttattaggttgtcatttaaaaataaagttcctttatatttctgtcccatcaggaaaactgaaggatatggggaatcattggttatcttccattgtgtttttctttatggacaggagctaatggaagtgacagtcatgttcaaaggaagcatttctagaaaaaaggagataatgtttttaaatttcattatcaaacttgggcaattctgtttgtgtaactccccgactagtggatgggagagtcccattgctaaaattcagctactcagataaattcagaatgggtcaaggcacctgcctgtttttgttggtgcacagagattgacttgattcagagagacaattcactccatccctatggcagaggaatgggttagccctaatgtagaatgtcattgtttttaaaactgttttatatcttaagagtgccttattaaagtatagatgtatgtcttaaaatgtgggtgataggaattttaaagatttatataatgcatcaaaagccttagaataagaaaagctttttttaaattgctttatctgtatatctgaactcttgaaacttatagctaaaacactaggatttatctgcagtgttcagggagataattctgcctttaattgtctaaaacaaaaacaaaaccagccaacctatgttacacgtgagattaaaaccaattttttccccattttttctccttttttctcttgctgcccacattgtgcctttattttatgagccccagttttctgggcttagtttaaaaaaaaaatcaagtctaaacattgcatttagaaagcttttgttcttggataaaaagtcatacactttaaaaaaaaaaaaaactttttccaggaaaatatattgaaatcatgctgctgagcctctattttctttctttgatgttttgattcagtattcttttatcataaatttttagcatttaaaaattcactgatgtacattaagccaataaactgctttaatgaataac

SEQ ID NO: 25096 - protein, 1657 aa, Homo sapiens; identical to SEQ ID NO: 3337

SEQ ID NO: 25097 - DNA, 7233 bp, Homo sapiens
gacggcacggggcggggcctcggggaccccggcaagcccgcgcacttggcaggagctgtagctaccgccgtccgcgcctccaaggtttcacggcttcctcagcagagactcgggctcgtccgccatgtccgccgcagacgaggttgacgggctgggcgtggcccggccgcactatggctctgtcctggataatgaaagacttactgcagaggagatggatgaaaggagacgtcagaacgtggcttatgagtacctttgtcatttggaagaagcgaagaggtggatggaagcatgcctaggggaagatctgcctcccaccacagaactggaggaggggcttaggaatggggtctaccttgccaaactggggaacttcttctctcccaaagtagtgtccctgaaaaaaatctatgatcgagaacagaccagatacaaggcgactggcctccactttagacacactgataatgtgattcagtggttgaatgccatggatgagattggattgcctaagattttttacccagaaactacagatatctatgatcgaaagaacatgccaagatgtatctactgtatccatgcactcagtttgtacctgttcaagctaggcctggcccctcagattcaagacctatatggaaaggttgacttcacagaagaagaaatcaacaacatgaagactgagttggagaagtatggcatccagatgcctgcctttagcaagattgggggcatcttggctaatgaactgtcagtggatgaagccgcattacatgctgctgttattgctattaatgaagctattgaccgtagaattccagccgacacatttgcagctttgaaaaatccgaatgccatgcttgtaaatcttgaagagcccttggcatccacttaccaggatatactttaccaggctaagcaggacaaaatgacaaatgctaaaaacaggacagaaaactcagagagagaaagagatgtttatgaggagctgctcacgcaagctgaaattcaaggcaatataaacaaagtcaatacattttctgcattagcaaatatcgacctggctttagaacaaggagatgcactggccttgttcagggctctgcagtcaccagccctggggcttcgaggactgcagcaacagaatagcgactggtacttgaagcagctcctgagtgataaacagcagaagagacagagtggtcagactgaccccctgcagaaggaggagctgcagtctggagtggatgctgcaaacagtgctgcccagcaatatcagagaagattggcagcagtagcactgattaatgctgcaatccagaagggtgttgctgagaagactgttttggaactgatgaatcccgaagcccagctgccccaggtgtatccatttgccgccgatctctatcagaaggagctggctaccctgcagcgacaaagtcctgaacataatctcacccacccagagctctctgtcgcagtggagatgttgtcatcggtggccctgatcaacagggcattggaatcaggagatgtgaatacagtgtggaagcaattgagcagttcagttactggtcttaccaatattgaggaagaaaactgtcagaggtatctcgatgagttgatgaaactgaaggctcaggcacatgcagagaataatgaattcattacatggaatgatatccaagcttgcgtggaccatgtgaacctggtggtgcaagaggaacatgagaggattttagccattggtttaattaatgaagccctggatgaaggtgatgcccaaaagactctgcaggccctacagattcctgcagctaaacttgagggagtccttgcagaagtggcccagcattaccaagacacgctgattagagcgaagagagagaaagcccaggaaatccaggatgagtcagctgtgttatggttggatgaaattcaaggtggaatctggcagtccaacaaagacacccaagaagcacagaagtttgccttaggaatctttgccattaatgaggcagtagaaagtggtgatgttggcaaaacactgagtgcccttcgctcccctgatgttggcttgtatggagtcatccctgagtgtggtgaaacttaccacagtgatcttgctgaagccaagaagaaaaaactggcagtaggagataataacagcaagtgggtgaagcactgggtaaaaggtggatattattattaccacaatctggagacccaggaaggaggatgggatgaacctccaaattttgtgcaaaattctatgcagctttctcgggaggagatccagagttctatctctggggtgactgccgcatataaccgagaacagctgtggctggccaatgaaggcctgatcaccaggctgcaggctcgctgccgtggatacttagttcgacaggaattccgatccaggatgaatttcctgaagaaacaaatccctgccatcacctgcattcagtcacagtggagaggatacaagcagaagaaggcatatcaagatcggttagcttacctgcgctcccacaaagatgaagttgtaaagattcagtccctggcaaggatgcaccaagctcgaaagcgctatcgagatcgcctgcagtacttccgggaccatataaatgacattatcaaaatccaggcttttattcgggcaaacaaagctcgggatgactacaagactctcatcaatgctgaggatcctcctatggttgtggtccgaaaatttgtccacctgctggaccaaagtgaccaggattttcaggaggagcttgaccttatgaagatgcgggaagaggttatcaccctcattcgttctaaccagcagctggagaatgacctcaatctcatggatatcaaaattggactgctagtgaaaaataagattacgttgcaggatgtggtttcccacagtaaaaaacttaccaaaaaaaataaggaacagttgtctgatatgatgatgataaataaacagaagggaggtctcaaggctttgagcaaggagaagagagagaagttggaagcttaccagcacctgttttatttattgcaaaccaatcccacctatctggccaagctcatttttcagatgccccagaacaagtccaccaagttcatggactctgtaatcttcacactctacaactacgcgtccaaccagcgagaggagtacctgctcctgcggctctttaagacagcactccaagaggaaatcaagtcgaaggtagatcagattcaagagattgtgacaggaaatcctacggttattaaaatggttgtaagtttcaaccgtggtgcccgtggccagaatgccctgagacagatcttggccccagtcgtgaaggaaattatggatgacaaatctctcaacatcaaaactgaccctgtggatatttacaaatcttgggttaatcagatggagtctcagacaggagaggcaagcaaactgccctatgatgtgacccctgagcaggcgctagctcatgaagaagtgaagacacggctagacagctccatcaggaacatgcgggctgtgacagacaagtttctctcagccattgtcagctctgtggacaaaatcccttatgggatgcgcttcattgccaaagtgctgaaggactcgttgcatgagaagttccctgatgctggtgaggatgagctgctgaagattattggtaacttgctttattatcgatacatgaatccagccattgttgctcctgatgcctttgacatcattgacctgtcagcaggaggccagcttaccacagaccaacgccgaaatctgggctccattgcaaaaatgcttcagcatgctgcttccaataagatgtttctgggagataatgcccacttaagcatcattaatgaatatctttcccagtcctaccagaaattcagacggtttttccaaactgcttgtgatgtcccagagcttcaggataaatttaatgtggatgagtactctgatttagtaaccctcaccaaaccagtaatctacatttccattggtgaaatcatcaacacccacactctcctgttggatcaccaggatgccattgctccggagcacaatgatccaatccacgaactgctggacgacctcggcgaggtgcccaccatcgagtccctgataggggaaagctctggcaatttaaatgacccaaataaggaggcactggctaagacggaagtgtctctcaccctgaccaacaagttcgacgtgcctggagatgagaatgcagaaatggatgctcgaaccatcttactgaatacaaaacgtttaattgtggatgtcatccggttccagccaggagagaccttgactgaaatcctagaaacaccagccaccagtgaacaggaagcagaacatcagagagccatgcagagacgtgctatccgtgatgccaaaacacctgacaagatgaaaaagtcaaaatctgtaaaggaagacagcaacctcactcttcaagagaagaaagagaagatccagacaggtttaaagaagctaacagagcttggaaccgtggacccaaagaacaaataccaggaactgatcaacgacattgccagggatattcggaatcagcggaggtaccgacagaggagaaaggccgaactagtgaaactgcaacagacatacgctgctctgaactctaaggccaccttttatggggagcaggtggattactataaaagctatatcaaaacctgcttggataacttagccagcaagggcaaagtctccaaaaagcctagggaaatgaaaggaaagaaaagcaaaaagatttctctgaaatatacagcagcaagactacatgaaaaaggagttcttctggaaattgaggacctgcaagtgaatcagtttaaaaatgttatatttgaaatcagtccaacagaagaagttggagacttcgaagtgaaagccaaattcatgggagttcaaatggagacttttatgttacattatcaggacctgctgcagctacagtatgaaggagttgcagtcatgaaattatttgatagagctaaagtaaatgtcaacctcctgatcttccttctcaacaaaaagttctacgggaagtaattgatcgtttgctgccagcccagaaggatgaaggaaagaagcacctcacagctcctttctaggtccttctttcctcattggaagcaaagacctagccaacaacagcacctcaatctgatacactcccgatgccacatttttaactcctctcgctctgatgggacatttgttacccttttttcatagtgaaattgtgtttcaggcttagtctgacctttctggtttcttcattttcttccattacttaggaaagagtggaaactccactaaaatttctctgtgttgttacagtcttagaggttgcagtactatattgtaagctttggtgtttgtttaattagcaatagggatggtaggattcaaatgtgtgtcatttagaagtggaagctattagcaccaatgacataaatacatacaagacacacaactaaaatgtcatgttattaacagttattaggttgtcatttaaaaataaagttcctttatatttctgtcccatcaggaaaactgaaggatatggggaatcattggttatcttccattgtgtttttctttatggacaggagctaatggaagtgacagtcatgttcaaaggaagcatttctagaaaaaaggagataatgtttttaaatttcattatcaaacttgggcaattctgtttgtgtaactccccgactagtggatgggagagtcccattgctaaaattcagctactcagataaattcagaatgggtcaaggcacctgcctgtttttgttggtgcacagagattgacttgattcagagagacaattcactccatccctatggcagaggaatgggttagccctaatgtagaatgtcattgtttttaaaactgttttatatcttaagagtgccttattaaagtatagatgtatgtcttaaaatgtgggtgataggaattttaaagatttatataatgcatcaaaagccttagaataagaaaagctttttttaaattgctttatctgtatatctgaactcttgaaacttatagctaaaacactaggatttatctgcagtgttcagggagataattctgcctttaattgtctaaaacaaaaacaaaaccagccaacctatgttacacgtgagattaaaaccaattttttccccattttttctccttttttctcttgctgcccacattgtgcctttattttatgagccccagttttctgggcttagtttaaaaaaaaaatcaagtctaaacattgcatttagaaagcttttgttcttggataaaaagtcatacactttaaaaaaaaaaaaaactttttccaggaaaatatattgaaatcatgctgctgagcctctattttctttctttgatgttttgattcagtattcttttatcataaatttttagcatttaaaaattcactgatgtacattaagccaataaactgctttaatgaataacaaactatgtagtgtgtccctattataaatgcattggagaagtatttttatgagactctttactcaggtgcatggttacagcccacagggaggcatggagtgccatggaaggattcgccactacccagaccttgttttttgttgtattttggaagacaggttttttaaagaaacattttcctcagattaaaagatgatgctattacaactagcattgcctcaaaaactgggaccaaccaaagtgtgtcaaccctgtttccttaaaagaggctatgaatcccaaaggccacatccaagacaggcaataatgagcagagtttacagctcctttaataaaatgtgtcagtaattttaaggtttatagttccctcaacacaattgctaatgcagaatagtgtaaaatgcgcttcaagaatgttgatgatgatgatatagaattgtggctttagtagcacagaggatgccccaacaaactcatggcgttgaaaccacacagttctcattactgttatttattagctgtagcattctctgtctcctctctctcctcctttgaccttctcctcgaccagccatcatgacatttaccatgaatttacttcctcccaagagtttggactgcccgtcagattgttgctgcacatagttgcctttgtatctctgtatgaaataaaaggtcatttgttcatgtt

SEQ ID NO: 25098 - protein, 1657 aa, Homo sapiens; identical to SEQ ID NO: 3337

SEQ ID NO: 25099 - DNA, 626 bp, Homo sapiens
ggaccccggcaagcccgcgcacttggcaggagctgtagctaccgccgtccgcgcctccaaggtttcacggcttcctcagcagagactcgggctcgtccgccatgtccgccgcagacgaggttgacgggctgggcgtggcccggccgcactatggctctgtcctggataatgaaagacttactgcagaggagatggatgaaaggagacgtcagaacgtggcttatgagtacctttgtcatttggaagaagcgaagaggtaaagattggctggctggagagaagattaagagaagggaactgataatagtgtgaatacaaataaagattgctttgaggctgaacacagtggtccatgcctgtaatcccaacacgttgggaggccgaggtgggggggaatcacttgaacccagctgtttgagaccagattgggcaacatagtgacaccccatctctacaaaaaaattttaaaaattagccaggcatggtggtgcatgccagtagtcctagctactcgggagcctgaggagggaggatcacttgagtccgggaggtcgaggcagcagtgagccgtgctctcaccactgtgctctagcctgggtgacaaaactcctgtttttggtgggggg

SEQ ID NO: 25100 - protein, 53 aa, Homo sapiens
MALSWIMKDLLQRRWMKGDVRTWLMSTFVIWKKRRGKDWLAGEKIKRRELIIV

SEQ ID NO: 25101 - DNA, 995 bp, Homo sapiens
ggaccccggcaagcccgcgcacttggcaggagctgtagctaccgccgtccgcgcctccaaggtttcacggcttcctcagcagagactcgggctcgtccgccatgtccgccgcagacgaggttgacgggctgggcgtggcccggccgcactatggctctgtcctggataatgaaagacttactgcagaggagatggatgaaaggagacgtcagaacgtggcttatgagtacctttgtcatttggaagaagcgaagaggtggatggaagcatgcctaggggaagatctgcctcccaccacagaactggaggaggggcttaggaatggggtctaccttgccaaactggggaacttcttctctcccaaagtagtgtccctgaaaaaaatctatgatcgagaacagaccagatacaaggcgactggcctccactttagacacactgataatgtgattcagtggttgaatgccatggatgagattggattgcctaagattttttacccagaaactacagatatctatgatcgaaagaacatgccaagatgtatctactgtatccatgcactcagtttgtacctgttcaagctaggcctggcccctcagattcaagacctatatggaaaggttgacttcacagaagaagaaatcaacaacatgaagactgagttggagaagtatggcatccagatgcctgcctttagcaagattgggggcatcttggctaatgaactgtcagtggatgaagccgcattacatgctgctgttattgctattaatgaagctattgaccgtagaattccagccgacacatttgcagctttgaaaaatccgaatgccatgcttgtaaatcttgaagagcccttggcatccacttaccaggatatactttaccaggctaagcaggacaaaatgacaaatgctaaaaacaggacagaaaactcagagagagaaagagatgtttatgaggagctgctcacgcaagctgaaattcaaggc

SEQ ID NO: 25102 - protein, 297 aa, Homo sapiens
MSAADEVDGLGVARPHYGSVLDNERLTAEEMDERRRQNVAYEYLCHLEEAKRWMEACLGEDLPPTTELEEGLRNGVYLAKLGNFFSPKVVSLKKIYDREQTRYKATGLHFRHTDNVIQWLNAMDEIGLPKIFYPETTDIYDRKNMPRCIYCIHALSLYLFKLGLAPQIQDLYGKVDFTEEEINNMKTELEKYGIQMPAFSKIGGILANELSVDEAALHAAVIAINEAIDRRIPADTFAALKNPNAMLVNLEEPLASTYQDILYQAKQDKMTNAKNRTENSERERDVYEELLTQAEIQ

SEQ ID NO: 25103 - DNA, 2915 bp, Homo sapiens
ggaccccggcaagcccgcgcacttggcaggagctgtagctaccgccgtccgcgcctccaaggtttcacggcttcctcagcagagactcgggctcgtccgccatgtccgccgcagacgaggttgacgggctgggcgtggcccggccgcactatggctctgtcctggataatgaaagacttactgcagaggagatggatgaaaggagacgtcagaacgtggcttatgagtacctttgtcatttggaagaagcgaagaggtggatggaagcatgcctaggggaagatctgcctcccaccacagaactggaggaggggcttaggaatggggtctaccttgccaaactggggaacttcttctctcccaaagtagtgtccctgaaaaaaatctatgatcgagaacagaccagatacaaggcgactggcctccactttagacacactgataatgtgattcagtggttgaatgccatggatgagattggattgcctaagattttttacccagaaactacagatatctatgatcgaaagaacatgccaagatgtatctactgtatccatgcactcagtttgtacctgttcaagctaggcctggcccctcagattcaagacctatatggaaaggttgacttcacagaagaagaaatcaacaacatgaagactgagttggagaagtatggcatccagatgcctgcctttagcaagattgggggcatcttggctaatgaactgtcagtggatgaagccgcattacatgctgctgttattgctattaatgaagctattgaccgtagaattccagccgacacatttgcagctttgaaaaatccgaatgccatgcttgtaaatcttgaagagcccttggcatccacttaccaggatatactttaccaggctaagcaggacaaaatgacaaatgctaaaaacaggacagaaaactcagagagagaaagagatgtttatgaggagctgctcacgcaagctgaaattcaaggcaatataaacaaagtcaatacattttctgcattagcaaatatcgacctggctttagaacaaggagatgcactggccttgttcagggctctgcagtcaccagccctggggcttcgaggactgcagcaacagaatagcgactggtacttgaagcagctcctgagtgataaacagcagaagagacagagtggtcagactgaccccctgcagaaggaggagctgcagtctggagtggatgctgcaaacagtgctgcccagcaatatcagagaagattggcagcagtagcactgattaatgctgcaatccagaagggtgttgctgagaagactgttttggaactgatgaatcccgaagcccagctgccccaggtgtatccatttgccgccgatctctatcagaaggagctggctaccctgcagcgacaaagtcctgaacataatctcacccacccagagctctctgtcgcagtggagatgttgtcatcggtggccctgatcaacagggcattggaatcaggagatgtgaatacagtgtggaagcaattgagcagttcagttactggtcttaccaatattgaggaagaaaactgtcagaggtatctcgatgagttgatgaaactgaaggctcaggcacatgcagagaataatgaattcattacatggaatgatatccaagcttgcgtggaccatgtgaacctggtggtgcaagaggaacatgagaggattttagccattggtttaattaatgaagccctggatgaaggtgatgcccaaaagactctgcaggccctacagattcctgcagctaaacttgagggagtccttgcagaagtggcccagcattaccaagacacgctgattagagcgaagagagagaaagcccaggaaatccaggatgagtcagctgtgttatggttggatgaaattcaaggtggaatctggcagtccaacaaagacacccaagaagcacagaagtttgccttaggaatctttgccattaatgaggcagtagaaagtggtgatgttggcaaaacactgagtgcccttcgctcccctgatgttggcttgtatggagtcatccctgagtgtggtgaaacttaccacagtgatcttgctgaagccaagaagaaaaaactggcagtaggagataataacagcaagtgggtgaagcactgggtaaaaggtggatattattattaccacaatctggagacccaggaaggaggatgggatgaacctccaaattttgtgcaaaattctatgcagctttctcgggaggagatccagagttctatctctggggtgactgccgcatataaccgagaacagctgtggctggccaatgaaggcctgatcaccaggctgcaggctcgctgccgtggatacttagttcgacaggaattccgatccaggatgaatttcctgaagaaacaaatccctgccatcacctgcattcagtcacagtggagaggatacaagcagaagaaggcatatcaagatcggttagcttacctgcgctcccacaaagatgaagttgtaaagattcagtccctggcaaggatgcaccaagctcgaaagcgctatcgagatcgcctgcagtacttccgggaccatataaatgacattatcaaaatccaggcttttattcgggcaaacaaagctcgggatgactacaagactctcatcaatgctgaggatcctcctatggttgtggtccgaaaatttgtccacctgctggaccaaagtgaccaggattttcaggaggagcttgaccttatgaagatgcgggaagaggttatcaccctcattcgttctaaccagcagctggagaatgacctcaatctcatggatatcaaaattggactgctagtgaaaaataagattacgttgcaggatgtggtttcccacagtaaaaaacttacc

SEQ ID NO: 25104 - protein, 937 aa, Homo sapiens
MSAADEVDGLGVARPHYGSVLDNERLTAEEMDERRRQNVAYEYLCHLEEAKRWMEACLGEDLPPTTELEEGLRNGVYLAKLGNFFSPKVVSLKKIYDREQTRYKATGLHFRHTDNVIQWLNAMDEIGLPKIFYPETTDIYDRKNMPRCIYCIHALSLYLFKLGLAPQIQDLYGKVDFTEEEINNMKTELEKYGIQMPAFSKIGGILANELSVDEAALHAAVIAINEAIDRRIPADTFAALKNPNAMLVNLEEPLASTYQDILYQAKQDKMTNAKNRTENSERERDVYEELLTQAEIQGNINKVNTFSALANIDLALEQGDALALFRALQSPALGLRGLQQQNSDWYLKQLLSDKQQKRQSGQTDPLQKEELQSGVDAANSAAQQYQRRLAAVALINAAIQKGVAEKTVLELMNPEAQLPQVYPFAADLYQKELATLQRQSPEHNLTHPELSVAVEMLSSVALINRALESGDVNTVWKQLSSSVTGLTNIEEENCQRYLDELMKLKAQAHAENNEFITWNDIQACVDHVNLVVQEEHERILAIGLINEALDEGDAQKTLQALQIPAAKLEGVLAEVAQHYQDTLIRAKREKAQEIQDESAVLWLDEIQGGIWQSNKDTQEAQKFALGIFAINEAVESGDVGKTLSALRSPDVGLYGVIPECGETYHSDLAEAKKKKLAVGDNNSKWVKHWVKGGYYYYHNLETQEGGWDEPPNFVQNSMQLSREEIQSSISGVTAAYNREQLWLANEGLITRLQARCRGYLVRQEFRSRMNFLKKQIPAITCIQSQWRGYKQKKAYQDRLAYLRSHKDEVVKIQSLARMHQARKRYRDRLQYFRDHINDIIKIQAFIRANKARDDYKTLINAEDPPMVVVRKFVHLLDQSDQDFQEELDLMKMREEVITLIRSNQQLENDLNLMDIKIGLLVKNKITLQDVVSHSKKL

SEQ ID NO: 25105 - DNA, 481 bp, Homo sapiens
aaaagaaaagaaaaaattcaggatatcctttatccaggtgcttggataaaagtttattgagttcaggccgggcgcgtgagccaccgggccaggtcagttactccttaagtatgcaaaagcactcaacaaaaaaacacctcaggggatcatgcctgctgggtggtctttaaaggaaatgggctactttcctatactggaaaaaaacacctgacagaaaaaaagacgctctagagtagctgaaaataaaatgcctggctaatgcagaacctgatgaagaaataggatgaagtgtaacattctactgaggtcatgatatcccagcataaggcagagttttaaatcttgtttctcaacagggggaggagtgggggccaaggaaggagcatcggaatcactagagacatttaaaatacagtcggccctccttatccatgggttctgcatccatggattcaacaaactatggatcaaaaacagtcag

SEQ ID NO: 25106 - protein, 55 aa, Homo sapiens
YPSIRQSFKSCFSTGGGVGAKEGASESLETFKIQSALLIHGFCIHGFNKLWIKNS

SEQ ID NO: 25107 - DNA, 572 bp, Homo sapiens
tggagggatggcccgtgcccttgttcccctgtcactgctggaagtggtccttcctaaaacttcatcatgaaattgcacttggatcatgtatcaagatgaaagtttttttttaacttccattgatgcttgggaagtaatatgtcttctgtaacatttgactgtttcagtcacagtggagaggatacaagcagaagaaggcatatcaagatcggttagcttacctgcgctcccacaaagatgaagttgtaaaggtatggtagcctgaacagggtttctccatgaggggcacaggtataacacgtgttgagatgaaggactcttctaatttccaggatcccttttccacagattcagtccctggcaaggatgcaccaagctcgaaagcgctatcgagatcgcctgcagtacttccgggaccatataaatgacattatcaaaatccaggcttttattcgggcaaacaaagctcgggatgactacaagactctcagtgagtaactggctccgcatgaagagttgaggcagtggctgggagccaccaagttcagggtattctccacagacctcttttg

SEQ ID NO: 25108 - protein, 49 aa, Homo sapiens
MRGTGITRVEMKDSSNFQDPFSTDSVPGKDAPSSKALSRSPAVLPGPYK

SEQ ID NO: 25109 - DNA, 695 bp, Homo sapiens
aaggcttgggggagagggtgtgacctgtgacataagcccctttgctaacatgtggctaggtgtcttgttggcttgttgcattaacctttatcataacatagcaatagcctgacacagaagactgcacctgatagttgtcttagcacatctcaaaattaaatgtttatgaatagactactttttcaagacaatgctatttcctgagacgtagtactttttctgctaactccattctttgatgcatactttctgtcagtcaatgctgaggatcctcctatggttgtggtccgaaaatttgtccacctgctggaccaaagtgaccaggattttcaggaggagcttgaccttatgaagatgcgggaagaggttatcaccctcattcgttctaaccagcagctggagaatgacctcaatctcatggatatcaaaattggactgctagtgaaaaataagattacgttgcaggtatggcccagtgccagcgggggccttggaacggttcatcctgctttgtaacccctgcattcccctttctgactggtggggagggtggaggctgactttctcctcagctactgccataagagctttttttttttcttttgactgagtctcactctgttgcccaggttgcagtgagccaagattgcatgactgcactccggactgggtgacagagtgaaactctatctcca

SEQ ID NO: 25110 - protein, 79 aa, Homo sapiens [sequence omitted]

SEQ ID NO: 25111 - DNA, 2988 bp, Homo sapiens
cttgcagggtagtttattatttattcctaactttttattttaagagttttcaaatctcagatcgaatgaatagaacaataagcacccatgtgcccttcacctagattcacccatttttaatattttgccatatctgcttcccatttccctggctcttgcatgtcctctgtttctctctttccatggaagactctctggggtcaggcatgggtgatggaagggatgaaaaacaggcccacctaaccctgcttgcagatctgactcctgtgagcttttgatgtgttttcattgttccttgtgcacttcctgactttctgacacaagatgtttcatgttcaacctgtagtttcccctccccagggccagaatgaactgtttctccaagcatgcctggtttctttgaatgaagaatggtatttagaaaccaagatctagaactaggtgtgttcactgccagatttgtcatggcctccaggccttctaagcagacagacctagattctcatttttttttaatgctgcatattattccattatgcagatagatataacagttgacttcagcagttctccattgatggacatttaagttgtttccagttgtttgttattattttttaaattctgcagcaaataacctcttgtacatatgtcattttgcaaatgtgggcatatttctgaagttagcacttcttgccttgattatcctaatagcctcctaacctgtttctttttccttattttcattcatctgtaattgctgtgctggcttaaacgcttttaaaaagtatttgatgacattttaattttttccctacacagctgaggggcgtagagtaactccttcactcctgggattcagtaccattccctcagctggcatacgaagctctcctagttacttgttaggtacttaagttcccagaaggacatgggaggattaagacactgttaaattcatgggagtgttctcaaatataatttaaactaaaaatagaagcaatttagtaatatttcccctgttttgcagagatattgcttaggctaattctaacatttgtttgccattttagagttggtatgttacttatgcttatgtctggaagtttggtttctgacatgtttccttcagttaccaatgatgaagattcagagtagatggttacttatagaaagtgacatgatgtgatttttacagagtctccaaaaagcctagggaaatgaaaggaaagaaaagcaaaaagatttctctgaaatatacagcagcaagactacatgaaaaaggagttcttctggaaattgaggacctgcaagtgaatcagtttaaaaatgttatatttgaaatcagtccaacagaagaagttggagacttcgaagtgaaagccaaattcatgggagttcaaatggagacttttatgttacattatcaggacctgctgcagctacagtatgaaggagttgcagtcatgaaattatttgatagagctaaagtaaatgtcaacctcctgatcttccttctcaacaaaaagttctacgggaagtaattgatcgtttgctgccagcccagaaggatgaaggaaagaagcacctcacagctcctttctaggtccttctttcctcattggaagcaaagacctagccaacaacagcacctcaatctgatacactcccgatgccacatttttaactcctctcgctctgatgggacatttgttacccttttttcatagtgaaattgtgtttcaggcttagtctgacctttctggtttcttcattttcttccattacttaggaaagagtggaaactccactaaaatttctctgtgttgttacagtcttagaggttgcagtactatattgtaagctttggtgtttgtttaattagcaatagggatggtaggattcaaatgtgtgtcatttagaagtggaagctattagcaccaatgacataaatacatacaagacacacaactaaaatgtcatgttattaacagttattaggttgtcatttaaaaataaagttcctttatatttctgtcccatcaggaaaactgaaggatatggggaatcattggttatcttccattgtgtttttctttatggacaggagctaatggaagtgacagtcatgttcaaaggaagcatttctagaaaaaaggagataatgtttttaaatttcattatcaaacttgggcaattctgtttgtgtaactccccgactagtggatgggagagtcccattgctaaaattcagctactcagataaattcagaatgggtcaaggcacctgcctgtttttgttggtgcacagagattgacttgattcagagagacaattcactccatccctatggcagaggaatgggttagccctaatgtagaatgtcattgtttttaaaactgttttatatcttaagagtgccttattaaagtatagatgtatgtcttaaaatgtgggtgataggaattttaaagatttatataatgcatcaaaagccttagaataagaaaagctttttttaaattgctttatctgtatatctgaactcttgaaacttatagctaaaacactaggatttatctgcagtgttcagggagataattctgcctttaattgtctaaaacaaaaacaaaaccagccaacctatgttacacgtgagattaaaaccaattttttccccattttttctccttttttctcttgctgcccacattgtgcctttattttatgagccccagttttctgggcttagtttaaaaaaaaaatcaagtctaaacattgcatttagaaagcttttgttcttggataaaaagtcatacactttaaaaaaaaaaaaaactttttccaggaaaatatattgaaatcatgctgctgagcctctattttctttctttgatgttttgattcagtattcttttatcataaatttttagcatttaaaaattcactgatgtacattaagccaataaactgctttaatgaataac

SEQ ID NO: 25112 - protein, 107 aa, Homo sapiens
MKGKKSKKISLKYTAARLHEKGVLLEIEDLQVNQFKNVIFEISPTEEVGDFEVKAKFMGVQMETFMLHYQDLLQLQYEGVAVMKLFDRAKVNVNLLIFLLNKKFYGK

SEQ ID NO: 25113 - DNA, 3679 bp, Homo sapiens
cttgcagggtagtttattatttattcctaactttttattttaagagttttcaaatctcagatcgaatgaatagaacaataagcacccatgtgcccttcacctagattcacccatttttaatattttgccatatctgcttcccatttccctggctcttgcatgtcctctgtttctctctttccatggaagactctctggggtcaggcatgggtgatggaagggatgaaaaacaggcccacctaaccctgcttgcagatctgactcctgtgagcttttgatgtgttttcattgttccttgtgcacttcctgactttctgacacaagatgtttcatgttcaacctgtagtttcccctccccagggccagaatgaactgtttctccaagcatgcctggtttctttgaatgaagaatggtatttagaaaccaagatctagaactaggtgtgttcactgccagatttgtcatggcctccaggccttctaagcagacagacctagattctcatttttttttaatgctgcatattattccattatgcagatagatataacagttgacttcagcagttctccattgatggacatttaagttgtttccagttgtttgttattattttttaaattctgcagcaaataacctcttgtacatatgtcattttgcaaatgtgggcatatttctgaagttagcacttcttgccttgattatcctaatagcctcctaacctgtttctttttccttattttcattcatctgtaattgctgtgctggcttaaacgcttttaaaaagtatttgatgacattttaattttttccctacacagctgaggggcgtagagtaactccttcactcctgggattcagtaccattccctcagctggcatacgaagctctcctagttacttgttaggtacttaagttcccagaaggacatgggaggattaagacactgttaaattcatgggagtgttctcaaatataatttaaactaaaaatagaagcaatttagtaatatttcccctgttttgcagagatattgcttaggctaattctaacatttgtttgccattttagagttggtatgttacttatgcttatgtctggaagtttggtttctgacatgtttccttcagttaccaatgatgaagattcagagtagatggttacttatagaaagtgacatgatgtgatttttacagagtctccaaaaagcctagggaaatgaaaggaaagaaaagcaaaaagatttctctgaaatatacagcagcaagactacatgaaaaaggagttcttctggaaattgaggacctgcaagtgaatcagtttaaaaatgttatatttgaaatcagtccaacagaagaagttggagacttcgaagtgaaagccaaattcatgggagttcaaatggagacttttatgttacattatcaggacctgctgcagctacagtatgaaggagttgcagtcatgaaattatttgatagagctaaagtaaatgtcaacctcctgatcttccttctcaacaaaaagttctacgggaagtaattgatcgtttgctgccagcccagaaggatgaaggaaagaagcacctcacagctcctttctaggtccttctttcctcattggaagcaaagacctagccaacaacagcacctcaatctgatacactcccgatgccacatttttaactcctctcgctctgatgggacatttgttacccttttttcatagtgaaattgtgtttcaggcttagtctgacctttctggtttcttcattttcttccattacttaggaaagagtggaaactccactaaaatttctctgtgttgttacagtcttagaggttgcagtactatattgtaagctttggtgtttgtttaattagcaatagggatggtaggattcaaatgtgtgtcatttagaagtggaagctattagcaccaatgacataaatacatacaagacacacaactaaaatgtcatgttattaacagttattaggttgtcatttaaaaataaagttcctttatatttctgtcccatcaggaaaactgaaggatatggggaatcattggttatcttccattgtgtttttctttatggacaggagctaatggaagtgacagtcatgttcaaaggaagcatttctagaaaaaaggagataatgtttttaaatttcattatcaaacttgggcaattctgtttgtgtaactccccgactagtggatgggagagtcccattgctaaaattcagctactcagataaattcagaatgggtcaaggcacctgcctgtttttgttggtgcacagagattgacttgattcagagagacaattcactccatccctatggcagaggaatgggttagccctaatgtagaatgtcattgtttttaaaactgttttatatcttaagagtgccttattaaagtatagatgtatgtcttaaaatgtgggtgataggaattttaaagatttatataatgcatcaaaagccttagaataagaaaagctttttttaaattgctttatctgtatatctgaactcttgaaacttatagctaaaacactaggatttatctgcagtgttcagggagataattctgcctttaattgtctaaaacaaaaacaaaaccagccaacctatgttacacgtgagattaaaaccaattttttccccattttttctccttttttctcttgctgcccacattgtgcctttattttatgagccccagttttctgggcttagtttaaaaaaaaaatcaagtctaaacattgcatttagaaagcttttgttcttggataaaaagtcatacactttaaaaaaaaaaaaaactttttccaggaaaatatattgaaatcatgctgctgagcctctattttctttctttgatgttttgattcagtattcttttatcataaatttttagcatttaaaaattcactgatgtacattaagccaataaactgctttaatgaataacaaactatgtagtgtgtccctattataaatgcattggagaagtatttttatgagactctttactcaggtgcatggttacagcccacagggaggcatggagtgccatggaaggattcgccactacccagaccttgttttttgttgtattttggaagacaggttttttaaagaaacattttcctcagattaaaagatgatgctattacaactagcattgcctcaaaaactgggaccaaccaaagtgtgtcaaccctgtttccttaaaagaggctatgaatcccaaaggccacatccaagacaggcaataatgagcagagtttacagctcctttaataaaatgtgtcagtaattttaaggtttatagttccctcaacacaattgctaatgcagaatagtgtaaaatgcgcttcaagaatgttgatgatgatgatatagaattgtggctttagtagcacagaggatgccccaacaaactcatggcgttgaaaccacacagttctcattactgttatttattagctgtagcattctctgtctcctctctctcctcctttgaccttctcctcgaccagccatcatgacatttaccatgaatttacttcctcccaagagtttggactgcccgtcagattgttgctgcacatagttgcctttgtatctctgtatgaaataaaaggtcatttgttcatgtt

SEQ ID NO: 25114 - protein, 107 aa, Homo sapiens; identical to SEQ ID NO: 25112

SEQ ID NO: 25115 - DNA, 2876 bp, Homo sapiens
ttatctttggtaatactgagtgtgcttatatacacagcacctactctttctagaaaacctcctcccttggtgctttttatacggacccccttttgtttatttacttctcccagtcctcaaacatgcatgtattcaaacacatacaccctctccttccccagtgtcctccgttttctccttttatcattaggtttcctttttggccatgtggaagtgaagagaattcctatgatgtcatcccttcacacgccacttgtggaactcctcagtggttcctctttgataggatgtaagtgctgcaggcagagagaggttgccattcctctctccaagtcccagagcagatggtacttgggcttggcaatctgtgctgcttcagctgcagaagtacttttgacctgtattttctgcagcccttttcactcttgaagacttggttcatctcctttccccatttcacagaatatttttatatgagaatataaaaaccatacccttacgatgttatctttcaacaggtttaaaaatgttatatttgaaatcagtccaacagaagaagttggagacttcgaagtgaaagccaaattcatgggagttcaaatggagacttttatgttacattatcaggacctgctgcagctacagtatgaaggagttgcagtcatgaaattatttgatagagctaaagtaaatgtcaacctcctgatcttccttctcaacaaaaagttctacgggaagtaattgatcgtttgctgccagcccagaaggatgaaggaaagaagcacctcacagctcctttctaggtccttctttcctcattggaagcaaagacctagccaacaacagcacctcaatctgatacactcccgatgccacatttttaactcctctcgctctgatgggacatttgttacccttttttcatagtgaaattgtgtttcaggcttagtctgacctttctggtttcttcattttcttccattacttaggaaagagtggaaactccactaaaatttctctgtgttgttacagtcttagaggttgcagtactatattgtaagctttggtgtttgtttaattagcaatagggatggtaggattcaaatgtgtgtcatttagaagtggaagctattagcaccaatgacataaatacatacaagacacacaactaaaatgtcatgttattaacagttattaggttgtcatttaaaaataaagttcctttatatttctgtcccatcaggaaaactgaaggatatggggaatcattggttatcttccattgtgtttttctttatggacaggagctaatggaagtgacagtcatgttcaaaggaagcatttctagaaaaaaggagataatgtttttaaatttcattatcaaacttgggcaattctgtttgtgtaactccccgactagtggatgggagagtcccattgctaaaattcagctactcagataaattcagaatgggtcaaggcacctgcctgtttttgttggtgcacagagattgacttgattcagagagacaattcactccatccctatggcagaggaatgggttagccctaatgtagaatgtcattgtttttaaaactgttttatatcttaagagtgccttattaaagtatagatgtatgtcttaaaatgtgggtgataggaattttaaagatttatataatgcatcaaaagccttagaataagaaaagctttttttaaattgctttatctgtatatctgaactcttgaaacttatagctaaaacactaggatttatctgcagtgttcagggagataattctgcctttaattgtctaaaacaaaaacaaaaccagccaacctatgttacacgtgagattaaaaccaattttttccccattttttctccttttttctcttgctgcccacattgtgcctttattttatgagccccagttttctgggcttagtttaaaaaaaaaatcaagtctaaacattgcatttagaaagcttttgttcttggataaaaagtcatacactttaaaaaaaaaaaaaactttttccaggaaaatatattgaaatcatgctgctgagcctctattttctttctttgatgttttgattcagtattcttttatcataaatttttagcatttaaaaattcactgatgtacattaagccaataaactgctttaatgaataacaaactatgtagtgtgtccctattataaatgcattggagaagtatttttatgagactctttactcaggtgcatggttacagcccacagggaggcatggagtgccatggaaggattcgccactacccagaccttgttttttgttgtattttggaagacaggttttttaaagaaacattttcctcagattaaaagatgatgctattacaactagcattgcctcaaaaactgggaccaaccaaagtgtgtcaaccctgtttccttaaaagaggctatgaatcccaaaggccacatccaagacaggcaataatgagcagagtttacagctcctttaataaaatgtgtcagtaattttaaggtttatagttccctcaacacaattgctaatgcagaatagtgtaaaatgcgcttcaagaatgttgatgatgatgatatagaattgtggctttagtagcacagaggatgccccaacaaactcatggcgttgaaaccacacagttctcattactgttatttattagctgtagcattctctgtctcctctctctcctcctttgaccttctcctcgaccagccatcatgacatttaccatgaatttacttcctcccaagagtttggactgcccgtcagattgttgctgcacatagttgcctttgtatctctgtatgaaataaaaggtcatttgttcatgtt

SEQ ID NO: 25116 - protein, 79 aa, Homo sapiens [sequence omitted]

SEQ ID NO: 25117 - DNA, 5209 bp, Homo sapiens
ctccggggccgcggcggctcctctgccgggtcgcgccggacgactggcttcgggcggcggccccggcggcctgtggacggacgggtgggccgaggtacaggccccacggccgccgtctcccgcttctgcccgcgcagagtccgcgccatggccgcctcgccgggctcgggcagcgccaacccgcggaagttcagtgagaagatcgcgctgcacacgcagagacaggccgaggagacgcgggccttcgagcagctcatgaccgacctcaccctgtcgcgggttcaatttcagaagcttcagcaactgcgccttacacagtaccatggaggatccttaccaaatgtgagccagctgcggagcagtgcgtcagagtttcagccgtcatttcaccaagctgataatgttcggggaacccgccatcacgggctggtggagaggccatccaggaaccgcttccaccccctccaccgaaggtctggggacaagccagggcgacaatttgatggtagtgcttttggagccaattattcctcacagcctctggatgagagttggccaaggcagcagcctccttggaaagacgaaaagcatcctgggttcaggctgacatctgcacttaacaggaccaattctgattctgctcttcacacgagtgctctgagtaccaagccccaggacccctatggaggagggggccagtcggcctggcctgccccatacatgggtttctgtgatggtgagaataatggacatggggaagtagcatctttccctggcccattgaaagaagagaatctgttaaatgttccgaagccactgccaaaacaactgtgggagaccaaggagattcagtccctgtcaggacgccctcgatcctgtgatgttggaggtggcaatgcttttccacataatggtcaaaacctaggcctctcacccttcttggggaccttgaacactggagggtcattgccagatctaaccaacctccactactcgacacccctgccagcctccctggacaccaccgaccaccactttggcagtatgagtgtggggaatagtgtgaacaacatcccagctgctatgacccacctgggtataagaagctcctctggtctccagagttctcggagtaacccctccatccaagccacgctcaataagactgtgctttcctcttccttaaataaccacccacagacatctgttcccaacgcatctgctcttcacccttcgctccgtctgttttcccttagcaacccatctctttccaccacaaacctgagcggcccgtctcggcgtcggcagcctcccgtcagccctctcacgctttctcctggccctgaagcacatcaaggtttcagcagacagctgtcttcaaccagcccactggccccatatcctacctcccagatggtgtcctcagaccgaagccaactttcctttctgcccacagaagctcaagcccaggtgtcgccgccacccccttaccctgcaccccaggagctcacccagcccctcctgcagcagccccgcgcccctgaggcccctgcccagcagccccaggcagcctcctcactgccacagtcagactttcagcttctcccggcccagggctcatctttgaccaacttcttcccagatgtgggttttgaccagcagtccatgaggccaggccctgcctttcctcaacaggtgcctctggtgcaacaaggttcccgagaactgcaggactcttttcatttgagaccaagcccgtattccaactgcgggagtctcccgaacaccatcctgccagactccagcaccagcctgttcaaagacctcaacagtgcgctggcaggcctgcctgaggtcagcctgaacgtggacactccatttccactggaagaggagctgcagattgaacccctgagcctggacggactcaacatgttaagtgactccagcatgggcctgctggacccctctgttgaagagacgtttcgagctgacagactgtgaacagaaggcagtggaacagaagaatgtttttctgcaacagccaaaatagaatggaatagaatgaagccagctgataccacgggctttcgttatcttgacatagaaggaagcaatgccacggctccagggtttcagatgagatcccatctcagacactgtggcttcctccagatcacacagctttgtactgcctctcccgcctgtggccaaagtcgtgttgcagcaggcaggctgcttggagcttcccatgaactggaaagctcacctccactgcatctttttactggccatccagtcagccgatgtgtaagagtaggaaatactgtgtcactggaggcctccgtagcattgtgtagtgtgctcagaaccactgatctccgtccgcaccgaaggcgggcccggagtgggaggctcggcctggggcggcggcaccggagagggcacctcgatgcctgctctgacctgacccagagggcgaggccctccagcgggggacattcccaggctgagtggaccccacggctctctcccacgcctggattacgacatgaagtttttaccacaagcccgagggcaggcttgagttaggcagactgaaggctaattttcattttctcccagctggtttctgctgcttcagaaaagtacaccttttccttatggaccagaggaagaggaagaccattttatcagtcactgaaaagagtcccctggcactgatgagcctgaagagaactgtgctcctcctcgggggctggggaaggaagacagggactgcaggtgtctcatactcagtggcctccagacaaactccagacaagcacagacctccccactaagagcagccagagggagctggtgaggccctaaccccacccaccgagcaactgagcttccccatccctccccagagctgtgtctctgtgggctgggagtctaatgtcacccccctagaccgtaagctccttgagggcagggacagtgccttatcattgttgaacccgtagcacctaacacgtgcgtggcagcacagtcgtgtgctggagtgagtgctgcagaaccgtgcgtgcagcgcatgatgaatgagtgcgtccgccatgccgtaaggcaggctcacctgtagctatccccttccctgccagatcttctcagagctttagcttttctagcactcgtgcctatggtgaagcatgcactttaatatgcttttaacactaggtgaccaaatcacagtgaagccgggcactgcattctccttgggctgtgctccacgcgggtgggtgggagctgtcttctgagtacatccggaagggctgagcaggtgagtgccctgagcatcctggctgggccccacccaggaagatcttccttctcagatccacgtttggctctaaattgcttcaagtagagattcattctttgaggttgaaaaaatagtttatagtaaaacgaaggcctaattcatggaagcatcattagtcatcaataccttctcataaaatagatgggccagatttccaccaccgcctgcctcctctaacttgggtgatgccagtaggtttgaagggggcagagcactgcagggggaggggggggtctaggctgtgagaggacagggtggagaggaggagaaccctgaaggagagacggaagatgccaggacctttgcttggacagccattgcccttccaggagaccctggagtgtactgagggttgctggactgttccacccagaggagcaaggctgtacaatgagggtctgaatctggcacacctgtcccttatgtaaaaggagtcgtggtcacaagaccctgggctggttagcctctcccgacctcattccatttctatcttctgaccttgcctctcatctttaaaataaccctcatggggtgcccctccaccttcctctggaatccaagtattcctgtttcacatttgccccaaatctttgctgtggaattgggaaatcaaaccagagtcctcctcgcctgatttccagctcaggaagggcctgctggcctgccctgttcccagttacactttcagatccctttgtgctcaagatctcagagggggtggctttttgttaaagagccttcagtcgcaatgctacccagcaccccatgtgccaaaagaaaccagctcctgtgtcaaagggcttccaaacctgatctcactctcaacaggcgatggtgctgatgtttcaagaattgtgtttttataaaacagaggtctcagcatagtcactcttcacatagtgccttacccatgggtatcgtcatatccgggtcccagttcagtttgtctgcacagcagccaccctgcctggcaacagagaccccaagacctacacagtgaaccctactgccccaaaggcgttctccaggtgacttgtgaaaacagacctccggggaagtgatttattgggggtgtacactgggggcaatatggtttagcactgaattcaatttgtccttaggtctatgagtgagtccgatcttttcttgtgaaaggttttgggcatcgtacaacccactctgcctagaaggtgtggaggactcaccacgggcagggtcgccctggcccacagcacgtgagcctgcactcactgcggcctttgtaacaaaaccagttgtggtcctcagcatttgaagcagctgcatacttcagagtaaactatttttcattatttagttttgtcacaagaaatcgaccattgtactactctcacttacagcagttaaacagcatagaactaaaaacctgtctgcatttccattttttctttctgtatggttgtgggttttaggacatagggggttaggagaaggggtttcttgatcatgtcatgaattctcctttgtcctgtttctcctgtttcatttctcctccgcctgctgtatattacctgagctggtgttgtatcttcaagtccatatgcgtatttgcagacctttcctgttcccactcttgttggctcttctgatttatgcacagatggttcccagcatgtgtccagtgcttcatggatgggaccatcccagcaactaatcagacttcctgccagtgtcctaacccccagggcaccctgttcaaccatatttaaaaattggaatttgtataaagttgcttccaagttttataatgcatcattttacatcttttgtaattaaaagcatcacaatgaggttgtctctgca

SEQ ID NO: 25118 - protein, 618 aa, Homo sapiens
MAASPGSGSANPRKFSEKIALHTQRQAEETRAFEQLMTDLTLSRVQFQKLQQLRLTQYHGGSLPNVSQLRSSASEFQPSFHQADNVRGTRHHGLVERPSRNRFHPLHRRSGDKPGRQFDGSAFGANYSSQPLDESWPRQQPPWKDEKHPGFRLTSALNRTNSDSALHTSALSTKPQDPYGGGGQSAWPAPYMGFCDGENNGHGEVASFPGPLKEENLLNVPKPLPKQLWETKEIQSLSGRPRSCDVGGGNAFPHNGQNLGLSPFLGTLNTGGSLPDLTNLHYSTPLPASLDTTDHHFGSMSVGNSVNNIPAAMTHLGIRSSSGLQSSRSNPSIQATLNKTVLSSSLNNHPQTSVPNASALHPSLRLFSLSNPSLSTTNLSGPSRRRQPPVSPLTLSPGPEAHQGFSRQLSSTSPLAPYPTSQMVSSDRSQLSFLPTEAQAQVSPPPPYPAPQELTQPLLQQPRAPEAPAQQPQAASSLPQSDFQLLPAQGSSLTNFFPDVGFDQQSMRPGPAFPQQVPLVQQGSRELQDSFHLRPSPYSNCGSLPNTILPDSSTSLFKDLNSALAGLPEVSLNVDTPFPLEEELQIEPLSLDGLNMLSDSSMGLLDPSVEETFRADRL

SEQ ID NO: 25119 - DNA, 698 bp, Homo sapiens
gactggcttcgggcggcggccccggcggcctgtggacggacgggtgggccgaggtacaggccccacggccgccgtctcccgcttctgcccgcgcagagtccgcgccatggccgcctcgccgggctcgggcagcgccaacccgcggaagttcagtgagaagatcgcgctgcacacgcagagacaggccgaggagacgcgggccttcgagcagctcatgaccgacctcaccctgtcgcgggttcaatttcagaagcttcagcaactgcgccttacacagtaccatggaggatccttaccaaatgtgagccagctgcggagcagtgcgtcagagtttcaggtacctccagatatgtactttcttgaagctgaatggagtgtaaaaaatagacaaagattatcactaaaaagatgagatcttgaaggataagctgggcctaggtacagttcagtcttcttttggaaagtccattaatattctctctcatagtttctacagcatacgatagtgttatttcacaaatggctgaaggcagcactggcaagtagaattataacacaagcatatgtaatttaaaatgttctagtagctacattaaagaagaagaaacacgtggggttaattttaatatctatatttttcaaaatgcagctttctcatctataattttaatattacttaaataaatgtttggctgggc

SEQ ID NO: 25120 - protein, 101 aa, Homo sapiens
MAASPGSGSANPRKFSEKIALHTQRQAEETRAFEQLMTDLTLSRVQFQKLQQLRLTQYHGGSLPNVSQLRSSASEFQVPPDMYFLEAEWSVKNRQRLSLKR

SEQ ID NO: 25121 - DNA, 1420 bp, Homo sapiens
ctggcttcgggcggcggccccggcggcctgtggacggacgggtgggccgaggtacaggccccacggccgccgtctcccgcttctgcccgcgcagagtccgcgccatggccgcctcgccgggctcgggcagcgccaacccgcggaagttcagtgagaagatcgcgctgcacacgcagagacaggccgaggagacgcgggccttcgagcagctcatgaccgacctcaccctgtcgcgggttcaatttcagaagcttcagcaactgcgccttacacagtaccatggaggatccttaccaaatgtgagccagctgcggagcagtgcgtcagagtttcaggttgagaggaacagcagtccctgtgttgatggattgaggcagtaactcgaggaggaagattttcctgcacagaactgcagaggcttggggagagagagaacacactgggatgactctgagatcctaacatgagtgtcttggtggacggtggcctcactaaatgagatggactataagaagaggaacagattaaggggacagtgattggttggatttttggtagaatttgagctgtcttgggtacttttggcagagaacttgagtaggcagttggaagtatgcacttggagttcacaaaagaactgttgggagctggaggtgtcgatttatgagttactggactgtgggtgacagtggggccgagggaaggatgcgattggccaaggcgagcatggaggacaggggctctctaccaggaagacgggcactggccctgaggctcttaggaagcgcctcctaaagctcctgtgcccggaggctcccgccaccccctccacctgctcacactctgcctggtgcccagggatcctgagagcatcctttgcctctcagagcaatgcaggcaggtgtggcctgaggctgcgaggccacaggaccccagggaacatcaggacggaaggcaaaggggcggaaaggagtgcacagagggataagaaaagatccatgtgagtgtggggatttttttttttaactttaatttttgtttccatccattgcagccacctcttctttgtttatctttttcatcatccctcctccctgccttccttttttaatgtggaaatcttccttgagccaaaggcttcactaagcttaactaaggaagcaatggaggaggcgctgatgtggttgttaaaagccctgtgacctgtgctgcccttccgctggcacgctggcacctggcagggatgccagaaatgtttcttgagtaaatggtaaattcaagtttataaataagagtgtttcctttgtctcgaggttgttacttagggcatgtcagtgttgtggagtagtttaaagccacctgaatgaagttttctgaagttttccaaagaacaaataaacttcttctagattttccttgc

SEQ ID NO: 25122 - protein, 91 aa, Homo sapiens
MAASPGSGSANPRKFSEKIALHTQRQAEETRAFEQLMTDLTLSRVQFQKLQQLRLTQYHGGSLPNVSQLRSSASEFQVERNSSPCVDGLRQ

SEQ ID NO: 25123 - DNA, 2446 bp, Homo sapiens
tatgatcacagctatgcagttcttaccataaatgtaaacggaggctggaaaagagcatgaagaagggaaaacagctaatgtgttagggttgtggatagtagcttagtttttctttcagaaattcttttattgttgttaaagattatgccagtgtatccaaacatacacactcaaagaccttgcaagaggacgttactatcatggtatatgggacatttggaacatgggtaagctctttccgaaaatagagtaatcaaaacccagaaagcaccggaaaccttgagggtgtgatcacttacgtcgagaagaaattgaaacaagactttcattcttgaaccgttcccctacaaaatactatactttgatgcttctttagatctttgctgttacctctcagcgttcttaaatcactttgtttccaggttcaatttcagaagcttcagcaactgcgccttacacagtaccatggaggatccttaccaaatgtgagccagctgcggagcagtgcgtcagagtttcagccgtcatttcaccaagctgataatgttcggggaacccgccatcacgggctggtggagaggccatccaggaaccgcttccaccccctccaccgaaggtctggggacaagccagggcgacaaatatccttttttactcttcaaagggagtgtgcattctgaaatgtttgaaaagttttcaggatttatcttccctgcaattctcctttggcctcagaatcttcatttatctgatgaaaggaggcaatacaaataaatgagttggaaactagaaacatctctgcagtcaacatttggaaacatcattgtaggtgtttatgaaagcatcaataaagttcagtttaatgaaataacaacaaaaacaacctgtaattcggtcccattgcagggtgttctgagcattttctccagaaattggccacgttagagttaaacctgactttgaatcaggttagagagccttagtctctttagcaaaaatggacatagagatatgtgatttatttgtacttcttttgatctgctgacctgcttttggaacttacagacaaaatttcatattattttctatttgtgatgtttcaaactcagtaagtgataactaaaataaacctagaatataggaaaatctcatgcagtgatgtacagtcacaccaaactctgctgttaagtagaaataaaggaaaggaaatggtgaattcacctgacagtttcatttaatcagtcctgtttacagggcggcagtggtgggtgcagctgtgtgaccagcattgtgccgaaggctttggggaacagaactgagctggattttttgggagaggacacagaagtgtgccaggagggcccgtgctctcacttcattcttctcagtactcgggcgcaggggtggaggaaggagaagaaaggcggggtgggtctcgctgcggagagctgaattcctggcagtgatggtagagttggcttcacaagcctagaaaccaggaagtgggggcagggcactcatgtttactgagcacctacccatgccaggcgctgtgctgggtaatttatgtgtcacttagtcctcaaaaactcactgagtcgttaatttttttaaccctcattttctgatgaggaaactgagtgtgtggtgaagtaacccaggattcagaccaggccccgctgatggcccagcctgtgctctcccctccctatgccacctgcgaccattcgcagtgatgaggaccttgtacaagggagccaggagttgtgggggcactctagggaaaccccaacttttcttgccttcaagcttcttgcagtttttagtctatttggaggcaaggataatgaccccagggaatgtttttctctcccctttctcccgcccccaggaacacaccacatttggtccacagaaggactgacttctgattttgtatattatgtggctgttatcaaggaaagtaaagatgataaatgatcttgagaatctattctggaatgtgtgataactttgacattgaatgaaaaaggcaaaaggaaatggaggcaattcatcagcaaatttgtacatgtcaggatggagtggtacatcaaaccgttgtccaaattgccaagaatattcaggcaaaagacttggagtgtttctttgattgatttaacaatgtattttttttggctgggcatggtggctcacgcctgtaatcccagcactttgggaggccgaggtgggcagatcacgaggtcaggagattgagaccatcctggctaacgtggtgaaaccccgtctctactaaaattacaaaaaattagccaggctcggtggtgggcacctatagtcccaggctgaggcaggagaatggtgtgaacccgggaggtggagcttgcggtgaaccgagatcgcgccactgcactccagcctgggcaacagagcgagactccgtctc

SEQ ID NO: 25124 - protein, 89 aa, Homo sapiens [sequence omitted]

SEQ ID NO: 25125 - DNA, 4460 bp, Homo sapiens
aatcggaataggcaagcttccggcgggaagtgagccagggcttggcgcggcggccgtggttgcggcgcgggaagtttggatcctggttccgtccgctaggagtctgcgtgcgaggattatggctgctgttcctcaaaataatctacaggagcaactagaacgtcactcagccagaacacttaataataaattaagtctttcaaaaccaaaattttcaggtttcacttttaaaaagaaaacatcttcagataacaatgtatctgtaactaatgtgtcagtagcaaaaacacctgtattaagaaataaagatgttaatgttaccgaagacttttccttcagtgaacctctacccaacaccacaaatcagcaaagggtcaaggacttctttaaaaatgctccagcaggacaggaaacacagagaggtggatcaaaatcattattgccagatttcttgcagactccgaaggaagttgtatgcactacccaaaacacaccaactgtaaagaaatcccgggatactgctctcaagaaattagaatttagttcttcaccagattctttaagtaccatcaatgattgggatgatatggatgactttgatacttctgagacttcaaaatcatttgttacaccaccccaaagtcactttgtaagagtaagcactgctcagaaatcaaaaaagggtaagagaaacttttttaaagcacagctttatacaacaaacacagtaaagactgatttgcctccaccctcctctgaaagcgagcaaatagatttgactgaggaacagaaggatgactcagaatggttaagcagcgatgtgatttgcatcgatgatggccccattgctgaagtgcatataaatgaagatgctcaggaaagtgactctctgaaaactcatttggaagatgaaagagataatagcgaaaagaagaagaatttggaagaagctgaattacattcaactgagaaagttccatgtattgaatttgatgatgatgattatgatacggattttgttccaccttctccagaagaaattatttctgcttcttcttcctcttcaaaatgccttagtacgttaaaggaccttgacacctctgacagaaaagaggatgttcttagcacatcaaaagatcttttgtcaaaacctgagaaaatgagtatgcaggagctgaatccagaaaccagcacagactgtgacgctagacagataagtttacagcagcagcttattcatgtgatggagcacatctgtaaattaattgatactattcctgatgataaactgaaacttttggattgtgggaacgaactgcttcagcagcggaacataagaaggaaacttctaacggaagtagattttaataaaagtgatgccagtcttcttggctcattgtggagatacaggcctgattcacttgatggccctatggagggtgattcctgccctacagggaattctatgaaggagttaaatttttcacaccttccctcaaattctgtttctcctggggactgtttactgactaccaccctaggaaagacaggattctctgccaccaggaagaatctttttgaaaggcctttattcaatacccatttacagaagtcctttgtaagtagcaactgggctgaaacaccaagactaggaaaaaaaaatgaaagctcttatttcccaggaaatgttctcacaagcactgctgtgaaagatcagaataaacatactgcttcaataaatgacttagaaagagaaacccaaccttcctatgatattgataattttgacatagatgactttgatgatgatgatgactgggaagacataatgcataatttagcagccagcaaatcttccacagctgcctatcaacccatcaaggaaggtcggccaattaaatcagtatcagaaagactttcctcagccaagacagactgtcttccagtgtcatctactgctcaaaatataaacttctcagagtcaattcagaattatactgacaagtcagcacaaaatttagcatccagaaatctgaaacatgagcgtttccaaagtcttagttttcctcatacaaaggaaatgatgaagatttttcataaaaaatttggcctgcataattttagaactaatcagctagaggcgatcaatgctgcactgcttggtgaagactgttttatcctgatgccgactggaggtggtaagagtttgtgttaccagctccctgcctgtgtttctcctggggtcactgttgtcatttctcccttgagatcacttatcgtagatcaagtccaaaagctgacttccttggatattccagctacatatctgacaggtgataagactgactcagaagctacaaatatttacctccagttatcaaaaaaagacccaatcataaaacttctatatgtcactccagaaaagatctgtgcaagtaacagactcatttctactctggagaatctctatgagaggaagctcttggcacgttttgttattgatgaagcacattgtgtcagtcagtggggacatgattttcgtcaagattacaaaagaatgaatatgcttcgccagaagtttccttctgttccggtgatggctcttacggccacagctaatcccagggtacagaaggacatcctgactcagctgaagattctcagacctcaggtgtttagcatgagctttaacagacataatctgaaatactatgtattaccgaaaaagcctaaaaaggtggcatttgattgcctagaatggatcagaaagcaccacccatatgattcagggataatttactgcctctccaggcgagaatgtgacaccatggctgacacgttacagagagatgggctcgctgctcttgcttaccatgctggcctcagtgattctgccagagatgaagtgcagcagaagtggattaatcaggatggctgtcaggttatctgtgctacaattgcatttggaatggggattgacaaaccggacgtgcgatttgtgattcatgcatctctccctaaatctgtggagggttactaccaagaatctggcagagctggaagagatggggaaatatctcactgcctgcttttctatacctatcatgatgtgaccagactgaaaagacttataatgatggaaaaagatggaaaccatcatacaagagaaactcacttcaataatttgtatagcatggtacattactgtgaaaatataacggaatgcaggagaatacagcttttggcctactttggtgaaaatggatttaatcctgatttttgtaagaaacacccagatgtttcttgtgataattgctgtaaaacaaaggattataaaacaagagatgtgactgacgatgtgaaaagtattgtaagatttgttcaagaacatagttcatcacaaggaatgagaaatataaaacatgtaggtccttctggaagatttactatgaatatgctggtcgacattttcttggggagtaagagtgcaaaaatccagtcaggtatatttggaaaaggatctgcttattcacgacacaatgccgaaagactttttaaaaagctgatacttgacaagattttggatgaagacttatatatcaatgccaatgaccaggcgatcgcttatgtgatgctcggaaataaagcccaaactgtactaaatggcaatttaaaggtagactttatggaaacagaaaattccagcagtgtgaaaaaacaaaaagcgttagtagcaaaagtgtctcagagggaagagatggttaaaaaatgtcttggagaacttacagaagtctgcaaatctctggggaaagtttttggtgtccattacttcaatatttttaataccgtcactctcaagaagcttgcagaatctttatcttctgatcctgaggttttgcttcaaattgatggtgttactgaagacaaactggaaaaatatggtgcggaagtgatttcagtattacagaaatactctgaatggacatcgccagctgaagacagttccccagggataagcctgtccagcagcagaggccccggaagaagtgccgctgaggagctcgacgaggaaatacccgtatcttcccactactttgcaagtaaaaccagaaatgaaaggaagaggaaaaagatgccagcctcccaaaggtctaagaggagaaaaactgcttccagtggttccaaggcaaagggggggtctgccacatgtagaaagatatcttccaaaacgaaatcctccagcatcattggatccagttcagcctcacatacttctcaagcgacatcaggagccaatagcaaattggggattatggctccaccgaagcctataaatagaccgtttcttaagccttcatatgcattctcataacaaccgaatctcaatgtacatagaccctctttcttgtttgtcagcatctgaccatctgtgactataaagctgttattcttgttatacc

SEQ ID NO: 25126 - protein, 1417 aa, Homo sapiens; identical to SEQ ID NO: 3339

SEQ ID NO: 25127 - DNA, 4551 bp, Homo sapiens
aatcggaataggcaagcttccggcgggaagtgagccagggcttggcgcggcggccgtggttgcggcgcgggaagtttggatcctggttccgtccgctaggagtctgcgtgcgaggattatggctgctgttcctcaaaataatctacaggagcaactagaacgtcactcagccagaacacttaataataaattaagtctttcaaaaccaaaattttcaggtttcacttttaaaaagaaaacatcttcagataacaatgtatctgtaactaatgtgtcagtagcaaaaacacctgtattaagaaataaagatgttaatgttaccgaagacttttccttcagtgaacctctacccaacaccacaaatcagcaaagggtcaaggacttctttaaaaatgctccagcaggacaggaaacacagagaggtggatcaaaatcattattgccagatttcttgcagactccgaaggaagttgtatgcactacccaaaacacaccaactgtaaagaaatcccgggatactgctctcaagaaattagaatttagttcttcaccagattctttaagtaccatcaatgattgggatgatatggatgactttgatacttctgagacttcaaaatcatttgttacaccaccccaaagtcactttgtaagagtaagcactgctcagaaatcaaaaaagggtaagagaaacttttttaaagcacagctttatacaacaaacacagtaaagactgatttgcctccaccctcctctgaaagcgagcaaatagatttgactgaggaacagaaggatgactcagaatggttaagcagcgatgtgatttgcatcgatgatggccccattgctgaagtgcatataaatgaagatgctcaggaaagtgactctctgaaaactcatttggaagatgaaagagataatagcgaaaagaagaagaatttggaagaagctgaattacattcaactgagaaagttccatgtattgaatttgatgatgatgattatgatacggattttgttccaccttctccagaagaaattatttctgcttcttcttcctcttcaaaatgccttagtacgttaaaggaccttgacacctctgacagaaaagaggatgttcttagcacatcaaaagatcttttgtcaaaacctgagaaaatgagtatgcaggagctgaatccagaaaccagcacagactgtgacgctagacagataagtttacagcagcagcttattcatgtgatggagcacatctgtaaattaattgatactattcctgatgataaactgaaacttttggattgtgggaacgaactgcttcagcagcggaacataagaaggaaacttctaacggaagtagattttaataaaagtgatgccagtcttcttggctcattgtggagatacaggcctgattcacttgatggccctatggagggtgattcctgccctacagggaattctatgaaggagttaaatttttcacaccttccctcaaattctgtttctcctggggactgtttactgactaccaccctaggaaagacaggattctctgccaccaggaagaatctttttgaaaggcctttattcaatacccatttacagaagtcctttgtaagtagcaactgggctgaaacaccaagactaggaaaaaaaaatgaaagctcttatttcccaggaaatgttctcacaagcactgctgtgaaagatcagaataaacatactgcttcaataaatgacttagaaagagaaacccaaccttcctatgatattgataattttgacatagatgactttgatgatgatgatgactgggaagacataatgcataatttagcagccagcaaatcttccacagctgcctatcaacccatcaaggaaggtcggccaattaaatcagtatcagaaagactttcctcagccaagacagactgtcttccagtgtcatctactgctcaaaatataaacttctcagagtcaattcagaattatactgacaagtcagcacaaaatttagcatccagaaatctgaaacatgagcgtttccaaagtcttagttttcctcatacaaaggaaatgatgaagatttttcataaaaaatttggcctgcataattttagaactaatcagctagaggcgatcaatgctgcactgcttggtgaagactgttttatcctgatgccgactggaggtggtaagagtttgtgttaccagctccctgcctgtgtttctcctggggtcactgttgtcatttctcccttgagatcacttatcgtagatcaagtccaaaagctgacttccttggatattccagctacatatctgacaggtgataagactgactcagaagctacaaatatttacctccagttatcaaaaaaagacccaatcataaaacttctatatgtcactccagaaaagatctgtgcaagtaacagactcatttctactctggagaatctctatgagaggaagctcttggcacgttttgttattgatgaagcacattgtgtcagtcagtggggacatgattttcgtcaagattacaaaagaatgaatatgcttcgccagaagtttccttctgttccggtgatggctcttacggccacagctaatcccagggtacagaaggacatcctgactcagctgaagattctcagacctcaggtgtttagcatgagctttaacagacataatctgaaatactatgtattaccgaaaaagcctaaaaaggtggcatttgattgcctagaatggatcagaaagcaccacccatatgattcagggataatttactgcctctccaggcgagaatgtgacaccatggctgacacgttacagagagatgggctcgctgctcttgcttaccatgctggcctcagtgattctgccagagatgaagtgcagcagaagtggattaatcaggatggctgtcaggttatctgtgctacaattgcatttggaatggggattgacaaaccggacgtgcgatttgtgattcatgcatctctccctaaatctgtggagggttactaccaagaatctggcagagctggaagagatggggaaatatctcactgcctgcttttctatacctatcatgatgtgaccagactgaaaagacttataatgatggaaaaagatggaaaccatcatacaagagaaactcacttcaataatttgtatagcatggtacattactgtgaaaatataacggaatgcaggagaatacagcttttggcctactttggtgaaaatggatttaatcctgatttttgtaagaaacacccagatgtttcttgtgataattgctgtaaaacaaaggattataaaacaagagatgtgactgacgatgtgaaaagtattgtaagatttgttcaagaacatagttcatcacaaggaatgagaaatataaaacatgtaggtccttctggaagatttactatgaatatgctggtcgacattttcttggggagtaagagtgcaaaaatccagtcaggtatatttggaaaaggatctgcttattcacgacacaatgccgaaagactttttaaaaagctgatacttgacaagattttggatgaagacttatatatcaatgccaatgaccaggcgatcgcttatgtgatgctcggaaataaagcccaaactgtactaaatggcaatttaaaggtagactttatggaaacagaaaattccagcagtgtgaaaaaacaaaaagcgttagtagcaaaagtgtctcagagggaagagatggttaaaaaatgtcttggagaacttacagaagtctgcaaatctctggggaaagtttttggtgtccattacttcaatatttttaataccgtcactctcaagaagcttgcagaatctttatcttctgatcctgaggttttgcttcaaattgatggtgttactgaagacaaactggaaaaatatggtgcggaagtgatttcagtattacagaaatactctgaatggacatcgccagctgaagacagttccccagggataagcctgtccagcagcagaggccccggaagaagtgccgctgaggagctcgacgaggaaatacccgtatcttcccactactttgcaagtaaaaccagaaatgaaaggaagaggaaaaagatgccagcctcccaaaggtctaagaggagaaaaactgcttccagtggttccaaggcaaagggggggtctgccacatgtagaaagatatcttccaaaacgaaatcctccagcatcattggatccagttcagcctcacatacttctcaagcgacatcaggagccaatagcaaattggggattatggctccaccgaagcctataaatagaccgtttcttaagccttcatatgcattctcataacaaccgaatctcaatgtacatagaccctctttcttgtttgtcagcatctgaccatctgtgactataaagctgttattcttgttataccatttgaagtttttactcgtctctattaatatttaaataaatgctggggggtgatagttcttctttttaaaataaacattttcttttgaata

SEQ ID NO: 25128 - protein, 1417 aa, Homo sapiens; identical to SEQ ID NO: 3339

SEQ ID NO: 25129 - DNA, 480 bp, Homo sapiens
ggcgggaagtgagccagggcttggcgcggcggccgtggttgcggcgcgggaagtttggatcctggttccgtccgctaggagtctgcgtgcgaggattatggctgctgttcctcaaaataatctacaggagcaactagaacgtcactcagccagaacacttaataataaattaagtctttcaaaaccaaaattttcaggtttcacttttaaaaagaaaacatcttcagataacaatgtatctgtaactaatgtgtcagtagcaaaaacacctgtattaagaaataaagatgttaatgttaccgaagacttttccttcagtgaacctctacccaacaccacaaatcagcaaagggtcaaggacttctttaaaaatgctccagcaggacaggaaacacagagaggtggatcaaaatcattattgccagatttcttgcagactccgaaggaagttgtatgcactacccaaaacacaccaactgt

SEQ ID NO: 25130 - protein, 126 aa, Homo sapiens
MAAVPQNNLQEQLERHSARTLNNKLSLSKPKFSGFTFKKKTSSDNNVSVTNVSVAKTPVLRNKDVNVTEDFSFSEPLPNTTNQQRVKDFFKNAPAGQETQRGGSKSLLPDFLQTPKEVVCTTQNTP

SEQ ID NO: 25131 - DNA, 957 bp, Homo sapiens
ggaggttgcagtaagccgacattgcaccactgcactccagcctggaagacagagcaagaatctgtctcaaaaaataaaataaaataaaacctctactgctttgaaattctatttattagttatggcttaatttttaaaatgggagtgggctggcaggattcagttgttcaaacatcatatcaggagttgctctgtctctcacttcccttctctctcctctcttctgtcccatctctccgggtcaaacctccatttctttctatgtgctttctacttttcctttgtatcaatcttatttgaaatctgtctttctttataaggtgacagaaatggccaccagaatcatattaagcttggaaaaagggaggtactttttcccagtcagccctaagtatttccagagttaattttcactgggctgccttgtgtcagatgcctactgagggagtgggaagggtaggtctaataggaaatcttggtaacagtatatgttaccattaaagggaagcctggattccaggcagatcaaaacaacaggtagggctcttgcctgtccaacgcttaacaatacactttgtgttggcacagtgagctttgcacatgaagttagttaaaaataaaatcatagttaactgataaacctttgttccagccaatgaccttgcttaccccaagaaatattatttattaaatattatgaaattaaatgaaaacagttatgagctcttatgataaagcgtagagacaacccaatttcaagttaattcacaggaagataataggacaatatatggttgtttatgatcttgtttttacactgcttcatattttacatatgtgactttcaaaatcttaagacttgatggtctcgaactcctgacctcaggtgatctacccttcttggcctcccaaagtgttgggattacaggcgtgagccaccgtgcccagccccacttt

SEQ ID NO: 25132 - protein, 53 aa, Homo sapiens
MGVGWQDSVVQTSYQELLCLSLPFSLLSSVPSLRVKPPFLSMCFLLFLCINLI

SEQ ID NO: 25133 - DNA, 1408 bp, Homo sapiens
cagtaaagagagggcacaccagtctcagctagatgagtactggccatgggaacagtgggcaagagcagatctgctccactccacgcacatggcacaggtcccaccctcagcttcctcctgccctggctcttgcccttgctctgccctggcctatgccgctggaattggatgaatctttatcttctgatcctgaggttttgcttcaaattgatggtgttactgaagacaaactggaaaaatatggtgcggaagtgatttcagtattacagaaatactctgaatggacatcgccagctgaagacagttccccagggataagcctgtccagcagcagaggccccggaagaagtgccgctgaggagctcgacgaggaaatacccgtatcttcccactactttgcaagtaaaaccagaaatgaaaggaagaggaaaaagatgccagcctcccaaaggtctaagaggagaaaaactgcttccagtggttccaaggcaaagggggggtctgccacatgtagaaagatatcttccaaaacgaaatcctccagcatcattggatccagttcagcctcacatacttctcaagcgacatcaggagccaatagcaaattggggattatggctccaccgaagcctataaatagaccgtttcttaagccttcatatgcattctcataacaaccgaatctcaatgtacatagaccctctttcttgtttgtcagcatctgaccatctgtgactataaagctgttattcttgttataccatttgaagtttttactcgtctctattaatatttaaataaatgctggggggtgatagttcttctttttaaaataaacattttcttttgaataagcatgttttgctgccgctgcaagtgttgtggccgttgtttctcagaacgtctgaggcagcagctgaatcatctcagtgcaagagcttctgagcataacacgaaacccagaagccaaaggaagagccacgcgtgggcccttgtgaaactaaagcttttcgtgtaagacaacacaaacaaaatttaaagacaaatgacggggaaaagaggagaaaatatattacaaaggattagtatccatcataccaaatacccgtgaaccagtcagaaacatcccagggggcaggtggaccaaggatgtgaacaggctagtctcagaagaagaaatacacatgctcatggcccggcactgtggctcacgcctgggatcccagcactttgggaggccgaggcaggtggatcacgaggtcaggagtttgagaccagcctgcccaacatggtgaaaccccgtctctactaaaaatacaaaaattagccaggcgtggtgtacaggcacgcctgtagtcccagctactcaggaggctgaggcaagagaatcgcttgaacccaggaggcg

SEQ ID NO: 25134 - protein, 213 aa, Homo sapiens
MSTGHGNSGQEQICSTPRTWHRSHPQLPPALALALALPWPMPLELDESLSSDPEVLLQIDGVTEDKLEKYGAEVISVLQKYSEWTSPAEDSSPGISLSSSRGPGRSAAEELDEEIPVSSHYFASKTRNERKRKKMPASQRSKRRKTASSGSKAKGGSATCRKISSKTKSSSIIGSSSASHTSQATSGANSKLGIMAPPKPINRPFLKPSYAFS

SEQ ID NO: 25135 - DNA, 427 bp, Homo sapiens
ggccccggaagaagtgccgctgaggagctcgacgaggaaatacccgtatcttcccactactttgcaagtaaaaccagaaatgaaaggaagaggaaaaagatgccagcctcccaaaggtctaagaggagaaaaactgcttccagtggttccaaggcaaagggggggtctgccacatgtagaaagatatcttccaaaacgaaatcctccagcatcattggatccagttcagcctcacatacttctcaagcgacatcaggagccaatagcaaattggggattatggctccaccgaagcctataaatagaccgtttcttaagccttcatatgcattctcataacaaccgaatctcaatgtacatagaccctctttcttgtttgtcagcatctgaccatctgtgactataaagctgttattcttgttatacc

SEQ ID NO: 25136 - protein, 79 aa, Homo sapiens
MPASQRSKRRKTASSGSKAKGGSATCRKISSKTKSSSIIGSSSASHTSQATSGANSKLGIMAPPKPINRPFLKPSYAFS

SEQ ID NO: 25137 - DNA, 399 bp, Homo sapiens
ccgcagtaggagcccctacgtaggccctgcaagaggcctggcgttcaggaaagggcccgctgaccatccagtgcagggaaaggagtccagctctggcctctgcccctcagctccacctcctgcattcctaggagttctccagaggatctgatgggagctcagaaccggtcccaacagctccctccacccttcatgaacgggggctggaaaatgtggtctgctctgataaggatttgcgtcaggctactggctactcagcagccgagaagagcaagcctccaggcctctgcacgcgtgccttctgcccggtgagcctctcactatcgtccttctaaaagacacttcaaaaagaggcaaaatcatgccttccatacatatattaaaaaaagaatatgtgtc

SEQ ID NO: 25138 - protein, 53 aa, Homo sapiens
MGAQNRSQQLPPPFMNGGWKMWSALIRICVRLLATQQPRRASLQASARVPSAR

SEQ ID NO: 25139 - DNA, 4225 bp, Homo sapiens
gaagggataggagcctgactgttgcagctgcagtgagtggcggggaagcagcagcggccaggatgaatcccaggtgctctggagctggatggtgaaggtcggcactcttcaccctcccgagccctgcccgtctcggccccatgcccccaccagtcagccccgggccacaggcagtgagcaggcacctgggagccgaggccctgtgaccaggccaaggagacgggcgctccagggtcccagccacctgtcccccccatggagctgaggccctggttgctatgggtggtagcagcaacaggaaccttggtcctgctagcagctgatgctcagggccagaaggtcttcaccaacacgtgggctgtgcgcatccctggaggcccagcggtggccaacagtgtggcacggaagcatgggttcctcaacctgggccagatcttcggggactattaccacttctggcatcgaggagtgacgaagcggtccctgtcgcctcaccgcccgcggcacagccggctgcagagggagcctcaagtacagtggctggaacagcaggtggcaaagcgacggactaaacgggacgtgtaccaggagcccacagaccccaagtttcctcagcagtggtacctgtctggtgtcactcagcgggacctgaatgtgaaggcggcctgggcgcagggctacacagggcacggcattgtggtctccattctggacgatggcatcgagaagaaccacccggacttggcaggcaattatgatcctggggccagttttgatgtcaatgaccaggaccctgacccccagcctcggtacacacagatgaatgacaacaggcacggcacacggtgtgcgggggaagtggctgcggtggccaacaacggtgtctgtggtgtaggtgtggcctacaacgcccgcattggaggggtgcgcatgctggatggcgaggtgacagatgcagtggaggcacgctcgctgggcctgaaccccaaccacatccacatctacagtgccagctggggccccgaggatgacggcaagacagtggatgggccagcccgcctcgccgaggaggccttcttccgtggggttagccagggccgaggggggctgggctccatctttgtctgggcctcggggaacgggggccgggaacatgacagctgcaactgcgacggctacaccaacagtatctacacgctgtccatcagcagcgccacgcagtttggcaacgtgccgtggtacagcgaggcctgctcgtccacactggccacgacctacagcagtggcaaccagaatgagaagcagatcgtgacgactgacttgcggcagaagtgcacggagtctcacacgggcacctcagcctctgcccccttagcagccggcatcattgctctcaccctggaggccaataagaacctcacatggcgggacatgcaacacctggtggtacagacctcgaagccagcccacctcaatgccaacgactgggccaccaatggtgtgggccggaaagtgagccactcatatggctacgggcttttggacgcaggcgccatggtggccctggcccagaattggaccacagtggccccccagcggaagtgcatcatcgacatcctcaccgagcccaaagacatcgggaaacggctcgaggtgcggaagaccgtgaccgcgtgcctgggcgagcccaaccacatcactcggctggagcacgctcaggcgcggctcaccctgtcctataatcgccgtggcgacctggccatccacctggtcagccccatgggcacccgctccaccctgctggcagccaggccacatgactactccgcagatgggtttaatgactgggccttcatgacaactcattcctgggatgaggatccctctggcgagtgggtcctagagattgaaaacaccagcgaagccaacaactatgggacgctgaccaagttcaccctcgtactctatggcaccgcccctgaggggctgcccgtacctccagaaagcagtggctgcaagaccctcacgtccagtcaggcctgtgtggtgtgcgaggaaggcttctccctgcaccagaagagctgtgtccagcactgccctccagggttcgccccccaagtcctcgatacgcactatagcaccgagaatgacgtggagaccatccgggccagcgtctgcgccccctgccacgcctcatgtgccacatgccaggggccggccctgacagactgcctcagctgccccagccacgcctccttggaccctgtggagcagacttgctcccggcaaagccagagcagccgagagtccccgccacagcagcagccacctcggctgcccccggaggtggaggcggggcaacggctgcgggcagggctgctgccctcacacctgcctgaggtggtggccggcctcagctgcgccttcatcgtgctggtcttcgtcactgtcttcctggtcctgcagctgcgctctggctttagttttcggggggtgaaggtgtacaccatggaccgtggcctcatctcctacaaggggctgccccctgaagcctggcaggaggagtgcccgtctgactcagaagaggacgagggccggggcgagaggaccgcctttatcaaagaccagagcgccctctgatgagcccactgcccaccccctcaagccaatcccctccttgggcactttttaattcaccaaagtatttttttatcttgggactgggtttggaccccagctgggaggcaagaggggtggagactgcttcccatcctaccctcgggcccacctggccacctgaggtgggcccaggaccagctggggcgtggggagggccgtaccccaccctcagcaccccttccatgtggagaaaggagtgaaacctttagggcagcttgccccggccccggccccagccagagttcctgcggagtgaagaggggcagcccttgcttgttgggattcctgacccaggccgcagctcttgcccttccctgtccctctaaagcaataatggtcccatccaggcagtcgggggctggcctaggagatatctgagggaggaggccacctctccaagggcttctgcaccctccaccctgtcccccagctctggtgagtcttggcggcagcagccatcataggaagggaccaaggcaaggcaggtgcctccaggtgtgcacgtggcatgtggcctgtggcctgtgtcccatgacccacccctgtgctccgtgcctccaccaccactggccaccaggctggcgcagccaaggccgaagctctggctgaaccctgtgctggtgtcctgaccaccctcccctctcttgcacccgcctctcccgtcagggcccaagtccctgttttctgagcccgggctgcctgggctgttggcactcacagacctggagcccctgggtgggtggtggggaggggcgctggcccagccggcctctctggcctcccacccgatgctgctttcccctgtggggatctcaggggctgtttgaggatatattttcactttgtgattatttcactttagatgctgatgatttgtttttgtatttttaatgggggtagcagctggactacccacgttctcacacccaccgtccgccctgctcctccctggctgccctggccctgaggtgtgggggctgcagcatgttgctgaggagtgaggaatagttgagccccaagtcctgaagaggcgggccagccaggcgggctcaaggaaagggggtcccagtgggaggggcaggctgacatctgtgtttcaagtggggctcgccatgccgggggttcataggtcactggctctccaagtgccagaggtgggcaggtggtggcactgagcccccccaacactgtgccctggtggagaaagcactgacctgtcatgcccccctcaaacctcctcttctgacgtgccttttgcacccctcccattaggacaatcagtcccctcccatctgggagtccccttttcttttctaccctagccattcctggtacccagccatctgcccaggggtgccccctcctctcccatccccctgccctcgtggccagcccggctggttttgtaagatgctgggttggtgcacagtgatttttttcttgtaatttaaacaggcccagcattgctggttctatttaatggacatgagataatgttagaggttttaaagtgattaaacgtgcagactatgcaaaccaggcccag

SEQ ID NO: 25140 - protein, 794 aa, Homo sapiens; identical to SEQ ID NO: 3341

SEQ ID NO: 25141 - DNA, 765 bp, Homo sapiens
agggccgaggggggctgggctccatctttgtctgggcctcggggaacgggggccgggaacatgacagctgcaactgcgacggctacaccaacagtatctacacgctgtccatcagcagcgccacgcagtttggcaacgtgccgtggtacagcgaggcctgctcctccctggctgccctggccctgaggtgtgggggctgcagcatgttgctgaggagtgaggaatagttgagccccaagtcctgaagaggcgggccagccaggcgggctcaaggaaagggggtcccagtgggaggggcaggctgacatctgtgtttcaagtggggctcgccatgccgggggttcataggtcactggctctccaagtgccagaggtgggcaggtggtggcactgagcccccccaacactgtgccctggtggagaaagcactgacctgtcatgcccccctcaaacctcctcttctgacgtgccttttgcacccctcccattaggacaatcagtcccctcccatctgggagtccccttttcttttctaccctagccattcctggtacccagccatctgcccaggggtgccccctcctctcccatccccctgccctcgtggccagcccggctggttttgtaagatgctgggttggtgcacagtgatttttttcttgtaatttaaacaggcccagcattgctggttctatttaatggacatgagataatgttagaggttttaaagtgattaaacgtgcagactatgcaaaccaggcccag

SEQ ID NO: 25142 - protein, 41 aa, Homo sapiens
MTAATATATPTVSTRCPSAAPRSLATCRGTARPAPPWLPWP

SEQ ID NO: 25143 - DNA, 397 bp, Homo sapiens
ctctctgtagggcagcccttagggcagctggagagctgctcccaaaaaagactgatccccagcctctcccttccttctttgcagtaagaacctcacatggcgggacatgcaacacctggtggtacagacctcgaagccagcccacctcaatgccaacgactgggccaccaatggtgtgggccggaaagtgagccactcatatggctacgggcttttggacgcaggcgccatggtggccctggcccagaattggaccacagtggccccccagcggaagtgcatcatcgacatcctcaccgagcccaagtgagggctggacccaggctgggagggggccagtgggacctgagagtcgcagggggtgcccgctggtccctctgggccaggctgaccatca

SEQ ID NO: 25144 - protein, 99 aa, Homo sapiens
MAGHATPGGTDLEASPPQCQRLGHQWCGPESEPLIWLRAFGRRRHGGPGPELDHSGPPAEVHHRHPHRAQVRAGPRLGGGQWDLRVAGGARWSLWARLT

SEQ ID NO: 25145 - DNA, 1706 bp, Homo sapiens
ggggccggccctgacagactgcctcagctgccccagccacgcctccttggaccctgtggagcagacttgctcccggcaaagccagagcagccgagagtccccgccacagcagcagccacctcggctgcccccggaggtggaggcggggcaacggctgcgggcagggctgctgccctcacacctgcctgaggtggtggccggcctcagctgcgccttcatcgtgctggtcttcgtcactgtcttcctggtcctgcagctgcgctctggctttagttttcggggggtgaaggtgtacaccatggaccgtggcctcatctcctacaaggggctgcccccccttccatgtggagaaaggagtgaaacctttagggcagcttgccccggccccggccccagccagagttcctgcggagtgaagaggggcagcccttgcttgttgggattcctgacccaggccgcagctcttgcccttccctgtccctctaaagcaataatggtcccatccaggcagtcgggggctggcctaggagatatctgagggaggaggccacctctccaagggcttctgcaccctccaccctgtcccccagctctggtgagtcttggcggcagcagccatcataggaagggaccaaggcaaggcaggtgcctccaggtgtgcacgtggcatgtggcctgtggcctgtgtcccatgacccacccctgtgctccgtgcctccaccaccactggccaccaggctggcgcagccaaggccgaagctctggctgaaccctgtgctggtgtcctgaccaccctcccctctcttgcacccgcctctcccgtcagggcccaagtccctgttttctgagcccgggctgcctgggctgttggcactcacagacctggagcccctgggtgggtggtggggaggggcgctggcccagccggcctctctggcctcccacccgatgctgctttcccctgtggggatctcaggggctgtttgaggatatattttcactttgtgattatttcactttagatgctgatgatttgtttttgtatttttaatgggggtagcagctggactacccacgttctcacacccaccgtccgccctgctcctccctggctgccctggccctgaggtgtgggggctgcagcatgttgctgaggagtgaggaatagttgagccccaagtcctgaagaggcgggccagccaggcgggctcaaggaaagggggtcccagtgggaggggcaggctgacatctgtgtttcaagtggggctcgccatgccgggggttcataggtcactggctctccaagtgccagaggtgggcaggtggtggcactgagcccccccaacactgtgccctggtggagaaagcactgacctgtcatgcccccctcaaacctcctcttctgacgtgccttttgcacccctcccattaggacaatcagtcccctcccatctgggagtccccttttcttttctaccctagccattcctggtacccagccatctgcccaggggtgccccctcctctcccatccccctgccctcgtggccagcccggctggttttgtaagatgctgggttggtgcacagtgatttttttcttgtaatttaaacaggcccagcattgctggttctatttaatggacatgagataatgttagaggttttaaagtgattaaacgtgcagactatgcaaaccaggcccag

SEQ ID NO: 25146 - protein, 79 aa, Homo sapiens
MDRGLISYKGLPPLPCGERSETFRAACPGPGPSQSSCGVKRGSPCLLGFLTQAAALALPCPSKAIMVPSRQSGAGLGDI

SEQ ID NO: 25147 - DNA, 1142 bp, Homo sapiens
acggctgcgggcagggctgctgccctcacacctgcctgaggtggtggccggcctcagctgcgccttcatcgtgctggtcttcgtcactgtcttcctggtcctgcagctgcgctctggctttagttttcggggggtgaaggtgtacaccatggaccgtggcctcatctcctacaaggggctgccccctgaagcctggcaggaggagtgcccgtctgactcagaagaggacgagggccggggcgagaggaccgcctttatcaaagaccagagcgccctctgatgagcccactgcccaccccctcaagccaatcccctccttgggcactttttaattcaccaaagtatttttttatcttgggactgggtttggaccccagctgggaggcaagaggggtggagactgcttcccatcctaccctcgggcccacctggccacctgaggtgggcccaggaccagctggggcgtggggagggccgtaccccaccctcagcaccccttccatgtggagaaaggagtgaaacctttagggcagcttgccccggccccggccccagccagagttcctgcggagtgaagaggggcagcccttgcttgttgggattcctgacccaggccgcagctcttgcccttccctgtccctctaaagcaataatggtcccatccaggcagtcgggggctggcctaggagatatctgagggaggaggccacctctccaagggcttctgcaccctccaccctgtcccccagctctggtgagtcttggcggcagcagccatcataggaagggaccaaggcaaggcaggtgcctccaggtgtgcacgtggcatgtggcctgtggcctgtgtcccatgacccacccctgtgctccgtgcctccaccaccactggccaccaggctggcgcagccaaggccgaagctctggctgaaccctgtgctggtgtcctgaccaccctccccccctcctctcccatccccctgccctcgtggccagcccggctggttttgtaagatgctgggttggtgcacagtgatttttttcttgtaatttaaacaggcccagcattgctggttctatttaatggacatgagataatgttagaggttttaaagtgattaaacgtgcagactatgcaaaccagg

SEQ ID NO: 25148 - protein, 79 aa, Homo sapiens [sequence omitted]

SEQ ID NO: 25149 - DNA, 1659 bp, Homo sapiens
ggtgtacaccatggaccgtggcctcatctcctacaaggggctgccccctgaagcctggcaggaggagtgcccgtctgactcagaagaggacgagggccggggcgagaggaccgcctttatcaaagaccagagcgccctctgatgagcccactgcccaccccctcaagccaatcccctccttgggcactttttaattcaccaaagtatttttttatcttgggactgggtttggaccccagctgggaggcaagaggggtggagactgcttcccatcctaccctcgggcccacctggccacctgaggtgggcccaggaccagctggggcgtggggagggccgtaccccaccctcagcaccccttccatgtggagaaaggagtgaaacctttagggcagcttgccccggccccggccccagccagagttccctgtccctctaaagcaataatggtcccatccaggcagtcgggggctggcctaggagatatctgagggaggaggccacctctccaagggcttctgcaccctccaccctgtcccccagctctggtgagtcttggcggcagcagccatcataggaagggaccaaggcaaggcaggtgcctccaggtgtgcacgtggcatgtggcctgtggcctgtgtcccatgacccacccctgtgctccgtgcctccaccaccactggccaccaggctggcgcagccaaggccgaagctctggctgaaccctgtgctggtgtcctgaccaccctcccctctcttgcacccgcctctcccgtcagggcccaagtccctgttttctgagcccgggctgcctgggctgttggcactcacagacctggagcccctgggtgggtggtggggaggggcgctggcccagccggcctctctggcctcccacccgatgctgctttcccctgtggggatctcaggggctgtttgaggatatattttcactttgtgattatttcactttagatgctgatgatttgtttttgtatttttaatgggggtagcagctggactacccacgttctcacacccaccgtccgccctgctcctccctggctgccctggccctgaggtgtgggggctgcagcatgttgctgaggagtgaggaatagttgagccccaagtcctgaagaggcgggccagccaggcgggctcaaggaaagggggtcccagtgggaggggcaggctgacatctgtgtttcaagtggggctcgccatgccgggggttcataggtcactggctctccaagtgccagaggtgggcaggtggtggcactgagcccccccaacactgtgccctggtggagaaagcactgacctgtcatgcccccctcaaacctcctcttctgacgtgccttttgcacccctcccattaggacaatcagtcccctcccatctgggagtccccttttcttttctaccctagccattcctggtacccagccatctgcccaggggtgccccctcctctcccatccccctgccctcgtggccagcccggctggttttgtaagatgctgggttggtgcacagtgatttttttcttgtaatttaaacaggcccagcattgctggttctatttaatggacatgagataatgttagaggttttaaagtgattaaacgtgcagactatgcaaaccaggcccag

SEQ ID NO: 25150 - protein, 79 aa, Homo sapiens [sequence omitted]

SEQ ID NO: 25151 - DNA, 1114 bp, Homo sapiens
tctaaagcaataatggtcccatccaggcagtcgggggctggcctaggagatatctgagggaggaggccacctctccaagggcttctgcaccctccaccctgtcccccagctctggtgagtcttggcggcagcagccatcataggaagggaccaaggcaaggcaggtgcctccaggtgtgcacgtggcatgtggcctgtggcctgtgtcccatgacccacccctgtgctccgtgcctccaccaccactggccaccaggctggcgcagccaaggccgaagctctggctgaaccctgtgctggtgtcctgaccaccctcccctctcttgcacccgcctctcccgtcagggcccaagtccctgttttctgagcccgggctgcctgggctgttggcactcacagacctggagcccctgggtgggtggtggggaggggcgctggcccagccggcctctctggcctcccacccgatgctgctttcccctgtggggatctcaggggctgtttgaggatatattttcactttgtgattatttcactttagatgctgatgatttgtttttgtatttttaatgggggtagcagctggactacccacgttctcacacccaccgtccgccctgctcctccctggctgccctggccctgaggtgtgggggctgcagcatgttgctgaggagtgaggaatagttgagccccaagtcctgaagaggcgggccagccaggcgggctcaaggaaagggggtcccagtgggaggggcaggctgacatctgtgtttcaagtggggctcgccatgccgggggttcataggtcactggctctccaagtgccagaggtgggcaggtggtggcactgagcccccccaacactgtgccctggtggagaaagcactgacctgtcatgcccccctcaaacctcctcttctgacgggtgccccctcctctcccatccccctgccctcgtggccagcccggctggttttgtaagatgctgggttggtgcacagtgatttttttcttgtaatttaaacaggcccagcattgctggttctatttaatggacatgagataatgttagaggttttaaagtgattaaacgtgcagactatgcaaacca

SEQ ID NO: 25152 - protein, 36 aa, Homo sapiens
MGVAAGLPTFSHPPSALLLPGCPGPEVWGLQHVAEE

SEQ ID NO: 25153 - DNA, 2775 bp, Homo sapiens
cgcggaatcaggaactggccggggtccgcaccgggcctgagtcggtccgaggccgtcccaggagcagctgcccgtgcggaacagcactatgggcttctcttccgagctgtgcagcccccagggccacggggtcctgcagcaaatgcaggaggccgagcttcgtctactggagggcatgagaaagtggatggcccagcgggtcaagagtgacagggagtatgcaggactgcttcaccacatgtccctgcaggacagtgggggccagagccgggccatcagccctgacagccccatcagtcagtcctgggctgagatcaccagccaaactgagggcctgagccgcttgctgcggcagcacgcagaggatctgaactcagggcccctgagcaagctgagcctgctcatccgggaacggcagcagcttcgcaagacctacagcgagcagtggcagcagctgcagcaggagctcaccaagacccacagccaggacattgagaagctgaagagccagtaccgagctctggcacgggacagtgcccaagccaagcgcaagtaccaggaggccagcaaagacaaggaccgtgacaaggctaaggacaagtatgtgcgcagcctgtggaagctctttgctcaccacaaccgctatgtgctgggcgtgcgggctgcgcagctacaccaccagcaccaccaccagctcctgctgcccggcctgctgcggtcactgcaggacctgcacgaggagatggcttgcatcctgaaggagatcctgcaggaatacctggagattagcagcctggtgcaggatgaggtggtggccattcaccgggagatggctgcagctgctgcccgcatccagcctgaggctgagtaccaaggcttcctgcgacagtatgggtccgcacctgacgtcccaccctgtgtcacgttcgatgagtcactgcttgaggagggtgaaccgctggagcctggggagctccagctgaacgagctgactgtggagagcgtgcagcacacgctgacctcagtgacagatgagctggctgtggccaccgagatggtgttcaggcggcaggagatggttacgcagctgcaacaggagctccggaatgaagaggagaacacccacccccgggagcgggtgcagctgctgggcaagaggcaagtgctgcaagaagcactgcaggggctgcaggtagcgctgtgcagccaggccaagctgcaggcccagcaggagttgctgcagaccaagctggagcacctgggccccggcgagcccccgcctgtgctgctcctgcaggatgaccgccactccacgtcgtcctcggagcaggagcgagaggggggaaggacacccacgctggagatccttaagagccacatctcaggaatcttccgccccaagttctcgctccctccaccgctgcagctcattccggaggtgcagaagcccctgcatgagcagctgtggtaccacggggccatcccgagggcagaggtggctgagctgctggtgcactctggggacttcctggtgcgggagagccagggcaagcaggagtacgtgctgtcggtgctgtgggatggtctgccccggcacttcatcatccagtccttggataacctgtaccgactggaaggggaaggctttcctagcattcctttgctcatcgaccacctactgagcacccagcagcccctcaccaagaagagtggtgttgtcctgcacagggctgtgcccaaggacaagtgggtgctgaaccatgaggacctggtgttgggtgagcagattggacgggggaactttggcgaagtgttcagcggacgcctgcgagccgacaacaccctggtggcggtgaagtcttgtcgagagacgctcccacctgacctcaaggccaagtttctacaggaagcgaggatcctgaagcagtacagccaccccaacatcgtgcgtctcattggtgtctgcacccagaagcagcccatctacatcgtcatggagcttgtgcaggggggcgacttcctgaccttcctccgcacggagggggcccgcctgcgggtgaagactctgctgcagatggtgggggatgcagctgctggcatggagtacctggagagcaagtgctgcatccaccgggacctggctgctcggaactgcctggtgacagagaagaatgtcctgaagatcagtgactttgggatgtcccgagaggaagccgatggggtctatgcagcctcagggggcctcagacaagtccccgtgaagtggaccgcacctgaggcccttaactacggccgctactcctccgaaagcgacgtgtggagctttggcatcttgctctgggagaccttcagcctgggggcctccccctatcccaacctcagcaatcagcagacacgggagtttgtggagaaggggggccgtctgccctgcccagagctgtgtcctgatgccgtgttcaggctcatggagcagtgctgggcctatgagcctgggcagcggcccagcttcagcaccatctaccaggagctgcagagcatccgaaagcggcatcggtgaggctgggacccccttctcaagctggtggcctctgcaggcctaggtgcagctcctcagcggctccagctcatatgctgacagctcttcacagtcctggactcctgccaccagcatccacactgccggcaggatgcagcgccgtgtcctctctgtgtccctgctgctgccagggcttcctcttccgggcagaaacaataaaaccacttgtgcccactgaa

SEQ ID NO: 25154 - protein, 822 aa, Homo sapiens; identical to SEQ ID NO: 3343

SEQ ID NO: 25155 - DNA, 691 bp, Homo sapiens
gagtcggtccgaggccgtcccaggagcagctgcccgtgcgggtacctctagccccggggcctggaggagcggtgggagctgggggcgcggcaggcaggggcagagcaggcgttccgagggccagagacccacccagaacagcactatgggcttctcttccgagctgtgcagcccccagggccacggggtcctgcagcaaatgcaggaggccgagcttcgtctactggagggcatgagaaagtggatggcccagcgggtcaagagtgacagggagtatgcaggactgcttcaccacatgtccctgcaggacagtgggggccagagccgggccatcagccctgacagccccatcagtcaggtgggtctctatgggactctggtgggtgctggctgtatctgccttctccttcctctcctgggggccctctggggcagtggctggagatctggcaggccaatgcttgggagccattgtgcccccctccctgcctcccccatctgtgctgtatagtcctgggctgagatcaccagccaaactgagggcctgagccgcttgctgcggcagcacgcagaggatctgaactcagggcccctgagcaagctgagcctgctcatccgggaacggcagcagcttcgcaagacctacagcgagcagtggcagcagctgcagcaggagctcaccaaggtgagc

SEQ ID NO: 25156 - protein, 121 aa, Homo sapiens
MGFSSELCSPQGHGVLQQMQEAELRLLEGMRKWMAQRVKSDREYAGLLHHMSLQDSGGQSRAISPDSPISQVGLYGTLVGAGCICLLLPLLGALWGSGWRSGRPMLGSHCAPLPASPICAV

SEQ ID NO: 25157 - DNA, 577 bp, Homo sapiens
ctctccctttccccctcccagggctcacgccccctcagaggggcctcagacaagtccccgtgaagtggaccgcacctgaggcccttaactacggccgctactcctccgaaagcgacgtgtggagctttggcatcttgctctgggagaccttcagcctgggggcctccccctatcccaacctcagcaatcagcagacacgggagtttgtggagaaggggggccgtctgccctgcccagagctgtgtcctgatgccgtgttcaggctcatggagcagtgctgggcctatgagcctgggcagcggcccagcttcagcaccatctaccaggagctgcagagcatccgaaagcggcatcggtgaggctgggacccccttctcaagctggtggcctctgcaggcctaggtgcagctcctcagcggctccagctcatatgctgacagctcttcacagtcctggactcctgccaccagcatccacactgccggcaggatgcagcgccgtgtcctctctgtgtccctgctgctgccagggcttcctcttccgggcagaaacaataaaaccacttgtgcccactgaa

SEQ ID NO: 25158 - protein, 50 aa, Homo sapiens
MPCSGSWSSAGPMSLGSGPASAPSTRSCRASESGIGEAGTPFSSWWPLQA

SEQ ID NO: 25159 - DNA, 361 bp, Homo sapiens
ggccggagccgggtgaggccgcggagaacgcaccccgctacgcgtctgccgagacggaggcgggcgtttcgaccactgcccgatcatgcgcttactcaactccacccacattggcctagacccagtctctaagggctgaaaatattgcccggaagctcccgagcagaatcagatcgcgctaagtagggcacaacgcagaggcgacaaagctcctcggccccagggcccgcggagcagactccggagcgcggtcccgcccacgctcggctccgcagttagcgtcctccttcctcctgagcagaaagaaactcattctgtgtttctgagaaaggatcgtgccaggcactgtttctggtgagtg

SEQ ID NO: 25160 - protein, 72 aa, Homo sapiens
KYCPEAPEQNQIALSRAQRRGDKAPRPQGPRSRLRSAVPPTLGSAVSVLLPPEQKETHSVFLRKDRARHCFW

SEQ ID NO: 25161 - DNA, 4940 bp, Homo sapiens
ggcagctcggccgactgggcccggagcggcgcggaggccgggcgctgacggtgtgtgtggaggccagtatgaagctgaaaaagcaggtgacagtgtgtggggctgccatcttctgtgtggcagtcttctcgctctacctcatgctggaccgagtgcaacacgatcccacccgacaccagaatggtgggaacttcccccggagccaaatttctgtgctgcagaaccgcattgagcagctggagcagcttttggaggagaaccatgagattatcagccatatcaaggactccgtgctggagctgacagccaacgcagagggcccgcccgccatgctgccctactacacggtcaatggctcctgggtggtgccaccggagccccggcccagcttcttctccatctccccgcaggactgccagtttgctttggggggccggggtcagaagccagagctgcagatgctcactgtgtcggaggagctgccgtttgacaacgtggatggtggtgtgtggaggcaaggcttcgacatctcctacgacccgcacgactgggatgctgaagacctgcaggtgtttgtggtgccccactctcacaatgacccaggctggatcaagacctttgacaagtactacacagagcagacccaacacatcctcaatagcatggtgtctaagctgcaggaggacccccggcggcgcttcctctgggcagaggtctccttcttcgccaagtggtgggacaacatcaatgtccaaaagagagcggcagtccgaaggctggtgggaaacgggcagctggagattgcgacaggaggctgggtgatgccagatgaggccaattcccactactttgcattgattgaccagctcatcgaaggacaccagtggctggagagaaatcttggtgcaaccccccgctctggctgggcagtggacccctttggatacagctccaccatgccttacctgctgcgccgtgccaacctcaccagcatgctgattcagagagtgcactatgccatcaagaagcactttgctgccacccacagcctagagttcatgtggaggcagacatgggactcggactccagcacagacatcttctgtcacatgatgcccttctacagctatgacgtcccccatacctgtggcccagatcccaagatctgctgccaatttgatttcaaacgcctgcctggtgggcgcatcaactgcccttggaaggtgccaccccgggccatcacagaggccaacgtggcagagagggcagccctgcttctggaccaataccggaagaagtcccagctgttccgaagcaacgtcctcctggtgcctcttggagatgacttccgatatgacaagccccaggagtgggatgcccagttcttcaactaccaacggctctttgacttcttcaacagcaggcctaacctccatgtgcaggcccagtttggcactctttctgactattttgatgccctgtacaagaggacaggggtggagccaggggcccggcctccagggtttcctgtgctgagcggggatttcttctcctatgcggaccgggaggatcattactggacaggctattacacttcccggcccttctacaagagcttagaccgagtcctggaagcccacctgcggggggcagaggttctgtacagcctggctgcagctcacgctcgccgctctggtctggctggccggtacccactgtctgatttcaccctcctgacggaagctcggcgcacattggggctcttccagcatcacgatgccatcactggcacggccaaggaggctgtggtggtggactatggggtcaggcttctgcgctcccttgtcaacctgaagcaggtcatcattcatgcagcccactatctggtgctgggggacaaggagacctaccactttgaccctgaggcgcccttcctccaagtggatgacactcgcttaagtcacgacgccctcccagagcgcacggtgatccagctggattcctcgcccaggtttgtggtcctattcaacccactggaacaggagcgattcagcatggtgtccctgctggtcaactctccccgcgtgcgtgtcctttcggaggagggtcagcccctggccgtgcagatcagcgcacactggagctctgccaccgaggcggtccctgacgtctaccaggtgtctgtgcctgtccgcctgccagccctgggcctgggcgtgctgcagctacagctgggcctggatgggcaccgcacgctgccctcctctgtgcgcatctacctgcacggccggcagctgtccgtcagcaggcacgaagcgtttcctctccgtgtcattgactctggcaccagcgacttcgccctcagcaaccgctacatgcaggtctggttctcaggccttactgggctcctcaagagcatccgaagggtggatgaggagcacgagcagcaggtggacatgcaggtccttgtctatggcacccgtacgtccaaagacaagagtggagcctacctcttcctgcccgatggcgaggccaagccctacgtccccaaggagccccccgtgctgcgtgtcactgaaggccctttcttctcagaggtggttgcgtactatgagcacattcaccaggcggtccggctttacaatctgccaggggtggaggggctgtctctggacatatcatccctggtggacatccgggactacgtcaacaaggagctggccctgcacatccatacagacatcgacagccagggtatcttcttcacagacctcaatggctttcaggtgcagccccgacggtatctgaagaagctccccctccaggccaacttctaccccatgccagtcatggcctatatccaggacgcacagaagcgcctcacgctgcacactgcccaggccctgggtgtctctagcctcaaagatggccagctggaggtgatcttggaccggcggctgatgcaggatgacaaccggggcctaggccaagggctcaaggacaacaagagaacctgcaaccgtttccgcctcctgctagagcggcgaaccgtgggcagtgaggtccaagatagccactctaccagctacccatccctcctcagccacctgacctccatgtacctgaacgccccggcgctcgctctgcctgtagccaggatgcagctcccaggccctggtctgcgctcatttcatcctctggcttcctcactgccctgtgacttccacctgctcaacctacgtacgctccaggctgaggaggacaccctaccctcggcggagaccgcactcatcttacaccgcaagggttttgactgcggcctggaggccaagaacttgggcttcaactgcaccacaagccaaggcaaggtagccctgggcagccttttccatggcctggatgtggtattccttcagccaacctccttgacgttactgtaccctctggcctccccgtccaacagcactgacgtctatttggagcccatggagattgctacctttcgcctccgcttgggttagggcttcttgtggcctgaagagaaagttcattcacagagactgcctcttaacatgaagatcattggacaagccacacgggtatcccatcccgatctgcctcccagaactgtgacacactgggctctgccctcattttctgtttattgctgctgctgtgttttcggcgcaacccacaaacccagtgatgggtaaatagggcagacgccagtgagatcagggagagaaggcccttggtcagagtgggcagtgccaggctctgctttgggttgtgagtggacacccaactgggcacaggctcaggcacccatcctttttccaaacagggatatagaagtggtggaagcagacagaagaggtaagggaggctaagtgggtaacagcccagcatcagggtcactgtggcaacagcaggctctaggggaatcctgtggttatgtagagactccatgtcctggtgtgatgagcaggatcagagtgactctgggaggacaggggtggggacccagagttagcagtggggatggagcagtagaaggaatcactgtttctcctaggagtctgaaggcctcgctgctttctgtgatggctttgcagtaagtgccgcctggcctgcatgcattggctaacaggctgcagaatggcaggaaggactcgctagagattgtcatggccagagatcataggtcacttcaggtagcaagacccctggcaaactgggcacttggcctatgtactgatttgtgggatggtggcaggggtgtggggtccttcaccctgcctgaattctctttggcttctgtgctctgtatgctgctgtccccaagggctctttcttattatggcagggagtggggattggtcctactttctttctctggaaaggaaagcctccaagactccatgtgcttgggcagcttgagaaggcgttcagcaccacgcctagcaggcagaccttgaagcctcacctttagtctatctgcagaggtattcagttcctggcacaggggactaggggcatgtagagtatatgaggaggcagtatggctgtgcaggagccttcatttcagcttcaattaatagggaagaatttatgatagctctatagatgctgaaaaggtatttcgtaagatttaaaatccatcccttattaaaactcttagtaaattaagtctggaaagaaacaccctaatctagataaaggtctgtttcagaaaccaacagtgatggcattctaaagagtcagacgccacaggcattcccattaaagtcagaaactagccaagggcaagctattattcagcagtgtcccggcactactaacccctgcaacaagccagatgaggaacataaggaagaattataattgtcattatttgtagacaataaaactgcctacctgtaaaacctaagaatcaactg

SEQ ID NO: 25162 - protein, 1150 aa, Homo sapiens; identical to SEQ ID NO: 3345

SEQ ID NO: 25163 - DNA, 5068 bp, Homo sapiens
ggcagctcggccgactgggcccggagcggcgcggaggccgggcgctgacggtgtgtgtggaggccagtatgaagctgaaaaagcaggtgacagtgtgtggggctgccatcttctgtgtggcagtcttctcgctctacctcatgctggaccgagtgcaacacgatcccacccgacaccagaatggtgggaacttcccccggagccaaatttctgtgctgcagaaccgcattgagcagctggagcagcttttggaggagaaccatgagattatcagccatatcaaggactccgtgctggagctgacagccaacgcagagggcccgcccgccatgctgccctactacacggtcaatggctcctgggtggtgccaccggagccccggcccagcttcttctccatctccccgcaggactgccagtttgctttggggggccggggtcagaagccagagctgcagatgctcactgtgtcggaggagctgccgtttgacaacgtggatggtggtgtgtggaggcaaggcttcgacatctcctacgacccgcacgactgggatgctgaagacctgcaggtgtttgtggtgccccactctcacaatgacccaggctggatcaagacctttgacaagtactacacagagcagacccaacacatcctcaatagcatggtgtctaagctgcaggaggacccccggcggcgcttcctctgggcagaggtctccttcttcgccaagtggtgggacaacatcaatgtccaaaagagagcggcagtccgaaggctggtgggaaacgggcagctggagattgcgacaggaggctgggtgatgccagatgaggccaattcccactactttgcattgattgaccagctcatcgaaggacaccagtggctggagagaaatcttggtgcaaccccccgctctggctgggcagtggacccctttggatacagctccaccatgccttacctgctgcgccgtgccaacctcaccagcatgctgattcagagagtgcactatgccatcaagaagcactttgctgccacccacagcctagagttcatgtggaggcagacatgggactcggactccagcacagacatcttctgtcacatgatgcccttctacagctatgacgtcccccatacctgtggcccagatcccaagatctgctgccaatttgatttcaaacgcctgcctggtgggcgcatcaactgcccttggaaggtgccaccccgggccatcacagaggccaacgtggcagagagggcagccctgcttctggaccaataccggaagaagtcccagctgttccgaagcaacgtcctcctggtgcctcttggagatgacttccgatatgacaagccccaggagtgggatgcccagttcttcaactaccaacggctctttgacttcttcaacagcaggcctaacctccatgtgcaggcccagtttggcactctttctgactattttgatgccctgtacaagaggacaggggtggagccaggggcccggcctccagggtttcctgtgctgagcggggatttcttctcctatgcggaccgggaggatcattactggacaggctattacacttcccggcccttctacaagagcttagaccgagtcctggaagcccacctgcggggggcagaggttctgtacagcctggctgcagctcacgctcgccgctctggtctggctggccggtacccactgtctgatttcaccctcctgacggaagctcggcgcacattggggctcttccagcatcacgatgccatcactggcacggccaaggaggctgtggtggtggactatggggtcaggcttctgcgctcccttgtcaacctgaagcaggtcatcattcatgcagcccactatctggtgctgggggacaaggagacctaccactttgaccctgaggcgcccttcctccaagtggatgacactcgcttaagtcacgacgccctcccagagcgcacggtgatccagctggattcctcgcccaggtttgtggtcctattcaacccactggaacaggagcgattcagcatggtgtccctgctggtcaactctccccgcgtgcgtgtcctttcggaggagggtcagcccctggccgtgcagatcagcgcacactggagctctgccaccgaggcggtccctgacgtctaccaggtgtctgtgcctgtccgcctgccagccctgggcctgggcgtgctgcagctacagctgggcctggatgggcaccgcacgctgccctcctctgtgcgcatctacctgcacggccggcagctgtccgtcagcaggcacgaagcgtttcctctccgtgtcattgactctggcaccagcgacttcgccctcagcaaccgctacatgcaggtctggttctcaggccttactgggctcctcaagagcatccgaagggtggatgaggagcacgagcagcaggtggacatgcaggtccttgtctatggcacccgtacgtccaaagacaagagtggagcctacctcttcctgcccgatggcgaggccaagccctacgtccccaaggagccccccgtgctgcgtgtcactgaaggccctttcttctcagaggtggttgcgtactatgagcacattcaccaggcggtccggctttacaatctgccaggggtggaggggctgtctctggacatatcatccctggtggacatccgggactacgtcaacaaggagctggccctgcacatccatacagacatcgacagccagggtatcttcttcacagacctcaatggctttcaggtgcagccccgacggtatctgaagaagctccccctccaggccaacttctaccccatgccagtcatggcctatatccaggacgcacagaagcgcctcacgctgcacactgcccaggccctgggtgtctctagcctcaaagatggccagctggaggtgatcttggaccggcggctgatgcaggatgacaaccggggcctaggccaagggctcaaggacaacaagagaacctgcaaccgtttccgcctcctgctagagcggcgaaccgtgggcagtgaggtccaagatagccactctaccagctacccatccctcctcagccacctgacctccatgtacctgaacgccccggcgctcgctctgcctgtagccaggatgcagctcccaggccctggtctgcgctcatttcatcctctggcttcctcactgccctgtgacttccacctgctcaacctacgtacgctccaggctgaggaggacaccctaccctcggcggagaccgcactcatcttacaccgcaagggttttgactgcggcctggaggccaagaacttgggcttcaactgcaccacaagccaaggcaaggtagccctgggcagccttttccatggcctggatgtggtattccttcagccaacctccttgacgttactgtaccctctggcctccccgtccaacagcactgacgtctatttggagcccatggagattgctacctttcgcctccgcttgggttagggcttcttgtggcctgaagagaaagttcattcacagagactgcctcttaacatgaagatcattggacaagccacacgggtatcccatcccgatctgcctcccagaactgtgacacactgggctctgccctcattttctgtttattgctgctgctgtgttttcggcgcaacccacaaacccagtgatgggtaaatagggcagacgccagtgagatcagggagagaaggcccttggtcagagtgggcagtgccaggctctgctttgggttgtgagtggacacccaactgggcacaggctcaggcacccatcctttttccaaacagggatatagaagtggtggaagcagacagaagaggtaagggaggctaagtgggtaacagcccagcatcagggtcactgtggcaacagcaggctctaggggaatcctgtggttatgtagagactccatgtcctggtgtgatgagcaggatcagagtgactctgggaggacaggggtggggacccagagttagcagtggggatggagcagtagaaggaatcactgtttctcctaggagtctgaaggcctcgctgctttctgtgatggctttgcagtaagtgccgcctggcctgcatgcattggctaacaggctgcagaatggcaggaaggactcgctagagattgtcatggccagagatcataggtcacttcaggtagcaagacccctggcaaactgggcacttggcctatgtactgatttgtgggatggtggcaggggtgtggggtccttcaccctgcctgaattctctttggcttctgtgctctgtatgctgctgtccccaagggctctttcttattatggcagggagtggggattggtcctactttctttctctggaaaggaaagcctccaagactccatgtgcttgggcagcttgagaaggcgttcagcaccacgcctagcaggcagaccttgaagcctcacctttagtctatctgcagaggtattcagttcctggcacaggggactaggggcatgtagagtatatgaggaggcagtatggctgtgcaggagccttcatttcagcttcaattaatagggaagaatttatgatagctctatagatgctgaaaaggtatttcgtaagatttaaaatccatcccttattaaaactcttagtaaattaagtctggaaagaaacaccctaatctagataaaggtctgtttcagaaaccaacagtgatggcattctaaagagtcagacgccacaggcattcccattaaagtcagaaactagccaagggcaagctattattcagcagtgtcccggcactactaacccctgcaacaagccagatgaggaacataaggaagaattataattgtcattatttgtagacaataaaactgcctacctgtaaaacctaagaatcaactgaagacctgttaagagtattctgtaagtcaacccaatgatacacatcatgttcctgtccacatactggttttccccaaatcagctgataaattcagtgtaattccaatgagattgaaactttggaattg

SEQ ID NO: 25164 - protein, 1150 aa, Homo sapiens; identical to SEQ ID NO: 3345

SEQ ID NO: 25165 - DNA, 2320 bp, Homo sapiens
tccaaagacaagagtggagcctacctcttcctgcccgatggcgaggccaagccctacgtccccaaggagccccccgtgctgcgtgtcactgaaggccctttcttctcagaggtggttgcgtactatgagcacattcaccaggcggtccggctttacaatctgccaggtgcagccccgacggtatctgaagaagctccccctccaggccaacttctaccccatgccagtcatggcctatatccaggacgcacagaagcgcctcacgctgcacactgcccaggccctgggtgtctctagcctcaaagatggccagctggaggtgatcttggaccggcggctgatgcaggatgacaaccggggcctaggccaagggctcaaggacaacaagagaacctgcaaccgtttccgcctcctgctagagcggcgaaccgtgggcagtgaggtccaagatagccactctaccagctacccatccctcctcagccacctgacctccatgtacctgaacgccccggcgctcgctctgcctgtagccaggatgcagctcccaggccctggtctgcgctcatttcatcctctggcttcctcactgccctgtgacttccacctgctcaacctacgtacgctccaggctgaggaggacaccctaccctcggcggagaccgcactcatcttacaccgcaagggttttgactgcggcctggaggccaagaacttgggcttcaactgcaccacaagccaaggcaaggtagccctgggcagccttttccatggcctggatgtggtattccttcagccaacctccttgacgttactgtaccctctggcctccccgtccaacagcactgacgtctatttggagcccatggagattgctacctttcgcctccgcttgggttagggcttcttgtggcctgaagagaaagttcattcacagagactgcctcttaacatgaagatcattggacaagccacacgggtatcccatcccgatctgcctcccagaactgtgacacactgggctctgccctcattttctgtttattgctgctgctgtgttttcggcgcaacccacaaacccagtgatgggtaaatagggcagacgccagtgagatcagggagagaaggcccttggtcagagtgggcagtgccaggctctgctttgggttgtgagtggacacccaactgggcacaggctcaggcacccatcctttttccaaacagggatatagaagtggtggaagcagacagaagaggtaagggaggctaagtgggtaacagcccagcatcagggtcactgtggcaacagcaggctctaggggaatcctgtggttatgtagagactccatgtcctggtgtgatgagcaggatcagagtgactctgggaggacaggggtggggacccagagttagcagtggggatggagcagtagaaggaatcactgtttctcctaggagtctgaaggcctcgctgctttctgtgatggctttgcagtaagtgccgcctggcctgcatgcattggctaacaggctgcagaatggcaggaaggactcgctagagattgtcatggccagagatcataggtcacttcaggtagcaagacccctggcaaactgggcacttggcctatgtactgatttgtgggatggtggcaggggtgtggggtccttcaccctgcctgaattctctttggcttctgtgctctgtatgctgctgtccccaagggctctttcttattatggcagggagtggggattggtcctactttctttctctggaaaggaaagcctccaagactccatgtgcttgggcagcttgagaaggcgttcagcaccacgcctagcaggcagaccttgaagcctcacctttagtctatctgcagaggtattcagttcctggcacaggggactaggggcatgtagagtatatgaggaggcagtatggctgtgcaggagccttcatttcagcttcaattaatagggaagaatttatgatagctctatagatgctgaaaaggtatttcgtaagatttaaaatccatcccttattaaaactcttagtaaattaagtctggaaagaaacaccctaatctagataaaggtctgtttcagaaaccaacagtgatggcattctaaagagtcagacgccacaggcattcccattaaagtcagaaactagccaagggcaagctattattcagcagtgtcccggcactactaacccctgcaacaagccagatgaggaacataaggaagaattataattgtcattatttgtagacaataaaactgcctacctgtaaaacctaagaatcaactg

SEQ ID NO: 25166 - protein, 287 aa, Homo sapiens
MARPSPTSPRSPPCCVSLKALSSQRWLRTMSTFTRRSGFTICQVQPRRYLKKLPLQANFYPMPVMAYIQDAQKRLTLHTAQALGVSSLKDGQLEVILDRRLMQDDNRGLGQGLKDNKRTCNRFRLLLERRTVGSEVQDSHSTSYPSLLSHLTSMYLNAPALALPVARMQLPGPGLRSFHPLASSLPCDFHLLNLRTLQAEEDTLPSAETALILHRKGFDCGLEAKNLGFNCTTSQGKVALGSLFHGLDVVFLQPTSLTLLYPLASPSNSTDVYLEPMEIATFRLRLG

SEQ ID NO: 25167 - DNA, 2448 bp, Homo sapiens
tccaaagacaagagtggagcctacctcttcctgcccgatggcgaggccaagccctacgtccccaaggagccccccgtgctgcgtgtcactgaaggccctttcttctcagaggtggttgcgtactatgagcacattcaccaggcggtccggctttacaatctgccaggtgcagccccgacggtatctgaagaagctccccctccaggccaacttctaccccatgccagtcatggcctatatccaggacgcacagaagcgcctcacgctgcacactgcccaggccctgggtgtctctagcctcaaagatggccagctggaggtgatcttggaccggcggctgatgcaggatgacaaccggggcctaggccaagggctcaaggacaacaagagaacctgcaaccgtttccgcctcctgctagagcggcgaaccgtgggcagtgaggtccaagatagccactctaccagctacccatccctcctcagccacctgacctccatgtacctgaacgccccggcgctcgctctgcctgtagccaggatgcagctcccaggccctggtctgcgctcatttcatcctctggcttcctcactgccctgtgacttccacctgctcaacctacgtacgctccaggctgaggaggacaccctaccctcggcggagaccgcactcatcttacaccgcaagggttttgactgcggcctggaggccaagaacttgggcttcaactgcaccacaagccaaggcaaggtagccctgggcagccttttccatggcctggatgtggtattccttcagccaacctccttgacgttactgtaccctctggcctccccgtccaacagcactgacgtctatttggagcccatggagattgctacctttcgcctccgcttgggttagggcttcttgtggcctgaagagaaagttcattcacagagactgcctcttaacatgaagatcattggacaagccacacgggtatcccatcccgatctgcctcccagaactgtgacacactgggctctgccctcattttctgtttattgctgctgctgtgttttcggcgcaacccacaaacccagtgatgggtaaatagggcagacgccagtgagatcagggagagaaggcccttggtcagagtgggcagtgccaggctctgctttgggttgtgagtggacacccaactgggcacaggctcaggcacccatcctttttccaaacagggatatagaagtggtggaagcagacagaagaggtaagggaggctaagtgggtaacagcccagcatcagggtcactgtggcaacagcaggctctaggggaatcctgtggttatgtagagactccatgtcctggtgtgatgagcaggatcagagtgactctgggaggacaggggtggggacccagagttagcagtggggatggagcagtagaaggaatcactgtttctcctaggagtctgaaggcctcgctgctttctgtgatggctttgcagtaagtgccgcctggcctgcatgcattggctaacaggctgcagaatggcaggaaggactcgctagagattgtcatggccagagatcataggtcacttcaggtagcaagacccctggcaaactgggcacttggcctatgtactgatttgtgggatggtggcaggggtgtggggtccttcaccctgcctgaattctctttggcttctgtgctctgtatgctgctgtccccaagggctctttcttattatggcagggagtggggattggtcctactttctttctctggaaaggaaagcctccaagactccatgtgcttgggcagcttgagaaggcgttcagcaccacgcctagcaggcagaccttgaagcctcacctttagtctatctgcagaggtattcagttcctggcacaggggactaggggcatgtagagtatatgaggaggcagtatggctgtgcaggagccttcatttcagcttcaattaatagggaagaatttatgatagctctatagatgctgaaaaggtatttcgtaagatttaaaatccatcccttattaaaactcttagtaaattaagtctggaaagaaacaccctaatctagataaaggtctgtttcagaaaccaacagtgatggcattctaaagagtcagacgccacaggcattcccattaaagtcagaaactagccaagggcaagctattattcagcagtgtcccggcactactaacccctgcaacaagccagatgaggaacataaggaagaattataattgtcattatttgtagacaataaaactgcctacctgtaaaacctaagaatcaactgaagacctgttaagagtattctgtaagtcaacccaatgatacacatcatgttcctgtccacatactggttttccccaaatcagctgataaattcagtgtaattccaatgagattgaaactttggaattg

SEQ ID NO: 25168 - protein, 287 aa, Homo sapiens; identical to SEQ ID NO: 25166

SEQ ID NO: 25169 - DNA, 1686 bp, Homo sapiens
gagaaaattacatactgttttccttccagtgatcattaaaagacagactgacgttctttttttttgtttttttgttttgagacggagtttcactctttcgcccaggctggagtgcagtggtgcaatctccgctcactgcaacctccgccttccgatttgaagcgattctcttgcttcagcctcctgagtagctgggattacaggcgcccgccaccatgcgcagctagtttttctatttttagtagagatggggtttcaccatgttggccaggctggtctggaactcctgaccttgtgatctgcctgcctcggtctcccaaagtgctgggattataggtgtgagccaacacgcccgcctgactttttctccaaactggcagccatgtttaggggcttgatctttcacagcagcaggagcggtaaccgagaggtaagggtcggctctgggagcggggaactagtacgagcaaggtgtagctgcgccagagcccaggtgacagagcccgccactcagtcactcgtgcatcagatagatattgagcacctgctttactgtgaggacccagagggacataagtgcagacagtgctgactctcccaggagtttactcgtgagtaggggtggcagagaagccatgtgtgtaaaaatgcaaggtagaaagggctttgtctcactgatcctgaggagcaaggtaataatgtgggctaaggagatcgaggtcaaggaggtgtcacccaggtgtggctttgatgaatggggtgtgatttgaagatatgaaccagggcacaggataggaggcaggaaagacaacaggctggggaatagcagtgagttccttagttatgctggagctatgctatccagtacggtggccagtagccctatatggctatttaaattacaactaaatcaagtaaaaaatttgctttcttattcctactgaccacacttcaagtactcaagtggctaagtggctgccgtattagaccatgtggtgtcggatatttccatccttgcagaatgccctcttggctggtgctgggctagagtgctagggggagatcagggcagacggcagagcaccttgagtgcctgctaagggatctggactttatcctggctaggaaaggtccaggctaaggaaagagctgagcaaggagggacaccgtcagaactctggtctcagcatgtcacgctgacagtacggagcaggttggatctgtgggaagggagactggaggagggtgacagcgggaggctgttcaggcaggacatgctggctgcttgaactaggccagaggctggagaagttgccggtggctatgaggacactgcccaggtgcgacggaagagggtttagcattacctgggaatgcagagggaagtgagagatgctgggcgcttggaagaagggggatgccagggacagaagtccagaatattcagcccaggcctgtgagtctgacgtccaggtgagctgctaaggagtagccctgctggcagagccccggccgcgctgggcctgagagccaggctggcactgtggatgtggcatcgctcgtgaagccgcagattacccagagcactctggattggaggtccgtgctccatggtgaggcctgcgtctgcctggctgccatcctccctgcactgtggatccatgtgtgaggggagacatggctgat

SEQ ID NO: 25170 - protein, 69 aa, Homo sapiens
MFRGLIFHSSRSGNREVRVGSGSGELVRARCSCARAQVTEPATQSLVHQIDIEHLLYCEDPEGHKCRQC

SEQ ID NO: 25171 - DNA, 730 bp, Homo sapiens
ggcgggccagcactcactgtttgcttccccaggccagctggaggtgatcttggaccggcggctgatgcaggatgacaaccggggcctaggccaagggctcaaggacaacaagagaacctgcaaccgtttccgcctcctgctagagcggcgaaccgtgggcagtgaggtccaagatagccactctaccagctacccatccctcctcagccacctgacctccatgtacctgaacgccccggcgctcgctctgcctgtagccaggatgcagctcccaggccctggtctgcgctcatttcatcctctggcttcctcactgccctgtgacttccacctgctcaacctacgtacgctccaggctgaggtgagtgtccctcagcgtgacatgctgagagcagagttctgatggtgtccctccctgctcagctccttccttagcctccaggatgaggtccagaccccttagcaggtattcggctccaaacctccaggaccaggttttggcctttccttacccacacgcctccctgtgccagcactgcctctgggcagaggcgctgctgcatctccgatctctgaaagccctgcgcccacttccctgggcactgtctgtcatccaggaggacaccctaccctcggcggagaccgcactcatcttacaccgcaagggttttgactgcggcctggaggccaagaacttgggcttcaactgcaccacaagccaaggcaaggt

SEQ ID NO: 25172 - protein, 112 aa, Homo sapiens
MQDDNRGLGQGLKDNKRTCNRFRLLLERRTVGSEVQDSHSTSYPSLLSHLTSMYLNAPALALPVARMQLPGPGLRSFHPLASSLPCDFHLLNLRTLQAEVSVPQRDMLRAEF

SEQ ID NO: 25173 - DNA, 1971 bp, Homo sapiens
gcattctctaagcctgtgctccaaccccgctcatctcatggctttctttgccccaccagcctgactttttctccaaactggcagccatgtttaggggcttgatctttcacagcagcaggagcggtaaccgagagccacctgacctccatgtacctgaacgccccggcgctcgctctgcctgtagccaggatgcagctcccaggccctggtctgcgctcatttcatcctctggcttcctcactgccctgtgacttccacctgctcaacctacgtacgctccaggctgaggaggacaccctaccctcggcggagaccgcactcatcttacaccgcaagggttttgactgcggcctggaggccaagaacttgggcttcaactgcaccacaagccaaggcaaggtagccctgggcagccttttccatggcctggatgtggtattccttcagccaacctccttgacgttactgtaccctctggcctccccgtccaacagcactgacgtctatttggagcccatggagattgctacctttcgcctccgcttgggttagggcttcttgtggcctgaagagaaagttcattcacagagactgcctcttaacatgaagatcattggacaagccacacgggtatcccatcccgatctgcctcccagaactgtgacacactgggctctgccctcattttctgtttattgctgctgctgtgttttcggcgcaacccacaaacccagtgatgggtaaatagggcagacgccagtgagatcagggagagaaggcccttggtcagagtgggcagtgccaggctctgctttgggttgtgagtggacacccaactgggcacaggctcaggcacccatcctttttccaaacagggatatagaagtggtggaagcagacagaagaggtaagggaggctaagtgggtaacagcccagcatcagggtcactgtggcaacagcaggctctaggggaatcctgtggttatgtagagactccatgtcctggtgtgatgagcaggatcagagtgactctgggaggacaggggtggggacccagagttagcagtggggatggagcagtagaaggaatcactgtttctcctaggagtctgaaggcctcgctgctttctgtgatggctttgcagtaagtgccgcctggcctgcatgcattggctaacaggctgcagaatggcaggaaggactcgctagagattgtcatggccagagatcataggtcacttcaggtagcaagacccctggcaaactgggcacttggcctatgtactgatttgtgggatggtggcaggggtgtggggtccttcaccctgcctgaattctctttggcttctgtgctctgtatgctgctgtccccaagggctctttcttattatggcagggagtggggattggtcctactttctttctctggaaaggaaagcctccaagactccatgtgcttgggcagcttgagaaggcgttcagcaccacgcctagcaggcagaccttgaagcctcacctttagtctatctgcagaggtattcagttcctggcacaggggactaggggcatgtagagtatatgaggaggcagtatggctgtgcaggagccttcatttcagcttcaattaatagggaagaatttatgatagctctatagatgctgaaaaggtatttcgtaagatttaaaatccatcccttattaaaactcttagtaaattaagtctggaaagaaacaccctaatctagataaaggtctgtttcagaaaccaacagtgatggcattctaaagagtcagacgccacaggcattcccattaaagtcagaaactagccaagggcaagctattattcagcagtgtcccggcactactaacccctgcaacaagccagatgaggaacataaggaagaattataattgtcattatttgtagacaataaaactgcctacctgtaaaacctaagaatcaactg

SEQ ID NO: 25174 - protein, 134 aa, Homo sapiens [sequence omitted]

SEQ ID NO: 25175 - DNA, 2099 bp, Homo sapiens
gcattctctaagcctgtgctccaaccccgctcatctcatggctttctttgccccaccagcctgactttttctccaaactggcagccatgtttaggggcttgatctttcacagcagcaggagcggtaaccgagagccacctgacctccatgtacctgaacgccccggcgctcgctctgcctgtagccaggatgcagctcccaggccctggtctgcgctcatttcatcctctggcttcctcactgccctgtgacttccacctgctcaacctacgtacgctccaggctgaggaggacaccctaccctcggcggagaccgcactcatcttacaccgcaagggttttgactgcggcctggaggccaagaacttgggcttcaactgcaccacaagccaaggcaaggtagccctgggcagccttttccatggcctggatgtggtattccttcagccaacctccttgacgttactgtaccctctggcctccccgtccaacagcactgacgtctatttggagcccatggagattgctacctttcgcctccgcttgggttagggcttcttgtggcctgaagagaaagttcattcacagagactgcctcttaacatgaagatcattggacaagccacacgggtatcccatcccgatctgcctcccagaactgtgacacactgggctctgccctcattttctgtttattgctgctgctgtgttttcggcgcaacccacaaacccagtgatgggtaaatagggcagacgccagtgagatcagggagagaaggcccttggtcagagtgggcagtgccaggctctgctttgggttgtgagtggacacccaactgggcacaggctcaggcacccatcctttttccaaacagggatatagaagtggtggaagcagacagaagaggtaagggaggctaagtgggtaacagcccagcatcagggtcactgtggcaacagcaggctctaggggaatcctgtggttatgtagagactccatgtcctggtgtgatgagcaggatcagagtgactctgggaggacaggggtggggacccagagttagcagtggggatggagcagtagaaggaatcactgtttctcctaggagtctgaaggcctcgctgctttctgtgatggctttgcagtaagtgccgcctggcctgcatgcattggctaacaggctgcagaatggcaggaaggactcgctagagattgtcatggccagagatcataggtcacttcaggtagcaagacccctggcaaactgggcacttggcctatgtactgatttgtgggatggtggcaggggtgtggggtccttcaccctgcctgaattctctttggcttctgtgctctgtatgctgctgtccccaagggctctttcttattatggcagggagtggggattggtcctactttctttctctggaaaggaaagcctccaagactccatgtgcttgggcagcttgagaaggcgttcagcaccacgcctagcaggcagaccttgaagcctcacctttagtctatctgcagaggtattcagttcctggcacaggggactaggggcatgtagagtatatgaggaggcagtatggctgtgcaggagccttcatttcagcttcaattaatagggaagaatttatgatagctctatagatgctgaaaaggtatttcgtaagatttaaaatccatcccttattaaaactcttagtaaattaagtctggaaagaaacaccctaatctagataaaggtctgtttcagaaaccaacagtgatggcattctaaagagtcagacgccacaggcattcccattaaagtcagaaactagccaagggcaagctattattcagcagtgtcccggcactactaacccctgcaacaagccagatgaggaacataaggaagaattataattgtcattatttgtagacaataaaactgcctacctgtaaaacctaagaatcaactgaagacctgttaagagtattctgtaagtcaacccaatgatacacatcatgttcctgtccacatactggttttccccaaatcagctgataaattcagtgtaattccaatgagattgaaactttggaattg

SEQ ID NO: 25176 - protein, 134 aa, Homo sapiens [sequence omitted]

SEQ ID NO: 25177 - DNA, 1766 bp, Homo sapiens
actgcctctgggcagaggcgctgctgcatctccgatctctgaaagccctgcgcccacttccctgggcactgtctgtcatccaggaggacaccctaccctcggcggagaccgcactcatcttacaccgcaagggttttgactgcggcctggaggccaagaacttgggcttcaactgcaccacaagccaaggcaaggtagccctgggcagccttttccatggcctggatgtggtattccttcagccaacctccttgacgttactgtaccctctggcctccccgtccaacagcactgacgtctatttggagcccatggagattgctacctttcgcctccgcttgggttagggcttcttgtggcctgaagagaaagttcattcacagagactgcctcttaacatgaagatcattggacaagccacacgggtatcccatcccgatctgcctcccagaactgtgacacactgggctctgccctcattttctgtttattgctgctgctgtgttttcggcgcaacccacaaacccagtgatgggtaaatagggcagacgccagtgagatcagggagagaaggcccttggtcagagtgggcagtgccaggctctgctttgggttgtgagtggacacccaactgggcacaggctcaggcacccatcctttttccaaacagggatatagaagtggtggaagcagacagaagaggtaagggaggctaagtgggtaacagcccagcatcagggtcactgtggcaacagcaggctctaggggaatcctgtggttatgtagagactccatgtcctggtgtgatgagcaggatcagagtgactctgggaggacaggggtggggacccagagttagcagtggggatggagcagtagaaggaatcactgtttctcctaggagtctgaaggcctcgctgctttctgtgatggctttgcagtaagtgccgcctggcctgcatgcattggctaacaggctgcagaatggcaggaaggactcgctagagattgtcatggccagagatcataggtcacttcaggtagcaagacccctggcaaactgggcacttggcctatgtactgatttgtgggatggtggcaggggtgtggggtccttcaccctgcctgaattctctttggcttctgtgctctgtatgctgctgtccccaagggctctttcttattatggcagggagtggggattggtcctactttctttctctggaaaggaaagcctccaagactccatgtgcttgggcagcttgagaaggcgttcagcaccacgcctagcaggcagaccttgaagcctcacctttagtctatctgcagaggtattcagttcctggcacaggggactaggggcatgtagagtatatgaggaggcagtatggctgtgcaggagccttcatttcagcttcaattaatagggaagaatttatgatagctctatagatgctgaaaaggtatttcgtaagatttaaaatccatcccttattaaaactcttagtaaattaagtctggaaagaaacaccctaatctagataaaggtctgtttcagaaaccaacagtgatggcattctaaagagtcagacgccacaggcattcccattaaagtcagaaactagccaagggcaagctattattcagcagtgtcccggcactactaacccctgcaacaagccagatgaggaacataaggaagaattataattgtcattatttgtagacaataaaactgcctacctgtaaaacctaagaatcaactg

SEQ ID NO: 25178 - protein, 96 aa, Homo sapiens
MARDHRSLQVARPLANWALGLCTDLWDGGRGVGSFTLPEFSLASVLCMLLSPRALSYYGREWGLVLLSFSGKESLQDSMCLGSLRRRSAPRLAGRP

SEQ ID NO: 25179 - DNA, 1894 bp, Homo sapiens
actgcctctgggcagaggcgctgctgcatctccgatctctgaaagccctgcgcccacttccctgggcactgtctgtcatccaggaggacaccctaccctcggcggagaccgcactcatcttacaccgcaagggttttgactgcggcctggaggccaagaacttgggcttcaactgcaccacaagccaaggcaaggtagccctgggcagccttttccatggcctggatgtggtattccttcagccaacctccttgacgttactgtaccctctggcctccccgtccaacagcactgacgtctatttggagcccatggagattgctacctttcgcctccgcttgggttagggcttcttgtggcctgaagagaaagttcattcacagagactgcctcttaacatgaagatcattggacaagccacacgggtatcccatcccgatctgcctcccagaactgtgacacactgggctctgccctcattttctgtttattgctgctgctgtgttttcggcgcaacccacaaacccagtgatgggtaaatagggcagacgccagtgagatcagggagagaaggcccttggtcagagtgggcagtgccaggctctgctttgggttgtgagtggacacccaactgggcacaggctcaggcacccatcctttttccaaacagggatatagaagtggtggaagcagacagaagaggtaagggaggctaagtgggtaacagcccagcatcagggtcactgtggcaacagcaggctctaggggaatcctgtggttatgtagagactccatgtcctggtgtgatgagcaggatcagagtgactctgggaggacaggggtggggacccagagttagcagtggggatggagcagtagaaggaatcactgtttctcctaggagtctgaaggcctcgctgctttctgtgatggctttgcagtaagtgccgcctggcctgcatgcattggctaacaggctgcagaatggcaggaaggactcgctagagattgtcatggccagagatcataggtcacttcaggtagcaagacccctggcaaactgggcacttggcctatgtactgatttgtgggatggtggcaggggtgtggggtccttcaccctgcctgaattctctttggcttctgtgctctgtatgctgctgtccccaagggctctttcttattatggcagggagtggggattggtcctactttctttctctggaaaggaaagcctccaagactccatgtgcttgggcagcttgagaaggcgttcagcaccacgcctagcaggcagaccttgaagcctcacctttagtctatctgcagaggtattcagttcctggcacaggggactaggggcatgtagagtatatgaggaggcagtatggctgtgcaggagccttcatttcagcttcaattaatagggaagaatttatgatagctctatagatgctgaaaaggtatttcgtaagatttaaaatccatcccttattaaaactcttagtaaattaagtctggaaagaaacaccctaatctagataaaggtctgtttcagaaaccaacagtgatggcattctaaagagtcagacgccacaggcattcccattaaagtcagaaactagccaagggcaagctattattcagcagtgtcccggcactactaacccctgcaacaagccagatgaggaacataaggaagaattataattgtcattatttgtagacaataaaactgcctacctgtaaaacctaagaatcaactgaagacctgttaagagtattctgtaagtcaacccaatgatacacatcatgttcctgtccacatactggttttccccaaatcagctgataaattcagtgtaattccaatgagattgaaactttggaattg

SEQ ID NO: 25180 - protein, 96 aa, Homo sapiens; identical to SEQ ID NO: 25178

SEQ ID NO: 25181 - DNA, 4001 bp, Homo sapiens
acttaacaaccgaagtaacccgcaatgcggaagggcgaggggattgcgagtcaccgagtttcccgcgcggcttgagtcacggcctagaaagagagatgttggggttcccaggaccaggacagaggtggtagtgaactctcatgggcatccagagaaggtcaggccccttgctgacaggcctatctgtggggctactgctgctcttcagctgggtgacccttgtccagccaacctctctctcagctctggtccaccaccctcacttgtgccagaccacccgggatgtccatggccgtcactaccctggtttcttttgccctcgtctgtctgattctccagaggaagcctactgctgccacctgcaggctgcagggggctcctgctgcacccgggctgaatttgaggccctgtaccaagtcaatctgtccgctcttccgcccccgcccatcctcaggggcccaggcccgctcctagtgctgggcctctacaacctactggttgtgaccctgatgaccgtagacctcgtgcacttctgctgcggtcggggccggagtctgggctggagccaccgcaggcctccctctgggtcctccgccgcgagctccctgcaggtctctgcggggacagcttaggtgcgcccggagcttgcctgcacctgcgatccagagccaagcgccccgcccctgcccgggcgcgctccctccttagccctgcccctctctgaccccacctccgacgcaagagtggggcggggcagctgccggtggcgtcccgaacccagactcgccccgccccagagactgcgcctgcgcgggcacgagacaacctctccgcgatgactgccagctcagtggagcagctgcggaaggagggcaatgagctgttcaaatgtggagactacgggggcgccctggcggcctacactcaggccctgggtctggacgcgacgccccaggaccaggccgttctgcaccggaaccgggccgcctgccacctcaagctggaagattacgacaaagcagaaacagaggcatccaaagccattgaaaaggatggtggggatgtcaaagcactctaccggcggagccaagccctagagaagctgggccgcctggaccaggctgtccttgacctgcagagatgtgtgagcttggagcccaagaacaaagttttccaggaggccttgcggaacatcgggggccagattcaggagaaggtgcgatacatgtcctcgacggatgccaaagtggaacagatgtttcagatactgttggacccagaagagaagggcactgagaaaaagcaaaaggcttctcagaacctggtggtgctggccagggaggatgctggagcggagaagatcttccggagtaatggggttcagctcttgcaacgtttactggacatgggagagactgacctcatgctggcggctctgcgtacgctggttggcatttgctctgagcatcagtcacggacagtggcaaccctgagcatactgggaactcggcgagtagtctccatcctgggcgtggaaagccaggctgtgtccctggctgcctgccacctgctgcaggttatgtttgatgccctcaaggaaggtgtcaaaaaaggcttccgaggcaaagaaggtgccatcattgtggatcctgcccgggagctgaaggtcctcatcagtaacctcttagatctgctgacagaggtgggggtctctggccaaggccgagacaatgccctgaccctcctgattaaagcggtgccccggaagtctctcaaggaccccaacaacagcctcaccctctgggtcatcgaccaaggtctgaaaaagattttggaagtggggggctctctacaggaccctcctggggagctcgcagtgaccgcaaacagccgcatgagcgcctctattctcctcagcaagctctttgatgacctcaagtgtgatgcggagagggagaatttccacagactttgtgaaaactacatcaagagctggtttgagggccaagggctggccgggaagctacgggccatccagacggtgtcctgcctcctgcagggcccatgtgacgctggcaaccgggccttggagctgagcggtgtcatggagagtgtgattgctctgtgtgcctctgagcaggaggaggagcagctggtggccgtggaggctctgatccatgcagccggcaaggctaagcgggcctcattcatcactgccaatggtgtctcgctgctgaaggacctatataagtgcagcgagaaggacagcatccgcatccgggcgctagtgggactctgtaagctcggttcggctggagggactgacttcagcatgaagcagtttgctgaaggctccactctcaaactggctaagcagtgtcgaaagtggctgtgcaatgaccagatcgacgcaggcactcggcgctgggcagtggagggcctggcttacctgacctttgatgccgacgtgaaggaagagtttgtggaggatgcggctgctctgaaagctctgttccagctcagcaggttggaggagaggtcagtgctctttgcggtggcctcagcgctggtgaactgcaccaacagctatgactacgaggagcccgaccccaagatggtggagctggccaagtatgccaagcagcatgtgcccgagcagcaccccaaggacaagccaagcttcgtgcgggctcgggtgaagaagctgctggcagcgggtgtggtgtcggccatggtgtgcatggtgaagacggagagccctgtgctgaccagttcctgcagagagctgctctccagggtcttcttggctttagtggaagaggtagaggaccgaggcactgtggttgcccagggaggcggcagggcgctgatcccgctggccctggaaggcacggacgtggggcagacaaaggcagcccaggcccttgccaagctcaccatcacctccaacccggagatgaccttccctggcgagcggatctatgaggtggtccggcccctcgtctccctgttgcacctcaactgctcaggcctgcagaacttcgaggcgctcatggccctaacaaacctggctgggatcagcgagaggctccggcagaagatcctgaaggagaaggctgtgcccatgatagaaggctacatgtttgaggagcatgagatgatccgccgggcagccacggagtgcatgtgtaacttggccatgagcaaggaggtgcaggacctcttcgaagcccagggcaatgaccgactgaagctgctggtgctgtacagtggagaggatgatgagctgctacagcgggcagctgccgggggcttggccatgcttacctccatgcggcccacgctctgcagccgcattccccaagtgaccacacactggctggagatcctgcaggccctgcttctgagctccaaccaggagctgcagcaccggggtgctgtggtggtgctgaacatggtggaggcctcgagggagattgccagcaccctgatggagagtgagatgatggagatcttgtcagtgctagctaagggtgaccacagccctgtcacaagggctgctgcagcctgcctggacaaagcagtggaatatgggcttatccaacccaaccaagatggagagtgagggggttgtccctgggcccaaggctcatgcacacgctacctattgtggcacggagagtaaggacggaagcagctttggctggtggtggctggcatgcccaatactcttgcccatcctcgcttgctgccctaggatgtcctctgttctgagtcagcggccacgttcagtcacacagccctgcttggccagcactgcctgcagcctcactcagaggggccctttttctgtactactgtagtcagctgggaatggggaaggtgcatcccaacacagcctgtggatcctggggcatctggaagggcgcacacatcagcagcctcaccagctgtgagcctgctatcaggcctgcccctccaataaaagtgtgtagaactcc

SEQ ID NO: 25182 - protein, 929 aa, Homo sapiens; identical to SEQ ID NO: 3349

SEQ ID NO: 25183 - DNA, 4065 bp, Homo sapiens
acttaacaaccgaagtaacccgcaatgcggaagggcgaggggattgcgagtcaccgagtttcccgcgcggcttgagtcacggcctagaaagagagatgttggggttcccaggaccaggacagaggtggtagtgaactctcatgggcatccagagaaggtcaggccccttgctgacaggcctatctgtggggctactgctgctcttcagctgggtgacccttgtccagccaacctctctctcagctctggtccaccaccctcacttgtgccagaccacccgggatgtccatggccgtcactaccctggtttcttttgccctcgtctgtctgattctccagaggaagcctactgctgccacctgcaggctgcagggggctcctgctgcacccgggctgaatttgaggccctgtaccaagtcaatctgtccgctcttccgcccccgcccatcctcaggggcccaggcccgctcctagtgctgggcctctacaacctactggttgtgaccctgatgaccgtagacctcgtgcacttctgctgcggtcggggccggagtctgggctggagccaccgcaggcctccctctgggtcctccgccgcgagctccctgcaggtctctgcggggacagcttaggtgcgcccggagcttgcctgcacctgcgatccagagccaagcgccccgcccctgcccgggcgcgctccctccttagccctgcccctctctgaccccacctccgacgcaagagtggggcggggcagctgccggtggcgtcccgaacccagactcgccccgccccagagactgcgcctgcgcgggcacgagacaacctctccgcgatgactgccagctcagtggagcagctgcggaaggagggcaatgagctgttcaaatgtggagactacgggggcgccctggcggcctacactcaggccctgggtctggacgcgacgccccaggaccaggccgttctgcaccggaaccgggccgcctgccacctcaagctggaagattacgacaaagcagaaacagaggcatccaaagccattgaaaaggatggtggggatgtcaaagcactctaccggcggagccaagccctagagaagctgggccgcctggaccaggctgtccttgacctgcagagatgtgtgagcttggagcccaagaacaaagttttccaggaggccttgcggaacatcgggggccagattcaggagaaggtgcgatacatgtcctcgacggatgccaaagtggaacagatgtttcagatactgttggacccagaagagaagggcactgagaaaaagcaaaaggcttctcagaacctggtggtgctggccagggaggatgctggagcggagaagatcttccggagtaatggggttcagctcttgcaacgtttactggacatgggagagactgacctcatgctggcggctctgcgtacgctggttggcatttgctctgagcatcagtcacggacagtggcaaccctgagcatactgggaactcggcgagtagtctccatcctgggcgtggaaagccaggctgtgtccctggctgcctgccacctgctgcaggttatgtttgatgccctcaaggaaggtgtcaaaaaaggcttccgaggcaaagaaggtgccatcattgtggatcctgcccgggagctgaaggtcctcatcagtaacctcttagatctgctgacagaggtgggggtctctggccaaggccgagacaatgccctgaccctcctgattaaagcggtgccccggaagtctctcaaggaccccaacaacagcctcaccctctgggtcatcgaccaaggtctgaaaaagattttggaagtggggggctctctacaggaccctcctggggagctcgcagtgaccgcaaacagccgcatgagcgcctctattctcctcagcaagctctttgatgacctcaagtgtgatgcggagagggagaatttccacagactttgtgaaaactacatcaagagctggtttgagggccaagggctggccgggaagctacgggccatccagacggtgtcctgcctcctgcagggcccatgtgacgctggcaaccgggccttggagctgagcggtgtcatggagagtgtgattgctctgtgtgcctctgagcaggaggaggagcagctggtggccgtggaggctctgatccatgcagccggcaaggctaagcgggcctcattcatcactgccaatggtgtctcgctgctgaaggacctatataagtgcagcgagaaggacagcatccgcatccgggcgctagtgggactctgtaagctcggttcggctggagggactgacttcagcatgaagcagtttgctgaaggctccactctcaaactggctaagcagtgtcgaaagtggctgtgcaatgaccagatcgacgcaggcactcggcgctgggcagtggagggcctggcttacctgacctttgatgccgacgtgaaggaagagtttgtggaggatgcggctgctctgaaagctctgttccagctcagcaggttggaggagaggtcagtgctctttgcggtggcctcagcgctggtgaactgcaccaacagctatgactacgaggagcccgaccccaagatggtggagctggccaagtatgccaagcagcatgtgcccgagcagcaccccaaggacaagccaagcttcgtgcgggctcgggtgaagaagctgctggcagcgggtgtggtgtcggccatggtgtgcatggtgaagacggagagccctgtgctgaccagttcctgcagagagctgctctccagggtcttcttggctttagtggaagaggtagaggaccgaggcactgtggttgcccagggaggcggcagggcgctgatcccgctggccctggaaggcacggacgtggggcagacaaaggcagcccaggcccttgccaagctcaccatcacctccaacccggagatgaccttccctggcgagcggatctatgaggtggtccggcccctcgtctccctgttgcacctcaactgctcaggcctgcagaacttcgaggcgctcatggccctaacaaacctggctgggatcagcgagaggctccggcagaagatcctgaaggagaaggctgtgcccatgatagaaggctacatgtttgaggagcatgagatgatccgccgggcagccacggagtgcatgtgtaacttggccatgagcaaggaggtgcaggacctcttcgaagcccagggcaatgaccgactgaagctgctggtgctgtacagtggagaggatgatgagctgctacagcgggcagctgccgggggcttggccatgcttacctccatgcggcccacgctctgcagccgcattccccaagtgaccacacactggctggagatcctgcaggccctgcttctgagctccaaccaggagctgcagcaccggggtgctgtggtggtgctgaacatggtggaggcctcgagggagattgccagcaccctgatggagagtgagatgatggagatcttgtcagtgctagctaagggtgaccacagccctgtcacaagggctgctgcagcctgcctggacaaagcagtggaatatgggcttatccaacccaaccaagatggagagtgagggggttgtccctgggcccaaggctcatgcacacgctacctattgtggcacggagagtaaggacggaagcagctttggctggtggtggctggcatgcccaatactcttgcccatcctcgcttgctgccctaggatgtcctctgttctgagtcagcggccacgttcagtcacacagccctgcttggccagcactgcctgcagcctcactcagaggggccctttttctgtactactgtagtcagctgggaatggggaaggtgcatcccaacacagcctgtggatcctggggcatctggaagggcgcacacatcagcagcctcaccagctgtgagcctgctatcaggcctgcccctccaataaaagtgtgtagaactccactgtgtgccctgtccttgggcagggagggctgctgtgagtgggagtctctgagtgggtgagtg

SEQ ID NO: 25184 - protein, 929 aa, Homo sapiens; identical to SEQ ID NO: 3349

SEQ ID NO: 25185 - DNA, 901 bp, Homo sapiens
gaggggattgcgagtcaccgagtttcccgcgcggcttgagaacgtgttaggaactagtacttaaataatctcaagtccctgaggggccagagatcccaccatgcaaaatagcaaacagacccaagacttggggagaggcggtgagtgcatcagaaatggatgggtacatctgattcccaccacgcggggctcagcttagttagcaggagaccttcagactgagaaaaaatgcaagtctttttttggcctctaatatctgggaaggatggagggagctcaggagacacagaaaagatggcgtatgaatcctgtccggcctgaacgaggctggagttgtgcctctggatagcttcaagcactgatcagattgtcagcccccgctgcttgaacagatgctttagagcctcttccagttgccggtttgttccctgaagccccttcaccacctgcgctgcccactcgaagtattcctggactcgatgttctgaccatcctgcataagagtcgacagaaacttgctagcgtgatgtcaaggaaagcactgccttttccccacttcctggcaagcttggttcaaggccatgagttcctgatggaatgagctgtcctgaaaacttccccttggcccagctattgtatttttactgtatgaaagaagatcaaagagtggtccagtaggattaatttgggaattaagaatgcccagggtttttcaggggaactgaccaacatgtgtcttcagaaggcggcatccccctcccttttcccttacagcccatacgaaagcgtaccctctggggtgcagcgattcaggtccctcagattgtacagcttgtctgccagcttcaccagtttggccccggggctactgtggggcgcttgctccacctgcagcctcttt

SEQ ID NO: 25186 - protein, 56 aa, Homo sapiens
MCLQKAASPSLFPYSPYESVPSGVQRFRSLRLYSLSASFTSLAPGLLWGACSTCSL

SEQ ID NO: 25187 - DNA, 1245 bp, Homo sapiens
agcggcggaaggaccccgaggggaccccctacatcaaccaccccatcggtgggcgcgtcggccgcggagcgccggctgcggcacctgggtggtgtggcacggatcctgacccacgaggcgggaatcactgacattgtggtgttacaggcggccctgctccatgacacggtggaggacacagacaccaccctggatgaggtggagctacactttggggcacaagtgcggcgcctggtggaggaggtaacagatgacaagactctgcccaagctggagagaaagaggctgcaggtggagcaagcgccccacagtagccccggggccaaactggtgaagctggcagacaagctgtacaatctgagggacctgaatcgctgcaccccagagggatggtcagaacatcgagtccaggaatacttcgagtgggcagcgcaggtggtgaaggggcttcagggaacaaaccggcaactggaagaggctctaaagcatctgttcaagcagcgggggctgacaatctgatcagtgcttgaagctatccagaggcacaactccagcctcgttcaggccggacaggattcatacgccatcttttctgtgtctcctgagctccctccatccttcccagatattagaggccaaaaaaagacttgcattttttctcagtctgaaggtctcctgctaactaagctgagccccgcgtggtgggaatcagatgtacccatccatttctgatgcactcaccgcctctccccaagtcttgggtctgtttgctattttgcatggtgggatctctggcccctcagggacttgagattatttaagtactagttcctaacacgttctggaaaataaaaataactctgggttaaggtttaagctgctgctgctccttctccagcctccgactggtgggctgcatatctttccttcagcaaagcaggactaattgtgtgtcccggagtcacctccctcaggttgcgggcctcaacccctccgaacctggcttccttgtcagtgacatgggttgtgtaattatcaggttagactgtgacgtgcctgatggagcctgacacataggtgctcaagaaatggtagcagcctttcccgttaagaaagttggaagggggccaggcgcggtgtctctcgcctgtaatcccagcactctgggagaccgaggcgggcggatcacttgaggtcaggagttcaagaccagcctggccagcatggcgaggccccgtctctact

SEQ ID NO: 25188 - protein, 46 aa, Homo sapiens
MVRTSSPGILRVGSAGGEGASGNKPATGRGSKASVQAAGADNLISA

SEQ ID NO: 25189 - DNA, 1678 bp, Homo sapiens
cgcagctgctggaggctgccgacttcgcggctcgcaagcaccggcagcagcggcggaaggaccccgaggggaccccctacatcaaccaccccatcggtgggcgcgtcggccgcggagcgccggctgcggcacctgggtggtggggactgggaaggaaacgtggggggcgtgcacctcattgagcacctgttttgtcccaagcttagtgcgatataccgtttaagcctcataacaattggaacggtaggcatgatcgttccctttgtcggttggctcccagagggtaaggtacttgaccaaggtcacccagctagtcagagtccacaaggggccacatctggctctccaaaacccacaacacaccgccttgggactacctccgacctgacttcctgctttgcccctccccgtcaggtgtggcacggatcctgacccacgaggcgggaatcactgacattgtggtgttacaggtaactttcccccttctctgccaggagcctgggatggggattaggggccccattcagcaatgggcaacccttggctgacatctcagggctgagtgggaacttgtccccaggcggccctgctccatgacacggtggaggacacagacaccaccctggatgaggtggagctacactttggggcacaagtgcggcgcctggtggaggaggtaacagatgacaagactctgcccaagctggagagaaagaggctgcaggtggagcaagcgccccacagtagccccggggccaaactggtgaagctggcagacaagctgtacaatctgagggacctgaatcgctgcaccccagagggatggtcagaacatcgagtccaggaatacttcgagtgggcagcgcaggtggtgaaggggcttcagggaacaaaccggcaactggaagaggctctaaagcatctgttcaagcagcgggggctgacaatctgatcagtgcttgaagctatccagaggcacaactccagcctcgttcaggccggacaggattcatacgccatcttttctgtgtctcctgagctccctccatccttcccagatattagaggccaaaaaaagacttgcattttttctcagtctgaaggtctcctgctaactaagctgagccccgcgtggtgggaatcagatgtacccatccatttctgatgcactcaccgcctctccccaagtcttgggtctgtttgctattttgcatggtgggatctctggcccctcagggacttgagattatttaagtactagttcctaacacgttctggaaaataaaaataactctgggttaaggtttaagctgctgctgctccttctccagcctccgactggtgggctgcatatctttccttcagcaaagcaggactaattgtgtgtcccggagtcacctccctcaggttgcgggcctcaacccctccgaacctggcttccttgtcagtgacatgggttgtgtaattatcaggttagactgtgacgtgcctgatggagcctgacacataggtgctcaagaaatggtagcagcctttcccgttaagaaagttggaagggggccaggcgcggtgtctctcgcctgtaatcccagcactctgggagaccgaggcgggcggatcacttgaggtcaggagttcaagaccagcctggccagcatggcgaggccccgtctctact

SEQ ID NO: 25190 - protein, 60 aa, Homo sapiens
MIVPFVGWLPEGKVLDQGHPASQSPQGATSGSPKPTTHRLGTTSDLTSCFAPPRQVWHGS

SEQ ID NO: 25191 - DNA, 1444 bp, Homo sapiens
gaggcggcgcagctgctggaggctgccgacttcgcggctcgcaagcaccggcagcagcggcggaaggaccccgaggggaccccctacatcaaccaccccatcggtgggcgcgtcggccgcggagcgccggctgcggcacctgggtggtggggactgggaaggaaacgtggggggcgtgcacctcattgagcacctgttttgtcccaagcttagtgcgatataccgtttaagcctcataacaattggaacggtaggcatgatcgttccctttgtcggttggctcccagagggtgtggcacggatcctgacccacgaggcgggaatcactgacattgtggtgttacaggcggccctgctccatgacacggtggaggacacagacaccaccctggatgaggtggagctacactttggggcacaagtgcggcgcctggtggaggaggtaacagatgacaagactctgcccaagctggagagaaagaggctgcaggtggagcaagcgccccacagtagccccggggccaaactggtgaagctggcagacaagctgtacaatctgagggacctgaatcgctgcaccccagagggatggtcagaacatcgagtccaggaatacttcgagtgggcagcgcaggtggtgaaggggcttcagggaacaaaccggcaactggaagaggctctaaagcatctgttcaagcagcgggggctgacaatctgatcagtgcttgaagctatccagaggcacaactccagcctcgttcaggccggacaggattcatacgccatcttttctgtgtctcctgagctccctccatccttcccagatattagaggccaaaaaaagacttgcattttttctcagtctgaaggtctcctgctaactaagctgagccccgcgtggtgggaatcagatgtacccatccatttctgatgcactcaccgcctctccccaagtcttgggtctgtttgctattttgcatggtgggatctctggcccctcagggacttgagattatttaagtactagttcctaacacgttctggaaaataaaaataactctgggttaaggtttaagctgctgctgctccttctccagcctccgactggtgggctgcatatctttccttcagcaaagcaggactaattgtgtgtcccggagtcacctccctcaggttgcgggcctcaacccctccgaacctggcttccttgtcagtgacatgggttgtgtaattatcaggttagactgtgacgtgcctgatggagcctgacacataggtgctcaagaaatggtagcagcctttcccgttaagaaagttggaagggggccaggcgcggtgtctctcgcctgtaatcccagcactctgggagaccgaggcgggcggatcacttgaggtcaggagttcaagaccagcctggccagcatggcgaggccccgtctctact

SEQ ID NO: 25192 - protein, 153 aa, Homo sapiens
MIVPFVGWLPEGVARILTHEAGITDIVVLQAALLHDTVEDTDTTLDEVELHFGAQVRRLVEEVTDDKTLPKLERKRLQVEQAPHSSPGAKLVKLADKLYNLRDLNRCTPEGWSEHRVQEYFEWAAQVVKGLQGTNRQLEEALKHLFKQRGLTI

SEQ ID NO: 25193 - DNA, 1589 bp, Homo sapiens
gcgcgatgggctctgaggcggcgcagctgctggaggctgccgacttcgcggctcgcaagcaccggcagcagcggcggaaggaccccgaggggaccccctacatcaaccaccccatcggtgggcgcgtcggccgcggagcgccggctgcggcacctgggtggtggggactgggaaggaaacgtggggggcgtgcacctcattgagcacctgttttgtcccaagcttagtgcgatataccgtttaagcctcataacaattggaacggtaggcatgatcgttccctttgtcggttggctcccagagggtaaggtacttgaccaaggtcacccagctagtcagagtccacaaggggccacatctggctctccaaaacccacaacacaccgccttgggactacctccgacctgacttcctgctttgcccctccccgtcaggtgtggcacggatcctgacccacgaggcgggaatcactgacattgtggtgttacaggcggccctgctccatgacacggtggaggacacagacaccaccctggatgaggtggagctacactttggggcacaagtgcggcgcctggtggaggaggtaacagatgacaagactctgcccaagctggagagaaagaggctgcaggtggagcaagcgccccacagtagccccggggccaaactggtgaagctggcagacaagctgtacaatctgagggacctgaatcgctgcaccccagagggatggtcagaacatcgagtccaggaatacttcgagtgggcagcgcaggtggtgaaggggcttcagggaacaaaccggcaactggaagaggctctaaagcatctgttcaagcagcgggggctgacaatctgatcagtgcttgaagctatccagaggcacaactccagcctcgttcaggccggacaggattcatacgccatcttttctgtgtctcctgagctccctccatccttcccagatattagaggccaaaaaaagacttgcattttttctcagtctgaaggtctcctgctaactaagctgagccccgcgtggtgggaatcagatgtacccatccatttctgatgcactcaccgcctctccccaagtcttgggtctgtttgctattttgcatggtgggatctctggcccctcagggacttgagattatttaagtactagttcctaacacgttctggaaaataaaaataactctgggttaaggtttaagctgctgctgctccttctccagcctccgactggtgggctgcatatctttccttcagcaaagcaggactaattgtgtgtcccggagtcacctccctcaggttgcgggcctcaacccctccgaacctggcttccttgtcagtgacatgggttgtgtaattatcaggttagactgtgacgtgcctgatggagcctgacacataggtgctcaagaaatggtagcagcctttcccgttaagaaagttggaagggggccaggcgcggtgtctctcgcctgtaatcccagcactctgggagaccgaggcgggcggatcacttgaggtcaggagttcaagaccagcctggccagcatggcgaggccccgtctctact

SEQ ID NO: 25194 - protein, 65 aa, Homo sapiens
MGSEAAQLLEAADFAARKHRQQRRKDPEGTPYINHPIGGRVGRGAPAAAPGWWGLGRKRGGRAPH

SEQ ID NO: 25195 - DNA, 1593 bp, Homo sapiens
cggccgcagtcgtcggccccatccgcgcgatgggctctgaggcggcgcagctgctggaggctgccgacttcgcggctcgcaagcaccggcagcagcggcggaaggaccccgaggggaccccctacatcaaccaccccatcggtgtggcacggatcctgacccacgaggcgggaatcactgacattgtggtgttacaggcggccctgctccatgacacggtggaggacacagacaccaccctggatgaggtggagctacactttggggcacaagtgcggcgcctggtggaggaggtaacagatgacaagactctgcccaagctggagagaaagaggctgcaggtggagcaagcgccccacagtagccccggggccaaactggtgaagctggcagacaagctgtacaatctgagggacctgaatcgctgcaccccagagggtacgctttcgtatgggctgtaagggaaaagggagggggatgccgccttctgaagacacatgttggtcagttcccctgaaaaaccctgggcattcttaattcccaaattaatcctactggaccactctttgatcttctttcatacagtaaaaatacaatagctgggccaaggggaagttttcaggacagctcattccatcaggaactcatggccttgaaccaagcttgccaggaagtggggaaaaggcagtgctttccttgacatcacgctagcaagtttctgtcgactcttatgcaggatggtcagaacatcgagtccaggaatacttcgagtgggcagcgcaggtggtgaaggggcttcagggaacaaaccggcaactggaagaggctctaaagcatctgttcaagcagcgggggctgacaatctgatcagtgcttgaagctatccagaggcacaactccagcctcgttcaggccggacaggattcatacgccatcttttctgtgtctcctgagctccctccatccttcccagatattagaggccaaaaaaagacttgcattttttctcagtctgaaggtctcctgctaactaagctgagccccgcgtggtgggaatcagatgtacccatccatttctgatgcactcaccgcctctccccaagtcttgggtctgtttgctattttgcatggtgggatctctggcccctcagggacttgagattatttaagtactagttcctaacacgttctggaaaataaaaataactctgggttaaggtttaagctgctgctgctccttctccagcctccgactggtgggctgcatatctttccttcagcaaagcaggactaattgtgtgtcccggagtcacctccctcaggttgcgggcctcaacccctccgaacctggcttccttgtcagtgacatgggttgtgtaattatcaggttagactgtgacgtgcctgatggagcctgacacataggtgctcaagaaatggtagcagcctttcccgttaagaaagttggaagggggccaggcgcggtgtctctcgcctgtaatcccagcactctgggagaccgaggcgggcggatcacttgaggtcaggagttcaagaccagcctggccagcatggcgaggccccgtctctact

SEQ ID NO: 25196 - protein, 143 aa, Homo sapiens
MGSEAAQLLEAADFAARKHRQQRRKDPEGTPYINHPIGVARILTHEAGITDIVVLQAALLHDTVEDTDTTLDEVELHFGAQVRRLVEEVTDDKTLPKLERKRLQVEQAPHSSPGAKLVKLADKLYNLRDLNRCTPEGTLSYGL

SEQ ID NO: 25197 - DNA, 1295 bp, Homo sapiens
cggccgcagtcgtcggccccatccgcgcgatgggctctgaggcggcgcagctgctggaggctgccgacttcgcggctcgcaagcaccggcagcagcggcggaaggaccccgaggggaccccctacatcaaccaccccatcggtgtggcacggatcctgacccacgaggcgggaatcactgacattgtggtgttacaggcggccctgctccatgacacggtggaggacacagacaccaccctggatgaggtggagctacactttggggcacaagtgcggcgcctggtggaggaggtaacagatgacaagactctgcccaagctggagagaaagaggctgcaggtggagcaagcgccccacagtagccccggggccaaactggtgaagctggcagacaagctgtacaatctgagggacctgaatcgctgcaccccagagggatggtcagaacatcgagtccaggaatacttcgagtgggcagcgcaggtggtgaaggggcttcagggaacaaaccggcaactggaagaggctctaaagcatctgttcaagcagcgggggctgacaatctgatcagtgcttgaagctatccagaggcacaactccagcctcgttcaggccggacaggattcatacgccatcttttctgtgtctcctgagctccctccatccttcccagatattagaggccaaaaaaagacttgcattttttctcagtctgaaggtctcctgctaactaagctgagccccgcgtggtgggaatcagatgtacccatccatttctgatgcactcaccgcctctccccaagtcttgggtctgtttgctattttgcatggtgggatctctggcccctcagggacttgagattatttaagtactagttcctaacacgttctggaaaataaaaataactctgggttaaggtttaagctgctgctgctccttctccagcctccgactggtgggctgcatatctttccttcagcaaagcaggactaattgtgtgtcccggagtcacctccctcaggttgcgggcctcaacccctccgaacctggcttccttgtcagtgacatgggttgtgtaattatcaggttagactgtgacgtgcctgatggagcctgacacataggtgctcaagaaatggtagcagcctttcccgttaagaaagttggaagggggccaggcgcggtgtctctcgcctgtaatcccagcactctgggagaccgaggcgggcggatcacttgaggtcaggagttcaagaccagcctggccagcatggcgaggccccgtctctact

SEQ ID NO: 25198 - protein, 179 aa, Homo sapiens
MGSEAAQLLEAADFAARKHRQQRRKDPEGTPYINHPIGVARILTHEAGITDIVVLQAALLHDTVEDTDTTLDEVELHFGAQVRRLVEEVTDDKTLPKLERKRLQVEQAPHSSPGAKLVKLADKLYNLRDLNRCTPEGWSEHRVQEYFEWAAQVVKGLQGTNRQLEEALKHLFKQRGLTI

SEQ ID NO: 25199 - DNA, 1446 bp, Homo sapiens
cggccgcagtcgtcggccccatccgcgcgatgggctctgaggcggcgcagctgctggaggctgccgacttcgcggctcgcaagcaccggcagcagcggcggaaggaccccgaggggaccccctacatcaaccaccccatcggtgtggcacggatcctgacccacgaggcgggaatcactgacattgtggtgttacaggcggccctgctccatgacacggtggaggacacagacaccaccctggatgaggtggagctacactttggggcacaagtgcggcgcctggtggaggaggtaacagatgacaagactctgcccaagctggagagaaagaggctgcaggtggagcaagcgccccacagtagccccggggccaaactggtgaagctggcagacaagctgtacaatctgagggacctgaatcgctgcaccccagaggtaaaaatacaatagctgggccaaggggaagttttcaggacagctcattccatcaggaactcatggccttgaaccaagcttgccaggaagtggggaaaaggcagtgctttccttgacatcacgctagcaagtttctgtcgactcttatgcaggatggtcagaacatcgagtccaggaatacttcgagtgggcagcgcaggtggtgaaggggcttcagggaacaaaccggcaactggaagaggctctaaagcatctgttcaagcagcgggggctgacaatctgatcagtgcttgaagctatccagaggcacaactccagcctcgttcaggccggacaggattcatacgccatcttttctgtgtctcctgagctccctccatccttcccagatattagaggccaaaaaaagacttgcattttttctcagtctgaaggtctcctgctaactaagctgagccccgcgtggtgggaatcagatgtacccatccatttctgatgcactcaccgcctctccccaagtcttgggtctgtttgctattttgcatggtgggatctctggcccctcagggacttgagattatttaagtactagttcctaacacgttctggaaaataaaaataactctgggttaaggtttaagctgctgctgctccttctccagcctccgactggtgggctgcatatctttccttcagcaaagcaggactaattgtgtgtcccggagtcacctccctcaggttgcgggcctcaacccctccgaacctggcttccttgtcagtgacatgggttgtgtaattatcaggttagactgtgacgtgcctgatggagcctgacacataggtgctcaagaaatggtagcagcctttcccgttaagaaagttggaagggggccaggcgcggtgtctctcgcctgtaatcccagcactctgggagaccgaggcgggcggatcacttgaggtcaggagttcaagaccagcctggccagcatggcgaggccccgtctctact

SEQ ID NO: 25200 - protein, 140 aa, Homo sapiens; identical to SEQ ID NO: 3347

SEQ ID NO: 25201 - DNA, 874 bp, Homo sapiens
agcggcggaaggaccccgaggggaccccctacatcaaccaccccatcggtgggcgcgtcggccgcggagcgccggctgcggcacctgggtggtgtggcacggatcctgacccacgaggcgggaatcactgacattgtggtgttacaggcggccctgctccatgacacggtggaggacacagacaccaccctggatgaggtggagctacactttggggcacaagtgcggcgcctggtggaggaggtaacagatgacaagactctgcccaagctggagagaaagaggctgcaggtggagcaagcgccccacagtagccccggggccaaactggtgaagctggcagacaagctgtacaatctgagggacctgaatcgctgcaccccagagggatggtcagaacatcgagtccaggaatacttcgagtgggcagcgcaggtggtgaaggggcttcagggaacaaaccggcaactggaagaggctctaaagcatctgttcaagcagcgggggctgacaatctgatcagtgcttgaagctatccagaggcacaactccagcctcgttcaggccggacaggattcatacgccatcttttctgtgtctcctgagctccctccatccttcccagatattagaggccaaaaaaagacttgcattttttctcagtctgaaggtctcctgctaactaagctgagccccgcgtggtgggaatcagatgtacccatccatttctgatgcactcaccgcctctccccaagtcttgggtctgtttgctattttgcatggtgggatctctggcccctcagggacttgagattatttaagtactagttcctaacacgttctggaaaataaaaataactctgggttaaggttt

SEQ ID NO: 25202 - protein, 46 aa, Homo sapiens; identical to SEQ ID NO: 25188

SEQ ID NO: 25203 - DNA, 1307 bp, Homo sapiens
cgcagctgctggaggctgccgacttcgcggctcgcaagcaccggcagcagcggcggaaggaccccgaggggaccccctacatcaaccaccccatcggtgggcgcgtcggccgcggagcgccggctgcggcacctgggtggtggggactgggaaggaaacgtggggggcgtgcacctcattgagcacctgttttgtcccaagcttagtgcgatataccgtttaagcctcataacaattggaacggtaggcatgatcgttccctttgtcggttggctcccagagggtaaggtacttgaccaaggtcacccagctagtcagagtccacaaggggccacatctggctctccaaaacccacaacacaccgccttgggactacctccgacctgacttcctgctttgcccctccccgtcaggtgtggcacggatcctgacccacgaggcgggaatcactgacattgtggtgttacaggtaactttcccccttctctgccaggagcctgggatggggattaggggccccattcagcaatgggcaacccttggctgacatctcagggctgagtgggaacttgtccccaggcggccctgctccatgacacggtggaggacacagacaccaccctggatgaggtggagctacactttggggcacaagtgcggcgcctggtggaggaggtaacagatgacaagactctgcccaagctggagagaaagaggctgcaggtggagcaagcgccccacagtagccccggggccaaactggtgaagctggcagacaagctgtacaatctgagggacctgaatcgctgcaccccagagggatggtcagaacatcgagtccaggaatacttcgagtgggcagcgcaggtggtgaaggggcttcagggaacaaaccggcaactggaagaggctctaaagcatctgttcaagcagcgggggctgacaatctgatcagtgcttgaagctatccagaggcacaactccagcctcgttcaggccggacaggattcatacgccatcttttctgtgtctcctgagctccctccatccttcccagatattagaggccaaaaaaagacttgcattttttctcagtctgaaggtctcctgctaactaagctgagccccgcgtggtgggaatcagatgtacccatccatttctgatgcactcaccgcctctccccaagtcttgggtctgtttgctattttgcatggtgggatctctggcccctcagggacttgagattatttaagtactagttcctaacacgttctggaaaataaaaataactctgggttaaggttt

SEQ ID NO: 25204 - protein, 60 aa, Homo sapiens; identical to SEQ ID NO: 25190

SEQ ID NO: 25205 - DNA, 1073 bp, Homo sapiens
gaggcggcgcagctgctggaggctgccgacttcgcggctcgcaagcaccggcagcagcggcggaaggaccccgaggggaccccctacatcaaccaccccatcggtgggcgcgtcggccgcggagcgccggctgcggcacctgggtggtggggactgggaaggaaacgtggggggcgtgcacctcattgagcacctgttttgtcccaagcttagtgcgatataccgtttaagcctcataacaattggaacggtaggcatgatcgttccctttgtcggttggctcccagagggtgtggcacggatcctgacccacgaggcgggaatcactgacattgtggtgttacaggcggccctgctccatgacacggtggaggacacagacaccaccctggatgaggtggagctacactttggggcacaagtgcggcgcctggtggaggaggtaacagatgacaagactctgcccaagctggagagaaagaggctgcaggtggagcaagcgccccacagtagccccggggccaaactggtgaagctggcagacaagctgtacaatctgagggacctgaatcgctgcaccccagagggatggtcagaacatcgagtccaggaatacttcgagtgggcagcgcaggtggtgaaggggcttcagggaacaaaccggcaactggaagaggctctaaagcatctgttcaagcagcgggggctgacaatctgatcagtgcttgaagctatccagaggcacaactccagcctcgttcaggccggacaggattcatacgccatcttttctgtgtctcctgagctccctccatccttcccagatattagaggccaaaaaaagacttgcattttttctcagtctgaaggtctcctgctaactaagctgagccccgcgtggtgggaatcagatgtacccatccatttctgatgcactcaccgcctctccccaagtcttgggtctgtttgctattttgcatggtgggatctctggcccctcagggacttgagattatttaagtactagttcctaacacgttctggaaaataaaaataactctgggttaaggttt

SEQ ID NO: 25206 - protein, 153 aa, Homo sapiens; identical to SEQ ID NO: 25192

SEQ ID NO: 25207 - DNA, 1218 bp, Homo sapiens
gcgcgatgggctctgaggcggcgcagctgctggaggctgccgacttcgcggctcgcaagcaccggcagcagcggcggaaggaccccgaggggaccccctacatcaaccaccccatcggtgggcgcgtcggccgcggagcgccggctgcggcacctgggtggtggggactgggaaggaaacgtggggggcgtgcacctcattgagcacctgttttgtcccaagcttagtgcgatataccgtttaagcctcataacaattggaacggtaggcatgatcgttccctttgtcggttggctcccagagggtaaggtacttgaccaaggtcacccagctagtcagagtccacaaggggccacatctggctctccaaaacccacaacacaccgccttgggactacctccgacctgacttcctgctttgcccctccccgtcaggtgtggcacggatcctgacccacgaggcgggaatcactgacattgtggtgttacaggcggccctgctccatgacacggtggaggacacagacaccaccctggatgaggtggagctacactttggggcacaagtgcggcgcctggtggaggaggtaacagatgacaagactctgcccaagctggagagaaagaggctgcaggtggagcaagcgccccacagtagccccggggccaaactggtgaagctggcagacaagctgtacaatctgagggacctgaatcgctgcaccccagagggatggtcagaacatcgagtccaggaatacttcgagtgggcagcgcaggtggtgaaggggcttcagggaacaaaccggcaactggaagaggctctaaagcatctgttcaagcagcgggggctgacaatctgatcagtgcttgaagctatccagaggcacaactccagcctcgttcaggccggacaggattcatacgccatcttttctgtgtctcctgagctccctccatccttcccagatattagaggccaaaaaaagacttgcattttttctcagtctgaaggtctcctgctaactaagctgagccccgcgtggtgggaatcagatgtacccatccatttctgatgcactcaccgcctctccccaagtcttgggtctgtttgctattttgcatggtgggatctctggcccctcagggacttgagattatttaagtactagttcctaacacgttctggaaaataaaaataactctgggttaaggttt

SEQ ID NO: 25208 - protein, 65 aa, Homo sapiens; identical to SEQ ID NO: 25194

SEQ ID NO: 25209 - DNA, 1222 bp, Homo sapiens
cggccgcagtcgtcggccccatccgcgcgatgggctctgaggcggcgcagctgctggaggctgccgacttcgcggctcgcaagcaccggcagcagcggcggaaggaccccgaggggaccccctacatcaaccaccccatcggtgtggcacggatcctgacccacgaggcgggaatcactgacattgtggtgttacaggcggccctgctccatgacacggtggaggacacagacaccaccctggatgaggtggagctacactttggggcacaagtgcggcgcctggtggaggaggtaacagatgacaagactctgcccaagctggagagaaagaggctgcaggtggagcaagcgccccacagtagccccggggccaaactggtgaagctggcagacaagctgtacaatctgagggacctgaatcgctgcaccccagagggtacgctttcgtatgggctgtaagggaaaagggagggggatgccgccttctgaagacacatgttggtcagttcccctgaaaaaccctgggcattcttaattcccaaattaatcctactggaccactctttgatcttctttcatacagtaaaaatacaatagctgggccaaggggaagttttcaggacagctcattccatcaggaactcatggccttgaaccaagcttgccaggaagtggggaaaaggcagtgctttccttgacatcacgctagcaagtttctgtcgactcttatgcaggatggtcagaacatcgagtccaggaatacttcgagtgggcagcgcaggtggtgaaggggcttcagggaacaaaccggcaactggaagaggctctaaagcatctgttcaagcagcgggggctgacaatctgatcagtgcttgaagctatccagaggcacaactccagcctcgttcaggccggacaggattcatacgccatcttttctgtgtctcctgagctccctccatccttcccagatattagaggccaaaaaaagacttgcattttttctcagtctgaaggtctcctgctaactaagctgagccccgcgtggtgggaatcagatgtacccatccatttctgatgcactcaccgcctctccccaagtcttgggtctgtttgctattttgcatggtgggatctctggcccctcagggacttgagattatttaagtactagttcctaacacgttctggaaaataaaaataactctgggttaaggttt

SEQ ID NO: 25210 - protein, 143 aa, Homo sapiens; identical to SEQ ID NO: 25196

SEQ ID NO: 25211 - DNA, 924 bp, Homo sapiens
cggccgcagtcgtcggccccatccgcgcgatgggctctgaggcggcgcagctgctggaggctgccgacttcgcggctcgcaagcaccggcagcagcggcggaaggaccccgaggggaccccctacatcaaccaccccatcggtgtggcacggatcctgacccacgaggcgggaatcactgacattgtggtgttacaggcggccctgctccatgacacggtggaggacacagacaccaccctggatgaggtggagctacactttggggcacaagtgcggcgcctggtggaggaggtaacagatgacaagactctgcccaagctggagagaaagaggctgcaggtggagcaagcgccccacagtagccccggggccaaactggtgaagctggcagacaagctgtacaatctgagggacctgaatcgctgcaccccagagggatggtcagaacatcgagtccaggaatacttcgagtgggcagcgcaggtggtgaaggggcttcagggaacaaaccggcaactggaagaggctctaaagcatctgttcaagcagcgggggctgacaatctgatcagtgcttgaagctatccagaggcacaactccagcctcgttcaggccggacaggattcatacgccatcttttctgtgtctcctgagctccctccatccttcccagatattagaggccaaaaaaagacttgcattttttctcagtctgaaggtctcctgctaactaagctgagccccgcgtggtgggaatcagatgtacccatccatttctgatgcactcaccgcctctccccaagtcttgggtctgtttgctattttgcatggtgggatctctggcccctcagggacttgagattatttaagtactagttcctaacacgttctggaaaataaaaataactctgggttaaggttt

SEQ ID NO: 25212 - protein, 179 aa, Homo sapiens; identical to SEQ ID NO: 25198

SEQ ID NO: 25213 - DNA, 1075 bp, Homo sapiens
cggccgcagtcgtcggccccatccgcgcgatgggctctgaggcggcgcagctgctggaggctgccgacttcgcggctcgcaagcaccggcagcagcggcggaaggaccccgaggggaccccctacatcaaccaccccatcggtgtggcacggatcctgacccacgaggcgggaatcactgacattgtggtgttacaggcggccctgctccatgacacggtggaggacacagacaccaccctggatgaggtggagctacactttggggcacaagtgcggcgcctggtggaggaggtaacagatgacaagactctgcccaagctggagagaaagaggctgcaggtggagcaagcgccccacagtagccccggggccaaactggtgaagctggcagacaagctgtacaatctgagggacctgaatcgctgcaccccagaggtaaaaatacaatagctgggccaaggggaagttttcaggacagctcattccatcaggaactcatggccttgaaccaagcttgccaggaagtggggaaaaggcagtgctttccttgacatcacgctagcaagtttctgtcgactcttatgcaggatggtcagaacatcgagtccaggaatacttcgagtgggcagcgcaggtggtgaaggggcttcagggaacaaaccggcaactggaagaggctctaaagcatctgttcaagcagcgggggctgacaatctgatcagtgcttgaagctatccagaggcacaactccagcctcgttcaggccggacaggattcatacgccatcttttctgtgtctcctgagctccctccatccttcccagatattagaggccaaaaaaagacttgcattttttctcagtctgaaggtctcctgctaactaagctgagccccgcgtggtgggaatcagatgtacccatccatttctgatgcactcaccgcctctccccaagtcttgggtctgtttgctattttgcatggtgggatctctggcccctcagggacttgagattatttaagtactagttcctaacacgttctggaaaataaaaataactctgggttaaggttt

SEQ ID NO: 25214 - protein, 140 aa, Homo sapiens; identical to SEQ ID NO: 3347

SEQ ID NO: 25215 - DNA, 369 bp, Homo sapiens
atggcgcgggggttggctgtccccgcagagacctgcagggagctcgcggcggaggacccagagggaggcctgcggtggctccagcccagactccggccccgaccgcagcagaagtgcacgaggtctacggtcatcagggtcacaaccaactgtgggctcccaaagagccaggcttatgttcttcttgcacccccaacagagcacactgagctgggggctgcgatgctgaaggcagctgtccacatcacttgctctctgcgcgggccggtcagctccagaggaattcatctggggcaggcccaactcggcccgctgaattagcctccacgatccccgggcctccccggcgccagggggcgctgtaaacgt

SEQ ID NO: 25216 - protein, 106 aa, Homo sapiens [sequence omitted]

SEQ ID NO: 25217 - DNA, 224 bp, Homo sapiens
ctccagcccagactccggccccgaccgcagcagaagtgcacgaggtctacggtcatcagggtcacaaccaagcacactgagctgggggctgcgatgctgaaggcagctgtccacatcacttgctctctgcgcgggccggtcagctccagaggaattcatctggggcaggcccaactcggcccgctgaattagcctccacgatccccgggcctccccggcgccag

SEQ ID NO: 25218 - protein, 32 aa, Homo sapiens
MLKAAVHITCSLRGPVSSRGIHLGQAQLGPLN

SEQ ID NO: 25219 - DNA, 3251 bp, Homo sapiens
agagactgcgcctgcgcgggcacgagacaacctctccgcgatgactgtgagtggtccagggacccccgagccccggccggccacccccggggccagctcagtggagcagctgcggaaggagggcaatgagctgttcaaatgtggagactacgggggcgccctggcggcctacactcaggccctgggtctggacgcgacgccccaggaccaggccgttctgcaccggaaccgggccgcctgccacctcaagctggaagattacgacaaagcagaaacagaggcatccaaagccattgaaaaggatggtggggatgtcaaagcactctaccggcggagccaagccctagagaagctgggccgcctggaccaggctgtccttgacctgcagagatgtgtgagcttggagcccaagaacaaagttttccaggaggccttgcggaacatcgggggccagattcaggagaaggtgcgatacatgtcctcgacggatgccaaagtggaacagatgtttcagatactgttggacccagaagagaagggcactgagaaaaagcaaaaggcttctcagaacctggtggtgctggccagggaggatgctggagcggagaagatcttccggagtaatggggttcagctcttgcaacgtttactggacatgggagagactgacctcatgctggcggctctgcgtacgctggttggcatttgctctgagcatcagtcacggacagtggcaaccctgagcatactgggaactcggcgagtagtctccatcctgggcgtggaaagccaggctgtgtccctggctgcctgccacctgctgcaggttatgtttgatgccctcaaggaaggtgtcaaaaaaggcttccgaggcaaagaaggtgccatcattgtggatcctgcccgggagctgaaggtcctcatcagtaacctcttagatctgctgacagaggtgggggtctctggccaaggccgagacaatgccctgaccctcctgattaaagcggtgccccggaagtctctcaaggaccccaacaacagcctcaccctctgggtcatcgaccaaggtctgaaaaagattttggaagtggggggctctctacaggaccctcctggggagctcgcagtgaccgcaaacagccgcatgagcgcctctattctcctcagcaagctctttgatgacctcaagtgtgatgcggagagggagaatttccacagactttgtgaaaactacatcaagagctggtttgagggccaagggctggccgggaagctacgggccatccagacggtgtcctgcctcctgcagggcccatgtgacgctggcaaccgggccttggagctgagcggtgtcatggagagtgtgattgctctgtgtgcctctgagcaggaggaggagcagctggtggccgtggaggctctgatccatgcagccggcaaggctaagcgggcctcattcatcactgccaatggtgtctcgctgctgaaggacctatataagtgcagcgagaaggacagcatccgcatccgggcgctagtgggactctgtaagctcggttcggctggagggactgacttcagcatgaagcagtttgctgaaggctccactctcaaactggctaagcagtgtcgaaagtggctgtgcaatgaccagatcgacgcaggcactcggcgctgggcagtggagggcctggcttacctgacctttgatgccgacgtgaaggaagagtttgtggaggatgcggctgctctgaaagctctgttccagctcagcaggttggaggagaggtcagtgctctttgcggtggcctcagcgctggtgaactgcaccaacagctatgactacgaggagcccgaccccaagatggtggagctggccaagtatgccaagcagcatgtgcccgagcagcaccccaaggacaagccaagcttcgtgcgggctcgggtgaagaagctgctggcagcgggtgtggtgtcggccatggtgtgcatggtgaagacggagagccctgtgctgaccagttcctgcagagagctgctctccagggtcttcttggctttagtggaagaggtagaggaccgaggcactgtggttgcccagggaggcggcagggcgctgatcccgctggccctggaaggcacggacgtggggcagacaaaggcagcccaggcccttgccaagctcaccatcacctccaacccggagatgaccttccctggcgagcggatctatgaggtggtccggcccctcgtctccctgttgcacctcaactgctcaggcctgcagaacttcgaggcgctcatggccctaacaaacctggctgggatcagcgagaggctccggcagaagatcctgaaggagaaggctgtgcccatgatagaaggctacatgtttgaggagcatgagatgatccgccgggcagccacggagtgcatgtgtaacttggccatgagcaaggaggtgcaggacctcttcgaagcccagggcaatgaccgactgaagctgctggtgctgtacagtggagaggatgatgagctgctacagcgggcagctgccgggggcttggccatgcttacctccatgcggcccacgctctgcagccgcattccccaagtgaccacacactggctggagatcctgcaggccctgcttctgagctccaaccaggagctgcagcaccggggtgctgtggtggtgctgaacatggtggaggcctcgagggagattgccagcaccctgatggagagtgagatgatggagatcttgtcagtgctagctaagggtgaccacagccctgtcacaagggctgctgcagcctgcctggacaaagcagtggaatatgggcttatccaacccaaccaagatggagagtgagggggttgtccctgggcccaaggctcatgcacacgctacctattgtggcacggagagtaaggacggaagcagctttggctggtggtggctggcatgcccaatactcttgcccatcctcgcttgctgccctaggatgtcctctgttctgagtcagcggccacgttcagtcacacagccctgcttggccagcactgcctgcagcctcactcagaggggccctttttctgtactactgtagtcagctgggaatggggaaggtgcatcccaacacagcctgtggatcctggggcatctggaagggcgcacacatcagcagcctcaccagctgtgagcctgctatcaggcctgcccctccaataaaagtgtgtagaactcc

SEQ ID NO: 25220 - protein, 944 aa, Homo sapiens; identical to SEQ ID NO: 3351

SEQ ID NO: 25221 - DNA, 3315 bp, Homo sapiens
agagactgcgcctgcgcgggcacgagacaacctctccgcgatgactgtgagtggtccagggacccccgagccccggccggccacccccggggccagctcagtggagcagctgcggaaggagggcaatgagctgttcaaatgtggagactacgggggcgccctggcggcctacactcaggccctgggtctggacgcgacgccccaggaccaggccgttctgcaccggaaccgggccgcctgccacctcaagctggaagattacgacaaagcagaaacagaggcatccaaagccattgaaaaggatggtggggatgtcaaagcactctaccggcggagccaagccctagagaagctgggccgcctggaccaggctgtccttgacctgcagagatgtgtgagcttggagcccaagaacaaagttttccaggaggccttgcggaacatcgggggccagattcaggagaaggtgcgatacatgtcctcgacggatgccaaagtggaacagatgtttcagatactgttggacccagaagagaagggcactgagaaaaagcaaaaggcttctcagaacctggtggtgctggccagggaggatgctggagcggagaagatcttccggagtaatggggttcagctcttgcaacgtttactggacatgggagagactgacctcatgctggcggctctgcgtacgctggttggcatttgctctgagcatcagtcacggacagtggcaaccctgagcatactgggaactcggcgagtagtctccatcctgggcgtggaaagccaggctgtgtccctggctgcctgccacctgctgcaggttatgtttgatgccctcaaggaaggtgtcaaaaaaggcttccgaggcaaagaaggtgccatcattgtggatcctgcccgggagctgaaggtcctcatcagtaacctcttagatctgctgacagaggtgggggtctctggccaaggccgagacaatgccctgaccctcctgattaaagcggtgccccggaagtctctcaaggaccccaacaacagcctcaccctctgggtcatcgaccaaggtctgaaaaagattttggaagtggggggctctctacaggaccctcctggggagctcgcagtgaccgcaaacagccgcatgagcgcctctattctcctcagcaagctctttgatgacctcaagtgtgatgcggagagggagaatttccacagactttgtgaaaactacatcaagagctggtttgagggccaagggctggccgggaagctacgggccatccagacggtgtcctgcctcctgcagggcccatgtgacgctggcaaccgggccttggagctgagcggtgtcatggagagtgtgattgctctgtgtgcctctgagcaggaggaggagcagctggtggccgtggaggctctgatccatgcagccggcaaggctaagcgggcctcattcatcactgccaatggtgtctcgctgctgaaggacctatataagtgcagcgagaaggacagcatccgcatccgggcgctagtgggactctgtaagctcggttcggctggagggactgacttcagcatgaagcagtttgctgaaggctccactctcaaactggctaagcagtgtcgaaagtggctgtgcaatgaccagatcgacgcaggcactcggcgctgggcagtggagggcctggcttacctgacctttgatgccgacgtgaaggaagagtttgtggaggatgcggctgctctgaaagctctgttccagctcagcaggttggaggagaggtcagtgctctttgcggtggcctcagcgctggtgaactgcaccaacagctatgactacgaggagcccgaccccaagatggtggagctggccaagtatgccaagcagcatgtgcccgagcagcaccccaaggacaagccaagcttcgtgcgggctcgggtgaagaagctgctggcagcgggtgtggtgtcggccatggtgtgcatggtgaagacggagagccctgtgctgaccagttcctgcagagagctgctctccagggtcttcttggctttagtggaagaggtagaggaccgaggcactgtggttgcccagggaggcggcagggcgctgatcccgctggccctggaaggcacggacgtggggcagacaaaggcagcccaggcccttgccaagctcaccatcacctccaacccggagatgaccttccctggcgagcggatctatgaggtggtccggcccctcgtctccctgttgcacctcaactgctcaggcctgcagaacttcgaggcgctcatggccctaacaaacctggctgggatcagcgagaggctccggcagaagatcctgaaggagaaggctgtgcccatgatagaaggctacatgtttgaggagcatgagatgatccgccgggcagccacggagtgcatgtgtaacttggccatgagcaaggaggtgcaggacctcttcgaagcccagggcaatgaccgactgaagctgctggtgctgtacagtggagaggatgatgagctgctacagcgggcagctgccgggggcttggccatgcttacctccatgcggcccacgctctgcagccgcattccccaagtgaccacacactggctggagatcctgcaggccctgcttctgagctccaaccaggagctgcagcaccggggtgctgtggtggtgctgaacatggtggaggcctcgagggagattgccagcaccctgatggagagtgagatgatggagatcttgtcagtgctagctaagggtgaccacagccctgtcacaagggctgctgcagcctgcctggacaaagcagtggaatatgggcttatccaacccaaccaagatggagagtgagggggttgtccctgggcccaaggctcatgcacacgctacctattgtggcacggagagtaaggacggaagcagctttggctggtggtggctggcatgcccaatactcttgcccatcctcgcttgctgccctaggatgtcctctgttctgagtcagcggccacgttcagtcacacagccctgcttggccagcactgcctgcagcctcactcagaggggccctttttctgtactactgtagtcagctgggaatggggaaggtgcatcccaacacagcctgtggatcctggggcatctggaagggcgcacacatcagcagcctcaccagctgtgagcctgctatcaggcctgcccctccaataaaagtgtgtagaactccactgtgtgccctgtccttgggcagggagggctgctgtgagtgggagtctctgagtgggtgagtg

SEQ ID NO: 25222 - protein, 944 aa, Homo sapiens; identical to SEQ ID NO: 3351

SEQ ID NO: 25223 - DNA, 2489 bp, Homo sapiens
gacaacctctccgcgatgactgtgagtggtccagggacccccgagccccggccggccacccccggggccagctcagtggagcagctgcggaaggagggcaatgagctgttcaaatgtggagactacgggggcgccctggcggcctacactcaggccctgggtctggacgcgacgccccaggaccaggccgttctgcaccggaaccgggccgcctgccacctcaagctggaagattacgacaaagcagaaacagaggcatccaaaggtaggggaatggtgggccctggtgtggagctgtagggcttctgtggtgggcaaggactctgggaccgctgcaccgtcacattctcctcctttggccccagagacacatctgccttctttctttcccactgcctcgggcctttccttttctgcagctaccctcaccttttctgaggctgaagcaccgagccccacattcgtcccccccaccttcttctggcctttcctcgagatctttccctactgctcttgcctggagacagtggcctcatgggtgctgacagcgctcctgtttgtgctcagccattgaaaaggatggtggggatgtcaaagcactctaccggcggagccaagccctagagaagctgggccgcctggaccaggctgtccttgacctgcagagatgtgtgagcttggagcccaagaacaaagttttccaggaggccttgcggaacatcgggggccagattcaggagaaggtgcgatacatgtcctcgacggatgccaaagtggaacagatgtttcagatactgttggacccagaagagaagggcactgagaaaaagcaaaaggcttctcagaacctggtggtgctggccagggaggatgctggagcggagaagatcttccggagtaatggggttcagctcttgcaacgtttactggacatgggagagactgacctcatgctggcggctctgcgtacgctggttggcatttgctctgagcatcagtcacgggtaggtggagtggagaggctggttacagcttcagtccctttgtctgtctgtccatccattcctccatccacccatctgtccatccgcccatctgcccgtccatccatccatccactcttccaccctctaccccttaccttattctaaaaagaacttaggtaggttatggtgcctcacacctgtaatcccagcactttggggggctgaggcaggtggatcacttgaggtcaggagttcaagaccagcctggccaacaaggcgaaaccctgtctctactaaaaataaaaaaattagccgggcatggtagtgcacgcctgtaatcccagctactcaggaggctgaggcacgagacttgcttgaacccaggaggtggaggttgtggtgagctgagatcgcgccactgcactccagcctgggtgacagagcgagactatctcagaaacaaaacaaaacaaaacaacaaaaaaagaaaaggcagagtacaaggagatacatgtaacaagagagaaaaaataaaaatggcgtgaaaaagaccaacataaattaggatgaagtggggtagaaagagcaaaaacagccttggggtaccccaagcacttgctttgtagggggcttacaagtgtgagccccagctttcctgcagccaactcacaaaaacacattggtcactgactccttcaatgtccatatggcacaagcaagctcatggcccagaatgtgcctggccaccacagcatctaccatcgagacagtgaccggacacgtagggcttgatcccgacatgattctcagcatggatggtggtggcccagcatggacagtgcagcaataacagtcctgctcctgggccagtgtggtgaagtccatgcccccagctcttacctgagctggcttgctccaggggagaggggaccaaagactaggcccttggttgcttttagaggagcccacaattcctagataggggtgaaactgtgaaatagtcaatgaaatctctttaggctaagcttgggctgcattctgggtctcccaaggctaagactgttaaaagcatgtgcattctgttccctcctgccttccggtccattccagttcacagtcttggccaaggacacttagctgctaagtggaagcagtcaggatttgggctcagtggaccaagcaggccttctagggttctccagcttagaaacagggtggagagggcccggcgcggtggctcatgcctgtaatcccagcactttggaaggccgaggcgggcagatcacgaggtcaggagattgagacaatcctggctaacacggtgaaaccccgtctctactaaaaatacaaaaaattagccgggtgcggtggcgggcgcctgtaatcccagttactcaggaggctgaggcagggaaatggcgtgaacctgggaggtggagcttgcagtgagcccagatcgcgctactgcactccagcctgggcgacagagcaagactccgtctc

SEQ ID NO: 25224 - protein, 157 aa, Homo sapiens
MSCSNVETTGAPWRPTLRPWVWTRRPRTRPFCTGTGPPATSSWKITTKQKQRHPKVGEWWALVWSCRASVVGKDSGTAAPSHSPPLAPETHLPSFFPTASGLSFSAATLTFSEAEAPSPTFVPPTFFWPFLEIFPYCSCLETVASWVLTALLFVLSH

SEQ ID NO: 25225 - DNA, 389 bp, Homo sapiens
gccagctcagtggagcagctgcggaaggagggcaatgagctgttcaaatgtggagactacgggggcgccctggcggcctacactcaggccctgggtctggacgcgacgccccaggaccaggccgttctgcaccggaaccgggccgcctgccacctcaagctggaagattacgacaaagcagaaacagaggcatccaaagctaccctcaccttttctgaggctgaagcaccgagccccacattcgtcccccccaccttcttctggcctttcctcgagatctttccctactgctcttgcctggagacagtggcctcatgggtgctgacagcgctcctgtttgtgctcagccattgaaaaggatggtggggatgtcaaagcactctaccggc

SEQ ID NO: 25226 - protein, 96 aa, Homo sapiens
MSCSNVETTGAPWRPTLRPWVWTRRPRTRPFCTGTGPPATSSWKITTKQKQRHPKLPSPFLRLKHRAPHSSPPPSSGLSSRSFPTALAWRQWPHGC

SEQ ID NO: 25227 - DNA, 2640 bp, Homo sapiens
atcggcatggctcctccctccatggggcttaagactgggcctgcaggggtcatgcagtgttcctgggagctggtggtttgggggtttggggactacctggccctccatgagcctgttgtggctgtgcaccctgtggaagctggtcttcctccctggggcactcagtcctggatttctccatcccataaggatttggctgtggctgaagcacctgtcctctccccacatgcctctcaactccacctgcagagggcttctttgtgcgacatggaaggaaacagagccattctcagtgtggcctgggaaggggtggggcccacgactgtccagcggccagcgcatcagtgtctgcagatgctgtgtcatgcggccaccccagtagctgattttcttgccacatgctctaggtggtggtctggagggagagggtgctgatttgtctgtgtagcttccagggggccatggcagagtgccagggagggagtccaagccaggtgtggaggagctcagctcctgcctccttccccagaggccaactggtcttgccctcttcctccagggactctgtaagctcggttcggctggagggactgacttcagcatgaagcagtttgctgaaggctccactctcaaactggctaagcagtgtcgaaagtggctgtgcaatgaccagatcgacgcaggcactcggcgctgggcagtggagggcctggcttacctgacctttgatgccgacgtgaaggaagagtttgtggaggatgcggctgctctgaaagctctgttccagctcagcagggtagctctgtggttcctgccgtcagcctggggacactgtctaggattagaccttaccaggctttctcggcagggcttggccaatggggtcttttgaccccagggaagagggctggtggctgagtggctgctctgtgtagtgtgggcatgttggccagcaccagtggtgttagcaaggacgttcttcttggaggagctggggaggtcaagtttgtaagctcccaaagtctggggcctgggagtttcccgaattcatcctgtacccaagggtcccagctgagggtggaattgggggcctgggcctgggcagcatttatctgagtactgctctgccccgggatgcccatgtgaattcctctgtgtcctggcagttggaggagaggtcagtgctctttgcggtggcctcagcgctggtgaactgcaccaacagctatgactacgaggagcccgaccccaagatggtggagctggccaagtatgccaagcagcatgtgcccgagcagcaccccaaggacaagccaagcttcgtgcgggctcgggtgaagaagctgctggcagcgggtgtggtgtcggccatggtgtgcatggtgaagacggagagccctgtgctgaccagttcctgcagagagctgctctccagggtcttcttggctttagtggaagaggtagaggaccgaggcactgtggttgcccagggaggcggcagggcgctgatcccgctggccctggaaggcacggacgtggggcagacaaaggcagcccaggcccttgccaagctcaccatcacctccaacccggagatgaccttccctggcgagcggatctatgaggtggtccggcccctcgtctccctgttgcacctcaactgctcaggcctgcagaacttcgaggcgctcatggccctaacaaacctggctgggatcagcgagaggctccggcagaagatcctgaaggagaaggctgtgcccatgatagaaggctacatgtttgaggagcatgagatgatccgccgggcagccacggagtgcatgtgtaacttggccatgagcaaggaggtgcaggacctcttcgaagcccagggcaatgaccgactgaagctgctggtgctgtacagtggagaggatgatgagctgctacagcgggcagctgccgggggcttggccatgcttacctccatgcggcccacgctctgcagccgcattccccaagtgaccacacactggctggagatcctgcaggccctgcttctgagctccaaccaggagctgcagcaccggggtgctgtggtggtgctgaacatggtggaggcctcgagggagattgccagcaccctgatggagagtgagatgatggagatcttgtcagtgctagctaagggtgaccacagccctgtcacaagggctgctgcagcctgcctggacaaagcagtggaatatgggcttatccaacccaaccaagatggagagtgagggggttgtccctgggcccaaggctcatgcacacgctacctattgtggcacggagagtaaggacggaagcagctttggctggtggtggctggcatgcccaatactcttgcccatcctcgcttgctgccctaggatgtcctctgttctgagtcagcggccacgttcagtcacacagccctgcttggccagcactgcctgcagcctcactcagaggggccctttttctgtactactgtagtcagctgggaatggggaaggtgcatcccaacacagcctgtggatcctggggcatctggaagggcgcacacatcagcagcctcaccagctgtgagcctgctatcaggcctgcccctccaataaaagtgtgtagaactcc

SEQ ID NO: 25228 - protein, 336 aa, Homo sapiens [sequence omitted]

SEQ ID NO: 25229 - DNA, 2704 bp, Homo sapiens
atcggcatggctcctccctccatggggcttaagactgggcctgcaggggtcatgcagtgttcctgggagctggtggtttgggggtttggggactacctggccctccatgagcctgttgtggctgtgcaccctgtggaagctggtcttcctccctggggcactcagtcctggatttctccatcccataaggatttggctgtggctgaagcacctgtcctctccccacatgcctctcaactccacctgcagagggcttctttgtgcgacatggaaggaaacagagccattctcagtgtggcctgggaaggggtggggcccacgactgtccagcggccagcgcatcagtgtctgcagatgctgtgtcatgcggccaccccagtagctgattttcttgccacatgctctaggtggtggtctggagggagagggtgctgatttgtctgtgtagcttccagggggccatggcagagtgccagggagggagtccaagccaggtgtggaggagctcagctcctgcctccttccccagaggccaactggtcttgccctcttcctccagggactctgtaagctcggttcggctggagggactgacttcagcatgaagcagtttgctgaaggctccactctcaaactggctaagcagtgtcgaaagtggctgtgcaatgaccagatcgacgcaggcactcggcgctgggcagtggagggcctggcttacctgacctttgatgccgacgtgaaggaagagtttgtggaggatgcggctgctctgaaagctctgttccagctcagcagggtagctctgtggttcctgccgtcagcctggggacactgtctaggattagaccttaccaggctttctcggcagggcttggccaatggggtcttttgaccccagggaagagggctggtggctgagtggctgctctgtgtagtgtgggcatgttggccagcaccagtggtgttagcaaggacgttcttcttggaggagctggggaggtcaagtttgtaagctcccaaagtctggggcctgggagtttcccgaattcatcctgtacccaagggtcccagctgagggtggaattgggggcctgggcctgggcagcatttatctgagtactgctctgccccgggatgcccatgtgaattcctctgtgtcctggcagttggaggagaggtcagtgctctttgcggtggcctcagcgctggtgaactgcaccaacagctatgactacgaggagcccgaccccaagatggtggagctggccaagtatgccaagcagcatgtgcccgagcagcaccccaaggacaagccaagcttcgtgcgggctcgggtgaagaagctgctggcagcgggtgtggtgtcggccatggtgtgcatggtgaagacggagagccctgtgctgaccagttcctgcagagagctgctctccagggtcttcttggctttagtggaagaggtagaggaccgaggcactgtggttgcccagggaggcggcagggcgctgatcccgctggccctggaaggcacggacgtggggcagacaaaggcagcccaggcccttgccaagctcaccatcacctccaacccggagatgaccttccctggcgagcggatctatgaggtggtccggcccctcgtctccctgttgcacctcaactgctcaggcctgcagaacttcgaggcgctcatggccctaacaaacctggctgggatcagcgagaggctccggcagaagatcctgaaggagaaggctgtgcccatgatagaaggctacatgtttgaggagcatgagatgatccgccgggcagccacggagtgcatgtgtaacttggccatgagcaaggaggtgcaggacctcttcgaagcccagggcaatgaccgactgaagctgctggtgctgtacagtggagaggatgatgagctgctacagcgggcagctgccgggggcttggccatgcttacctccatgcggcccacgctctgcagccgcattccccaagtgaccacacactggctggagatcctgcaggccctgcttctgagctccaaccaggagctgcagcaccggggtgctgtggtggtgctgaacatggtggaggcctcgagggagattgccagcaccctgatggagagtgagatgatggagatcttgtcagtgctagctaagggtgaccacagccctgtcacaagggctgctgcagcctgcctggacaaagcagtggaatatgggcttatccaacccaaccaagatggagagtgagggggttgtccctgggcccaaggctcatgcacacgctacctattgtggcacggagagtaaggacggaagcagctttggctggtggtggctggcatgcccaatactcttgcccatcctcgcttgctgccctaggatgtcctctgttctgagtcagcggccacgttcagtcacacagccctgcttggccagcactgcctgcagcctcactcagaggggccctttttctgtactactgtagtcagctgggaatggggaaggtgcatcccaacacagcctgtggatcctggggcatctggaagggcgcacacatcagcagcctcaccagctgtgagcctgctatcaggcctgcccctccaataaaagtgtgtagaactccactgtgtgccctgtccttgggcagggagggctgctgtgagtgggagtctctgagtgggtgagtg

SEQ ID NO: 25230 - protein, 336 aa, Homo sapiens [sequence omitted]

SEQ ID NO: 25231 - DNA, 1858 bp, Homo sapiens
aactccccttgagggcctctccggtcccgaggcctacgccggggccctgcggcccggtctgtgaaatgggctgaaacctccgaggggcgttggaccaaggccctggaggaaaccgggggcgttggaccaaggcagaggttgggccaggtggtcccgcccctgcaggaacccgtggggctggagctcggattagaaccacagagaggacattcattaagacttgagctaaaggtttggcgaggagtgacgcccaagacgggcggaccccgccacccacctcagtcccgggaccgcggcagctcaaaacccgacacgcgccggactcatgccccaacaggaagcagcttttaccttccacggattggctcaggacccgtcacgtgcctctgtcgagccaacgagcctcacgctgggcttagccctcctcgaacgtgctggggtggtgggcggggcccaagccgcccttcaaccaggctcagctggccaccaaccccaacccccgccccagcgccctcagcggaggccacagaggactcccaatataaagacaaacgtactgaaggcccagcatatgggagtctctaccctaaacgacttatttcttgggatagtttaatattttttgagatagggtctcgctgtgtcgcccaggcgacactttgggaggctgcgctctgggctcactgcaaccttcgcctaccgagtagctgggattacaggtgcatgccgccacactctgctctttttttttttttttttttttttttggtatttttatagagaaagagttttgcttgttgcccaggctggtctcgaacccctgacttcaagtgatccacctgcctcagcctcccaaagcgctgggattacaagcttgaggcaccgcacctgcaccagcagcttcagtcggtcattgccctgggcttcgaagaggtcctgcacctgtggccagatgtgaggagtggaccaagtcagttgggtgtaaagcccagccagggcacaggtacctctgcatccccgcctgtcatgagcacccagaccaaccctcacctccttgctcatggccaagttacacatgcactccgtggctgcccggcggatcatctcatgctcctcaaacatgtagccttctatcatgggcacagccttctccttcaggatcttctgcctgcagggccacaggaggaagcagcagggatacggtttggatgttttcccttctaaccctcatgttgaactataatccccaatgttggaggtagggcctggtgggaggtgactgggtcatgggatgggtccctcatggcttggtgctatcctcgtgatagtaagttctcgtgagatctggttatttaaaagtgcgtggcatctcggccgggcgtggaggctcacgcctgtaatcccagcactctggaaggccgaggcaggcagatgacttgaggtcaagagttcgagaccagcctggccaacatggtgaaaccttgtctctactaaaaagacaaaaaaaaattagctgggtatgctggtgcgcgcctgtagtcccagctactcagggaggctgaggcaggagaagcgattgaacccaggaggtgaaggttgcagtgagccaagattgcgccactgcactccagcctgggcaacagagggagactccatttcaaaaaaaaaaaaagtgtgtggcacctcccccgactgtctcttgctcctactttcaccatgtgatgtgcctgctcctgctttgccttctactatgagtaaaagctctctgaggcctccccagaagctgagcaaatgccaatgccatgcttacacagcctgtagagccaggaagcaattaaatctcttttctttataaatt

SEQ ID NO: 25232 - protein, 111 aa, Homo sapiens
MLVRACSPSYSGRLRQEKRLNPGGEGCSEPRLRHCTPAWATEGDSISKKKKVCGTSPDCLLLLLSPCDVPAPALPSTMSKSSLRPPQKLSKCQCHAYTACRARKQLNLFSL

SEQ ID NO: 25233 - DNA, 473 bp, Homo sapiens
actggctggagatcctgcaggccctgcttctgagctccaaccaggagctgcagcaccggggtgctgtggtggtgctgaacatggtggaggcctcgagggagattgccagcaccctgatggagagtgagatgatggagatcttgtcagtgctagctaagggtgaccacagccctgtcacaagggctgctgcagcctgcctggacaaagcagtggaatatgggcttatccaacccaaccaagatggagagtgagggggttgtccctgggcccaaggctcatgcacacgctacctattgtggcacggagagtaaggacggaagcagctttggctggtggtggctggcatgcccaatactcttgcccatcacagcctgtggatcctggggcatctggaagggcgcacacatcagcagcctcaccagctgtgagcctgctatcaggcctgcccctccaataaaagtgtgtagaactcc

SEQ ID NO: 25234 - protein, 84 aa, Homo sapiens
MGLSNPTKMESEGVVPGPKAHAHATYCGTESKDGSSFGWWWLACPILLPITACGSWGIWKGAHISSLTSCEPAIRPAPPIKVCR

SEQ ID NO: 25235 - DNA, 1921 bp, Homo sapiens
ggaaggtaaaagctgcttcctgttggggcatgagtccggcgcgtgtcgggttttgagctgccgcggtcccgggactgagataaggcagctccagcccctggaaggccagagacttgccagtgtcccactagcgggctcttcgcaagaatccccccgggcccgccgcagccaggcggcggccggcagagggcgctgctcgggcatggcggaggagcggccgggggcctggttcggcttcggtttctgcggcttcgggcaggagctgggctccggacgcgggcgccaggtgcacagccccagtccgctgcgggcgggcgtcgacatctgccgcgtgagcgcgagctggagctacaccgctttcgtgacccgtggaggccgcttggagctgtcgggctcagccagcggcgcggcgggccgctgcaaggacgcgtgggcctcggaggggctcctcgcggtgctgcgcgccgggccggggccggaggcgttactgcaggtctgggcggccgaatcggcgctgcgtggggagccattgtgggcccagaatgtggtgcccgaggccgaaggggaagacgatccggccggtgaggcccaggctgggaggctacccctgctgccctgcgcccgtgcctacgtgagcccgcgggcgcccttctaccggcctctggctccggagctgcgggcacgccagctggagctgggcgccgagcacgcgttgctgctggacgctgctggccaggtgttctcctggggcgggggcaggcatggacagctgggccatgggaccctggaggcagagctggagccacggctgttggaggcgttgcagggcctagtcatggctgaggtggccgcggggggctggcattctgtgtgtgtgagtgagactggggatatttatatctggggctggaatgaatcagggcagctggccctgcccaccaggaacctggcagaggatggagagactgtcgcaagggaagccacagaactgaatgaagatggttctcaggtgaagagaacgggtggggctgaggatggagcccctgcccccttcatagctgtccagcccttcccggcattactggatctccccatgggctcagatgcagtcaaggccagctgtggatcccggcacacagctgtggtgacacgaacaggggagctctacacctggggctggggtaaatatggacagctgggccacgaggacaccaccagcttggatcggcctcgccgtgtggaatactttgtagataagcaactccaagtaaaggctgtcacctgtgggccgtggaacacctacgtgtatgctgtggagaaagggaagagctgacatgtgtacgtatatgtatatgcaacacctgtgagacccccattcaggtcaaggaaaaccattgcctgcaccccaagggccccatatttgcccctccccatcacagtcctgcccttcaccctcaagcacggtcctaaacttgtctgcactttagaaacacctggagagcattgaaaactctgctgcctaaggtcagcatcaatcaaaacaatgaaatcaatgaaacaatgaaaccagagcttctaggtgtgtggcctggatagtggtagattcaaagctccacccacctcatcccaggtacatttgatgtgcagctgagattggggcacattccaggtcatcgtcttctgtcagtcatttccctgctttcgtttgaattttaccattcttgtatgcagccttatacgacatagttgtgtttgcttttgagtgttagataaatggaatcctgtgtatgtgcttttgtgtcgtttttgtcactcagcattgtataatccatccttgttgggtcctggagttcatttttaatgctatatggtgttctgttgtatgaataatacctcaagtgatacagccttgttgatggtc

SEQ ID NO: 25236 - protein, 376 aa, Homo sapiens; identical to SEQ ID NO: 3353

SEQ ID NO: 25237 - DNA, 2689 bp, Homo sapiens
ggaaggtaaaagctgcttcctgttggggcatgagtccggcgcgtgtcgggttttgagctgccgcggtcccgggactgagataaggcagctccagcccctggaaggccagagacttgccagtgtcccactagcgggctcttcgcaagaatccccccgggcccgccgcagccaggcggcggccggcagagggcgctgctcgggcatggcggaggagcggccgggggcctggttcggcttcggtttctgcggcttcgggcaggagctgggctccggacgcgggcgccaggtgcacagccccagtccgctgcgggcgggcgtcgacatctgccgcgtgagcgcgagctggagctacaccgctttcgtgacccgtggaggccgcttggagctgtcgggctcagccagcggcgcggcgggccgctgcaaggacgcgtgggcctcggaggggctcctcgcggtgctgcgcgccgggccggggccggaggcgttactgcaggtctgggcggccgaatcggcgctgcgtggggagccattgtgggcccagaatgtggtgcccgaggccgaaggggaagacgatccggccggtgaggcccaggctgggaggctacccctgctgccctgcgcccgtgcctacgtgagcccgcgggcgcccttctaccggcctctggctccggagctgcgggcacgccagctggagctgggcgccgagcacgcgttgctgctggacgctgctggccaggtgttctcctggggcgggggcaggcatggacagctgggccatgggaccctggaggcagagctggagccacggctgttggaggcgttgcagggcctagtcatggctgaggtggccgcggggggctggcattctgtgtgtgtgagtgagactggggatatttatatctggggctggaatgaatcagggcagctggccctgcccaccaggaacctggcagaggatggagagactgtcgcaagggaagccacagaactgaatgaagatggttctcaggtgaagagaacgggtggggctgaggatggagcccctgcccccttcatagctgtccagcccttcccggcattactggatctccccatgggctcagatgcagtcaaggccagctgtggatcccggcacacagctgtggtgacacgaacaggggagctctacacctggggctggggtaaatatggacagctgggccacgaggacaccaccagcttggatcggcctcgccgtgtggaatactttgtagataagcaactccaagtaaaggctgtcacctgtgggccgtggaacacctacgtgtatgctgtggagaaagggaagagctgacatgtgtacgtatatgtatatgcaacacctgtgagacccccattcaggtcaaggaaaaccattgcctgcaccccaagggccccatatttgcccctccccatcacagtcctgcccttcaccctcaagcacggtcctaaacttgtctgcactttagaaacacctggagagcattgaaaactctgctgcctaaggtcagcatcaatcaaaacaatgaaatcaatgaaacaatgaaaccagagcttctaggtgtgtggcctggatagtggtagattcaaagctccacccacctcatcccaggtacatttgatgtgcagctgagattggggcacattccaggtcatcgtcttctgtcagtcatttccctgctttcgtttgaattttaccattcttgtatgcagccttatacgacatagttgtgtttgcttttgagtgttagataaatggaatcctgtgtatgtgcttttgtgtcgtttttgtcactcagcattgtataatccatccttgttgggtcctggagttcatttttaatgctatatggtgttctgttgtatgaataatacctcaagtgatacagccttgttgatggtcatttttattgtttctgattttggtcattccacataattctttgtgcagtcttctgcacatgtgcacaagttcctttgcagaacattgagttgaattgctaagtcaggagatacctttaattttactagataactgttgcccccagcagggtggggtctactgtggctaaaatgtcaggtagatgcacactggttttaattggcatttccctggatactgatgaggttgagtagcttttcatttgttttggatggctgggcatggtggctcacacctgtagtcccagcactttgggaggctaagcagggagattgcttgaggcgaagagttcatatgtttattggccacttggagtttttctgttgtcaagtgcctgttcaagttttctggccttttaaaatgttctgtattttccttagtgatttttcttttggatatttcagatacaagtcttttgagagttagtattcagagtatcttctgctacaatgtagtttgtttcagtctctcttggtattaccaattttaatacttaggtgatgcttactccatgccaggtaaggctcaaagtgctttacaagtatcaacttattttgataaaataagcttatcagtagttttctttatagttaaattctatttgtgcatgtgtgtgtctgtggtttagcaaatgtttcccacccatggggtcttttttattgtggtaaaatatactgaacataaaatttatgttcaataaaaaacaaaaattgtttttaaccattttaa

SEQ ID NO: 25238 - protein, 376 aa, Homo sapiens; identical to SEQ ID NO: 3353

SEQ ID NO: 25239 - DNA, 1971 bp, Homo sapiens
tccggcgcgtgtcgggttttgagctgccgcggtcccgggactgagctccttgggagcagacagctgtcctcactggcagaggaggagcgctcagtaaatgctcgctggacgaataaatggctagataagataaggcagctccagcccctggaaggccagagacttgccagtgtcccactagcgggctcttcgcaagaatccccccgggcccgccgcagccaggcggcggccggcagagggcgctgctcgggcatggcggaggagcggccgggggcctggttcggcttcggtttctgcggcttcgggcaggagctgggctccggacgcgggcgccaggtgcacagccccagtccgctgcgggcgggcgtcgacatctgccgcgtgagcgcgagctggagctacaccgctttcgtgacccgtggaggccgcttggagctgtcgggctcagccagcggcgcggcgggccgctgcaaggacgcgtgggcctcggaggggctcctcgcggtgctgcgcgccgggccggggccggaggcgttactgcaggtctgggcggccgaatcggcgctgcgtggggagccattgtgggcccagaatgtggtgcccgaggccgaaggggaagacgatccggccggtgaggcccaggctgggaggctacccctgctgccctgcgcccgtgcctacgtgagcccgcgggcgcccttctaccggcctctggctccggagctgcgggcacgccagctggagctgggcgccgagcacgcgttgctgctggacgctgctggccaggtgttctcctggggcgggggcaggcatggacagctgggccatgggaccctggaggcagagctggagccacggctgttggaggcgttgcagggcctagtcatggctgaggtggccgcggggggctggcattctgtgtgtgtgagtgagactggggatatttatatctggggctggaatgaatcagggcagctggccctgcccaccaggaacctggcagaggatggagagactgtcgcaagggaagccacagaactgaatgaagatggttctcaggtgaagagaacgggtggggctgaggatggagcccctgcccccttcatagctgtccagcccttcccggcattactggatctccccatgggctcagatgcagtcaaggccagctgtggatcccggcacacagctgtggtgacacgaacaggggagctctacacctggggctggggtaaatatggacagctgggccacgaggacaccaccagcttggatcggcctcgccgtgtggaatactttgtagataagcaactccaagtaaaggctgtcacctgtgggccgtggaacacctacgtgtatgctgtggagaaagggaagagctgacatgtgtacgtatatgtatatgcaacacctgtgagacccccattcaggtcaaggaaaaccattgcctgcaccccaagggccccatatttgcccctccccatcacagtcctgcccttcaccctcaagcacggtcctaaacttgtctgcactttagaaacacctggagagcattgaaaactctgctgcctaaggtcagcatcaatcaaaacaatgaaatcaatgaaacaatgaaaccagagcttctaggtgtgtggcctggatagtggtagattcaaagctccacccacctcatcccaggtacatttgatgtgcagctgagattggggcacattccaggtcatcgtcttctgtcagtcatttccctgctttcgtttgaattttaccattcttgtatgcagccttatacgacatagttgtgtttgcttttgagtgttagataaatggaatcctgtgtatgtgcttttgtgtcgtttttgtcactcagcattgtataatccatccttgttgggtcctggagttcatttttaatgctatatggtgttctgttgtatgaataatacctcaagtgatacagccttgttgatggtc

SEQ ID NO: 25240 - protein, 376 aa, Homo sapiens; identical to SEQ ID NO: 3353

SEQ ID NO: 25241 - DNA, 2739 bp, Homo sapiens
tccggcgcgtgtcgggttttgagctgccgcggtcccgggactgagctccttgggagcagacagctgtcctcactggcagaggaggagcgctcagtaaatgctcgctggacgaataaatggctagataagataaggcagctccagcccctggaaggccagagacttgccagtgtcccactagcgggctcttcgcaagaatccccccgggcccgccgcagccaggcggcggccggcagagggcgctgctcgggcatggcggaggagcggccgggggcctggttcggcttcggtttctgcggcttcgggcaggagctgggctccggacgcgggcgccaggtgcacagccccagtccgctgcgggcgggcgtcgacatctgccgcgtgagcgcgagctggagctacaccgctttcgtgacccgtggaggccgcttggagctgtcgggctcagccagcggcgcggcgggccgctgcaaggacgcgtgggcctcggaggggctcctcgcggtgctgcgcgccgggccggggccggaggcgttactgcaggtctgggcggccgaatcggcgctgcgtggggagccattgtgggcccagaatgtggtgcccgaggccgaaggggaagacgatccggccggtgaggcccaggctgggaggctacccctgctgccctgcgcccgtgcctacgtgagcccgcgggcgcccttctaccggcctctggctccggagctgcgggcacgccagctggagctgggcgccgagcacgcgttgctgctggacgctgctggccaggtgttctcctggggcgggggcaggcatggacagctgggccatgggaccctggaggcagagctggagccacggctgttggaggcgttgcagggcctagtcatggctgaggtggccgcggggggctggcattctgtgtgtgtgagtgagactggggatatttatatctggggctggaatgaatcagggcagctggccctgcccaccaggaacctggcagaggatggagagactgtcgcaagggaagccacagaactgaatgaagatggttctcaggtgaagagaacgggtggggctgaggatggagcccctgcccccttcatagctgtccagcccttcccggcattactggatctccccatgggctcagatgcagtcaaggccagctgtggatcccggcacacagctgtggtgacacgaacaggggagctctacacctggggctggggtaaatatggacagctgggccacgaggacaccaccagcttggatcggcctcgccgtgtggaatactttgtagataagcaactccaagtaaaggctgtcacctgtgggccgtggaacacctacgtgtatgctgtggagaaagggaagagctgacatgtgtacgtatatgtatatgcaacacctgtgagacccccattcaggtcaaggaaaaccattgcctgcaccccaagggccccatatttgcccctccccatcacagtcctgcccttcaccctcaagcacggtcctaaacttgtctgcactttagaaacacctggagagcattgaaaactctgctgcctaaggtcagcatcaatcaaaacaatgaaatcaatgaaacaatgaaaccagagcttctaggtgtgtggcctggatagtggtagattcaaagctccacccacctcatcccaggtacatttgatgtgcagctgagattggggcacattccaggtcatcgtcttctgtcagtcatttccctgctttcgtttgaattttaccattcttgtatgcagccttatacgacatagttgtgtttgcttttgagtgttagataaatggaatcctgtgtatgtgcttttgtgtcgtttttgtcactcagcattgtataatccatccttgttgggtcctggagttcatttttaatgctatatggtgttctgttgtatgaataatacctcaagtgatacagccttgttgatggtcatttttattgtttctgattttggtcattccacataattctttgtgcagtcttctgcacatgtgcacaagttcctttgcagaacattgagttgaattgctaagtcaggagatacctttaattttactagataactgttgcccccagcagggtggggtctactgtggctaaaatgtcaggtagatgcacactggttttaattggcatttccctggatactgatgaggttgagtagcttttcatttgttttggatggctgggcatggtggctcacacctgtagtcccagcactttgggaggctaagcagggagattgcttgaggcgaagagttcatatgtttattggccacttggagtttttctgttgtcaagtgcctgttcaagttttctggccttttaaaatgttctgtattttccttagtgatttttcttttggatatttcagatacaagtcttttgagagttagtattcagagtatcttctgctacaatgtagtttgtttcagtctctcttggtattaccaattttaatacttaggtgatgcttactccatgccaggtaaggctcaaagtgctttacaagtatcaacttattttgataaaataagcttatcagtagttttctttatagttaaattctatttgtgcatgtgtgtgtctgtggtttagcaaatgtttcccacccatggggtcttttttattgtggtaaaatatactgaacataaaatttatgttcaataaaaaacaaaaattgtttttaaccattttaa

SEQ ID NO: 25242 - protein, 376 aa, Homo sapiens; identical to SEQ ID NO: 3353

SEQ ID NO: 25243 - DNA, 2125 bp, Homo sapiens
ggcgtttcctccaaggctgcccaccagaaggacctgcccgagagggtagagggcatagggtcaagatcaagataaggcagctccagcccctggaaggccagagacttgccagtgtcccactagcgggctcttcgcaagaatccccccgggcccgccgcagccaggcggcggccggcagagggcgctgctcgggcatggcggaggagcggccgggggcctggttcggcttcggtttctgcggcttcgggcaggagctgggctccggacgcgggcgccaggtgcacagccccagtccgctgcgggcgggcgtcgacatctgccgcgtgagcgcgagctggagctacaccgctttcgtgacccgtgagcactccccgccccgtccccacttattccagccgcgctccccagtcgcctccccgcaccgctgtggccagtccagtttgtctcccccgttcaggccgccagccccacattctgggttggtccccaattcgaccccttcccaggaacaccccgctccccccatccccgccgcctccattctggccaccctgctccaatccgccccgcaggtggaggccgcttggagctgtcgggctcagccagcggcgcggcgggccgctgcaaggacgcgtgggcctcggaggggctcctcgcggtgctgcgcgccgggccggggccggaggcgttactgcaggtctgggcggccgaatcggcgctgcgtggggagccattgtgggcccagaatgtggtgcccgaggccgaaggggaagacgatccggccggtgaggcccaggctgggaggctacccctgctgccctgcgcccgtgcctacgtgagcccgcgggcgcccttctaccggcctctggctccggagctgcgggcacgccagctggagctgggcgccgagcacgcgttgctgctggacgctgctggccaggtgttctcctggggcgggggcaggcatggacagctgggccatgggaccctggaggcagagctggagccacggctgttggaggcgttgcagggcctagtcatggctgaggtggccgcggggggctggcattctgtgtgtgtgagtgagactggggatatttatatctggggctggaatgaatcagggcagctggccctgcccaccaggaacctggcagaggatggagagactgtcgcaagggaagccacagaactgaatgaagatggttctcaggtgaagagaacgggtggggctgaggatggagcccctgcccccttcatagctgtccagcccttcccggcattactggatctccccatgggctcagatgcagtcaaggccagctgtggatcccggcacacagctgtggtgacacgaacaggggagctctacacctggggctggggtaaatatggacagctgggccacgaggacaccaccagcttggatcggcctcgccgtgtggaatactttgtagataagcaactccaagtaaaggctgtcacctgtgggccgtggaacacctacgtgtatgctgtggagaaagggaagagctgacatgtgtacgtatatgtatatgcaacacctgtgagacccccattcaggtcaaggaaaaccattgcctgcaccccaagggccccatatttgcccctccccatcacagtcctgcccttcaccctcaagcacggtcctaaacttgtctgcactttagaaacacctggagagcattgaaaactctgctgcctaaggtcagcatcaatcaaaacaatgaaatcaatgaaacaatgaaaccagagcttctaggtgtgtggcctggatagtggtagattcaaagctccacccacctcatcccaggtacatttgatgtgcagctgagattggggcacattccaggtcatcgtcttctgtcagtcatttccctgctttcgtttgaattttaccattcttgtatgcagccttatacgacatagttgtgtttgcttttgagtgttagataaatggaatcctgtgtatgtgcttttgtgtcgtttttgtcactcagcattgtataatccatccttgttgggtcctggagttcatttttaatgctatatggtgttctgttgtatgaataatacctcaagtgatacagccttgttgatggtc

SEQ ID NO: 25244 - protein, 165 aa, Homo sapiens
MAEVAAGGWHSVCVSETGDIYIWGWNESGQLALPTRNLAEDGETVAREATELNEDGSQVKRTGGAEDGAPAPFIAVQPFPALLDLPMGSDAVKASCGSRHTAVVTRTGELYTWGWGKYGQLGHEDTTSLDRPRRVEYFVDKQLQVKAVTCGPWNTYVYAVEKGKS

SEQ ID NO: 25245 - DNA, 477 bp, Homo sapiens
acactaccaccatgtccaatgctacggccaatagtagcattcggcctatctttggagggacagtctaccactcccccgtgttcctgtgcctactttgcctgagttcttctacccccgcagttgccagccacattgggagtctgtttgttccaatgggttgagctgtctttgtcgtggagatctggaactttgcacatgtcactactggggaggtgttcctgctctagcttccacgatgaggcgccctctttacctatcctctcaatcactactcttcttgaagcactattatttattcttccgctgtctgcctgcagcagtactactgtcaacatagtgtaaatggttctcaaaagcttaccagtgtggacttggtgttagccacgctgtttactcatacagtacgtgtcctgtttttaaaatatacaattattcttaaaaataaattaaaatctgtatacttacatttcaaaaaga

SEQ ID NO: 25246 - protein, 49 aa, Homo sapiens
MSNATANSSIRPIFGGTVYHSPVFLCLLCLSSSTPAVASHIGSLFVPMG

SEQ ID NO: 25247 - DNA, 1636 bp, Homo sapiens
agctggaagaagagttgaaggcacgaattgaattgtgggaacaggaacattcaaaggcatttatggtgaatgggcagaaattcatggagtatgtggcagaacaatgggagatgcatcgattggagaaagagagagccaagcaggaaagacaactgaagaacaaaaaacagacagagacagagatgctgtatggcagcgctcctcgaacacctagcaagcggcgaggactggctcccaatacaccgggcaaagcacgtaagctgaacactaccaccatgtccaatgctacggccaatagtagcattcggcctatctttggagggacagtctaccactcccccgtgtctcgacttcctccttctggcagcaagccagtcgctgcttccacctgttcagggaagaaaacaccccgtactggcaggcatggagccaacaaggagaacctggagctcaacggcagcatcctgagtgcgagaactttcaaaggcttccaaatctgatgctacttctggaatcctcaattcaaccaacatccagtcctgagaagccctgatcagtcaaccagctgtggcttcctgtgcctagactggacctaattatatgggggtgactttagtttttcttcagcttaggcgtgcttgaaaccttggccaggttccatgaccatgggcctaacttaaagatgtgaatgagtgttacagttgaaagcccatcataggtttagtggtcctaggagacttggttttgacttatatacatgaaaagtttatggcaagaagtgcaaattttagcatatggggcctgacttctctaccacataattctacttgctgaagcatgatcaaagcttgttttatttcaccactgtaggaaaatgattgactatgcccatccctgggggtaattttggcatgtatacctgtaactagtaattaacatcttttttgtttaggcatgttcaattaatgctgtagctatcatagctttgctcttacctgaagccttgtccccaccacacaggacagccttcctcctgaagagaatgtctttgtgtgtccgaagttgagatggcctgccctactgccaaagaggtgacaggaaggctgggagcagctttgttaaattgtgttcagttctgttacacagtgcattgccctttgttgggggtatgcatgtatgaacacacatgcttgtcggaacgctttctcggcgtttgtcccttggctctcatctcccccattcctgtgcctactttgcctgagttcttctacccccgcagttgccagccacattgggagtctgtttgttccaatgggttgagctgtctttgtcgtggagatctggaactttgcacatgtcactactggggaggtgttcctgctctagcttccacgatgaggcgccctctttacctatcctctcaatcactactcttcttgaagcactattatttattcttccgctgtctgcctgcagcagtactactgtcaacatagtgtaaatggttctcaaaagcttaccagtgtggacttggtgttagccacgctgtttactcatacagtacgtgtcctgtttttaaaatatacaattattcttaaaaataaattaaaatctgtatacttacatttcaaaaaga

SEQ ID NO: 25248 - protein, 145 aa, Homo sapiens
MVNGQKFMEYVAEQWEMHRLEKERAKQERQLKNKKQTETEMLYGSAPRTPSKRRGLAPNTPGKARKLNTTTMSNATANSSIRPIFGGTVYHSPVSRLPPSGSKPVAASTCSGKKTPRTGRHGANKENLELNGSILSARTFKGFQI

SEQ ID NO: 25249 - DNA, 421 bp, Homo sapiens
aagatcaagaactgtgcgaaattctttgtatgcctactttgcctgagttcttctacccccgcagttgccagccacattgggagtctgtttgttccaatgggttgagctgtctttgtcgtggagatctggaactttgcacatgtcactactggggaggtgttcctgctctagcttccacgatgaggcgccctctttacctatcctctcaatcactactcttcttgaagcactattatttattcttccgctgtctgcctgcagcagtactactgtcaacatagtgtaaatggttctcaaaagcttaccagtgtggacttggtgttagccacgctgtttactcatacagtacgtgtcctgtttttaaaatatacaattattcttaaaaataaattaaaatctgtatacttacatttcaaaaaga

SEQ ID NO: 25250 - protein, 83 aa, Homo sapiens
MPTLPEFFYPRSCQPHWESVCSNGLSCLCRGDLELCTCHYWGGVPALASTMRRPLYLSSQSLLFLKHYYLFFRCLPAAVLLST

SEQ ID NO: 25251 - DNA, 2979 bp, Homo sapiens
cttcgccccgtggcgcggtttgaaattttgcggggctcaacggctcgcggagcggctacgcggagtgacatcgccggtgtttgcgggtggttgttgctctcggggccgtgtggagtaggtctggacctggactcacggctgcttggagcgtccgccatgaggagaagtgaggtgctggcggaggagtccatagtatgtctgcagaaagccctaaatcaccttcgggaaatatgggagctaattgggattccagaggaccagcggttacaaagaactgaggtggtaaagaagcatatcaaggaactcctggatatgatgattgctgaagaggaaagcctgaaggaaagactcatcaaaagcatatccgtctgtcagaaagagctgaacactctgtgcagcgagttacatgttgagccatttcaggaagaaggagagacgaccatcttgcaactagaaaaagatttgcgcacccaagtggaattgatgcgaaaacagaaaaaggagagaaaacaggaactgaagctacttcaagagcaagatcaagaactgtgcgaaattctttgtatgccccactatgatattgacagtgcctcagtgcccagcttagaagagctgaaccagttcaggcaacatgtgacaactttgagggaaacaaaggcttctaggcgtgaggagtttgtcagtataaagagacagatcatactgtgtatggaagcattagaccacaccccagacacaagctttgaaagagatgtggtgtgtgaagacgaagatgccttttgtttgtctttggagaatattgcaacactacaaaagttgctacggcagctggaaatgcagaaatcacaaaatgaagcagtgtgtgaggggctgcgtactcaaatccgagagctctgggacaggttgcaaatacctgaagaagaaagagaagctgtggccaccattatgtctgggtcaaaggccaaggtccggaaagcgctgcaattagaagtggatcggttggaagaactgaaaatgcaaaacatgaagaaagtgattgaggcaattcgagtggagctggttcagtactgggaccagtgcttttatagccaggagcagagacaagcttttgcccctttctgtgctgaggactacacagaaagtctgctccagctccacgatgctgagattgtgcggttaaaaaactactatgaagttcacaaggaactctttgaaggtgtccagaagtgggaagaaacctggaggcttttcttagagtttgagagaaaagcttcagatccaaatcgatttacaaaccgaggaggaaatcttctaaaagaagaaaaacaacgagccaagctccaaaattcatggagtatgtggcagaacaatgggagatgcatcgattggagaaagagagagccaagcaggaaagacaactgaagaacaaaaaacagacagagacagagatgctgtatggcagcgctcctcgaacacctagcaagcggcgaggactggctcccaatacaccgggcaaagcacgtaagctgaacactaccaccatgtccaatgctacggccaatagtagcattcggcctatctttggagggacagtctaccactcccccgtgtctcgacttcctccttctggcagcaagccagtcgctgcttccacctgttcagggaagaaaacaccccgtactggcaggcatggagccaacaaggagaacctggagctcaacggcagcatcctgagtggtgggtaccctggctcggcccccctccagcgcaacttcagcattaattctgttgccagcacctattctgagtttgcgcgagaactttcaaaggcttccaaatctgatgctacttctggaatcctcaattcaaccaacatccagtcctgagaagccctgatcagtcaaccagctgtggcttcctgtgcctagactggacctaattatatgggggtgactttagtttttcttcagcttaggcgtgcttgaaaccttggccaggttccatgaccatgggcctaacttaaagatgtgaatgagtgttacagttgaaagcccatcataggtttagtggtcctaggagacttggttttgacttatatacatgaaaagtttatggcaagaagtgcaaattttagcatatggggcctgacttctctaccacataattctacttgctgaagcatgatcaaagcttgttttatttcaccactgtaggaaaatgattgactatgcccatccctgggggtaattttggcatgtatacctgtaactagtaattaacatcttttttgtttaggcatgttcaattaatgctgtagctatcatagctttgctcttacctgaagccttgtccccaccacacaggacagccttcctcctgaagagaatgtctttgtgtgtccgaagttgagatggcctgccctactgccaaagaggtgacaggaaggctgggagcagctttgttaaattgtgttcagttctgttacacagtgcattgccctttgttgggggtatgcatgtatgaacacacatgcttgtcggaacgctttctcggcgtttgtcccttggctctcatctcccccattcctgtgcctactttgcctgagttcttctacccccgcagttgccagccacattgggagtctgtttgttccaatgggttgagctgtctttgtcgtggagatctggaactttgcacatgtcactactggggaggtgttcctgctctagcttccacgatgaggcgccctctttacctatcctctcaatcactactcttcttgaagcactattatttattcttccgctgtctgcctgcagcagtactactgtcaacatagtgtaaatggttctcaaaagcttaccagtgtggacttggtgttagccacgctgtttactcatacagtacgtgtcctgtttttaaaatatacaattattcttaaaaataaattaaaatctgtatacttacatttcaaaaaga

SEQ ID NO: 25252 - protein, 421 aa, Homo sapiens
MRRSEVLAEESIVCLQKALNHLREIWELIGIPEDQRLQRTEVVKKHIKELLDMMIAEEESLKERLIKSISVCQKELNTLCSELHVEPFQEEGETTILQLEKDLRTQVELMRKQKKERKQELKLLQEQDQELCEILCMPHYDIDSASVPSLEELNQFRQHVTTLRETKASRREEFVSIKRQIILCMEALDHTPDTSFERDVVCEDEDAFCLSLENIATLQKLLRQLEMQKSQNEAVCEGLRTQIRELWDRLQIPEEEREAVATIMSGSKAKVRKALQLEVDRLEELKMQNMKKVIEAIRVELVQYWDQCFYSQEQRQAFAPFCAEDYTESLLQLHDAEIVRLKNYYEVHKELFEGVQKWEETWRLFLEFERKASDPNRFTNRGGNLLKEEKQRAKLQNSWSMWQNNGRCIDWRKREPSRKDN

SEQ ID NO: 25253 - DNA, 3113 bp, Homo sapiens
gcttcgccccgtggcgcggtttgaaattttgcggggctcaacggctcgcggagcggctacgcggagtgacatcgccggtgtttgcgggtggttgttgctctcggggccgtgtggagtaggtctggacctggactcacggctgcttggagcgtccgccatgaggagaagtgaggtgctggcggaggagtccatagtatgtctgcagaaagccctaaatcaccttcgggaaatatgggagctaattgggattccagaggaccagcggttacaaagaactgaggtggtaaagaagcatatcaaggaactcctggatatgatgattgctgaagaggaaagcctgaaggaaagactcatcaaaagcatatccgtctgtcagaaagagctgaacactctgtgcagcgagttacatgttgagccatttcaggaagaaggagagacgaccatcttgcaactagaaaaagatttgcgcacccaagtggaattgatgcgaaaacagaaaaaggagagaaaacaggaactgaagctacttcaagagcaagatcaagaactgtgcgaaattctttgtatgccccactatgatattgacagtgcctcagtgcccagcttagaagagctgaaccagttcaggcaacatgtgacaactttgagggaaacaaaggcttctaggcgtgaggagtttgtcagtataaagagacagatcatactgtgtatggaagcattagaccacaccccagacacaagctttgaaagagatgtggtgtgtgaagacgaagatgccttttgtttgtctttggagaatattgcaacactacaaaagttgctacggcagctggaaatgcagaaatcacaaaatgaagcagtgtgtgaggggctgcgtactcaaatccgagagctctgggacaggttgcaaatacctgaagaagaaagagaagctgtggccaccattatgtctgggtcaaaggccaaggtccggaaagcgctgcaattagaagtggatcggttggaagaactgaaaatgcaaaacatgaagaaagtgattgaggcaattcgagtggagctggttcagtactgggaccagtgcttttatagccaggagcagagacaagcttttgcccctttctgtgctgaggactacacagaaagtctgctccagctccacgatgctgagattgtgcggttaaaaaactactatgaagttcacaaggaactctttgaaggtgtccagaagtgggaagaaacctggaggcttttcttagagtttgagagaaaagcttcagatccaaatcgatttacaaaccgaggaggaaatcttctaaaagaagaaaaacaacgagccaagctccagaaaatgctgcccaagctggaagaagagttgaaggcacgaattgaattgtgggaacaggaacattcaaaggcatttatggtgaatgggcagaaattcatggagtatgtggcagaacaatgggagatgcatcgattggagaaagagagagccaagcaggaaagacaactgaagaacaaaaaacagacagagacagagatgctgtatggcagcgctcctcgaacacctagcaagcggcgaggactggctcccaatacaccgggcaaagcacgtaagctgaacactaccaccatgtccaatgctacggccaatagtagcattcggcctatctttggagggacagtctaccactcccccgtgtctcgacttcctccttctggcagcaagccagtcgctgcttccacctgttcagggaagaaaacaccccgtactggcaggcatggagccaacaaggagaacctggagctcaacggcagcatcctgagtggtgggtaccctggctcggcccccctccagcgcaacttcagcattaattctgttgccagcacctattctgagtttgcgaaggatccgtccctctctgacagttccactgttgggcttcagcgagaactttcaaaggcttccaaatctgatgctacttctggaatcctcaattcaaccaacatccagtcctgagaagccctgatcagtcaaccagctgtggcttcctgtgcctagactggacctaattatatgggggtgactttagtttttcttcagcttaggcgtgcttgaaaccttggccaggttccatgaccatgggcctaacttaaagatgtgaatgagtgttacagttgaaagcccatcataggtttagtggtcctaggagacttggttttgacttatatacatgaaaagtttatggcaagaagtgcaaattttagcatatggggcctgacttctctaccacataattctacttgctgaagcatgatcaaagcttgttttatttcaccactgtaggaaaatgattgactatgcccatccctgggggtaattttggcatgtatacctgtaactagtaattaacatcttttttgtttaggcatgttcaattaatgctgtagctatcatagctttgctcttacctgaagccttgtccccaccacacaggacagccttcctcctgaagagaatgtctttgtgtgtccgaagttgagatggcctgccctactgccaaagaggtgacaggaaggctgggagcagctttgttaaattgtgttcagttctgttacacagtgcattgccctttgttgggggtatgcatgtatgaacacacatgcttgtcggaacgctttctcggcgtttgtcccttggctctcatctcccccattcctgtgcctactttgcctgagttcttctacccccgcagttgccagccacattgggagtctgtttgttccaatgggttgagctgtctttgtcgtggagatctggaactttgcacatgtcactactggggaggtgttcctgctctagcttccacgatgaggcgccctctttacctatcctctcaatcactactcttcttgaagcactattatttattcttccgctgtctgcctgcagcagtactactgtcaacatagtgtaaatggttctcaaaagcttaccagtgtggacttggtgttagccacgctgtttactcatacagtacgtgtcctgtttttaaaatatacaattattcttaaaaataaattaaaatctgtatacttacatttcaaaaaga

SEQ ID NO: 25254 - protein, 620 aa, Homo sapiens
MRRSEVLAEESIVCLQKALNHLREIWELIGIPEDQRLQRTEVVKKHIKELLDMMIAEEESLKERLIKSISVCQKELNTLCSELHVEPFQEEGETTILQLEKDLRTQVELMRKQKKERKQELKLLQEQDQELCEILCMPHYDIDSASVPSLEELNQFRQHVTTLRETKASRREEFVSIKRQIILCMEALDHTPDTSFERDVVCEDEDAFCLSLENIATLQKLLRQLEMQKSQNEAVCEGLRTQIRELWDRLQIPEEEREAVATIMSGSKAKVRKALQLEVDRLEELKMQNMKKVIEAIRVELVQYWDQCFYSQEQRQAFAPFCAEDYTESLLQLHDAEIVRLKNYYEVHKELFEGVQKWEETWRLFLEFERKASDPNRFTNRGGNLLKEEKQRAKLQKMLPKLEEELKARIELWEQEHSKAFMVNGQKFMEYVAEQWEMHRLEKERAKQERQLKNKKQTETEMLYGSAPRTPSKRRGLAPNTPGKARKLNTTTMSNATANSSIRPIFGGTVYHSPVSRLPPSGSKPVAASTCSGKKTPRTGRHGANKENLELNGSILSGGYPGSAPLQRNFSINSVASTYSEFAKDPSLSDSSTVGLQRELSKASKSDATSGILNSTNIQS

SEQ ID NO: 25255 - DNA, 2994 bp, Homo sapiens
gcttcgccccgtggcgcggtttgaaattttgcggggctcaacggctcgcggagcggctacgcggagtgacatcgccggtgtttgcgggtggttgttgctctcggggccgtgtggagtaggtctggacctggactcacggctgcttggagcgtccgccatgaggagaagtgaggtgctggcggaggagtccatagtatgtctgcagaaagccctaaatcaccttcgggaaatatgggagctaattgggattccagaggaccagcggttacaaagaactgaggtggtaaagaagcatatcaaggaactcctggatatgatgattgctgaagaggaaagcctgaaggaaagactcatcaaaagcatatccgtctgtcagaaagagctgaacactctgtgcagcgagttacatgttgagccatttcaggaagaaggagagacgaccatcttgcaactagaaaaagatttgcgcacccaagtggaattgatgcgaaaacagaaaaaggagagaaaacaggaactgaagctacttcaagagcaagatcaagaactgtgcgaaattctttgtatgccccactatgatattgacagtgcctcagtgcccagcttagaagagctgaaccagttcaggcaacatgtgacaactttgagggaaacaaaggcttctaggcgtgaggagtttgtcagtataaagagacagatcatactgtgtatggaagcattagaccacaccccagacacaagctttgaaagagatgtggtgtgtgaagacgaagatgccttttgtttgtctttggagaatattgcaacactacaaaagttgctacggcagctggaaatgcagaaatcacaaaatgaagcagtgtgtgaggggctgcgtactcaaatccgagagctctgggacaggttgcaaatacctgaagaagaaagagaagctgtggccaccattatgtctgggtcaaaggccaaggtccggaaagcgctgcaattagaagtggatcggttggaagaactgaaaatgcaaaacatgaagaaagtgattgaggcaattcgagtggagctggttcagtactgggaccagtgcttttatagccaggagcagagacaagcttttgcccctttctgtgctgaggactacacagaaagtctgctccagctccacgatgctgagattgtgcggttaaaaaactactatgaagttcacaaggaactctttgaaggtgtccagaagtgggaagaaacctggaggcttttcttagagtttgagagaaaagcttcagatccaaatcgatttacaaaccgaggaggaaatcttctaaaagaagaaaaacaacgagccaagctccagaaaatgctgcccaagctggaagaagagttgaaggcacgaattgaattgtgggaacaggaacattcaaaggcatttatggtgaatgggcagaaattcatggagtatgtggcagaacaatgggagatgcatcgattggagaaagagagagccaagcaggaaagacaactgaagaacaaaaaacagacagagacagagatgctgtatggcagcgctcctcgaacacctagcaagcggcgaggactggctcccaatacaccgggcaaagcacgtaagctgaacactaccaccatgtccaatgctacggccaatagtagcattcggcctatctttggagggacagtctaccactcccccgtgtctcgacttcctccttctggcagcaagccagtcgctgcttccacctgttcagggaagaaaacaccccgtactggcaggcatggagccaacaaggagaacctggagctcaacggcagcatcctgagtgcgagaactttcaaaggcttccaaatctgatgctacttctggaatcctcaattcaaccaacatccagtcctgagaagccctgatcagtcaaccagctgtggcttcctgtgcctagactggacctaattatatgggggtgactttagtttttcttcagcttaggcgtgcttgaaaccttggccaggttccatgaccatgggcctaacttaaagatgtgaatgagtgttacagttgaaagcccatcataggtttagtggtcctaggagacttggttttgacttatatacatgaaaagtttatggcaagaagtgcaaattttagcatatggggcctgacttctctaccacataattctacttgctgaagcatgatcaaagcttgttttatttcaccactgtaggaaaatgattgactatgcccatccctgggggtaattttggcatgtatacctgtaactagtaattaacatcttttttgtttaggcatgttcaattaatgctgtagctatcatagctttgctcttacctgaagccttgtccccaccacacaggacagccttcctcctgaagagaatgtctttgtgtgtccgaagttgagatggcctgccctactgccaaagaggtgacaggaaggctgggagcagctttgttaaattgtgttcagttctgttacacagtgcattgccctttgttgggggtatgcatgtatgaacacacatgcttgtcggaacgctttctcggcgtttgtcccttggctctcatctcccccattcctgtgcctactttgcctgagttcttctacccccgcagttgccagccacattgggagtctgtttgttccaatgggttgagctgtctttgtcgtggagatctggaactttgcacatgtcactactggggaggtgttcctgctctagcttccacgatgaggcgccctctttacctatcctctcaatcactactcttcttgaagcactattatttattcttccgctgtctgcctgcagcagtactactgtcaacatagtgtaaatggttctcaaaagcttaccagtgtggacttggtgttagccacgctgtttactcatacagtacgtgtcctgtttttaaaatatacaattattcttaaaaataaattaaaatctgtatacttacatttcaaaaaga

SEQ ID NO: 25256 - protein, 566 aa, Homo sapiens
MRRSEVLAEESIVCLQKALNHLREIWELIGIPEDQRLQRTEVVKKHIKELLDMMIAEEESLKERLIKSISVCQKELNTLCSELHVEPFQEEGETTILQLEKDLRTQVELMRKQKKERKQELKLLQEQDQELCEILCMPHYDIDSASVPSLEELNQFRQHVTTLRETKASRREEFVSIKRQIILCMEALDHTPDTSFERDVVCEDEDAFCLSLENIATLQKLLRQLEMQKSQNEAVCEGLRTQIRELWDRLQIPEEEREAVATIMSGSKAKVRKALQLEVDRLEELKMQNMKKVIEAIRVELVQYWDQCFYSQEQRQAFAPFCAEDYTESLLQLHDAEIVRLKNYYEVHKELFEGVQKWEETWRLFLEFERKASDPNRFTNRGGNLLKEEKQRAKLQKMLPKLEEELKARIELWEQEHSKAFMVNGQKFMEYVAEQWEMHRLEKERAKQERQLKNKKQTETEMLYGSAPRTPSKRRGLAPNTPGKARKLNTTTMSNATANSSIRPIFGGTVYHSPVSRLPPSGSKPVAASTCSGKKTPRTGRHGANKENLELNGSILSARTFKGFQI

SEQ ID NO: 25257 - DNA, 3071 bp, Homo sapiens
gcttcgccccgtggcgcggtttgaaattttgcggggctcaacggctcgcggagcggctacgcggagtgacatcgccggtgtttgcgggtggttgttgctctcggggccgtgtggagtaggtctggacctggactcacggctgcttggagcgtccgccatgaggagaagtgaggtgctggcggaggagtccatagtatgtctgcagaaagccctaaatcaccttcgggaaatatgggagctaattgggattccagaggaccagcggttacaaagaactgaggtggtaaagaagcatatcaaggaactcctggatatgatgattgctgaagaggaaagcctgaaggaaagactcatcaaaagcatatccgtctgtcagaaagagctgaacactctgtgcagcgagttacatgttgagccatttcaggaagaaggagagacgaccatcttgcaactagaaaaagatttgcgcacccaagtggaattgatgcgaaaacagaaaaaggagagaaaacaggaactgaagctacttcaagagcaagatcaagaactgtgcgaaattctttgtatgccccactatgatattgacagtgcctcagtgcccagcttagaagagctgaaccagttcaggcaacatgtgacaactttgagggaaacaaaggcttctaggcgtgaggagtttgtcagtataaagagacagatcatactgtgtatggaagcattagaccacaccccagacacaagctttgaaagagatgtggtgtgtgaagacgaagatgccttttgtttgtctttggagaatattgcaacactacaaaagttgctacggcagctggaaatgcagaaatcacaaaatgaagcagtgtgtgaggggctgcgtactcaaatccgagagctctgggacaggttgcaaatacctgaagaagaaagagaagctgtggccaccattatgtctgggtcaaaggccaaggtccggaaagcgctgcaattagaagtggatcggttggaagaactgaaaatgcaaaacatgaagaaagtgattgaggcaattcgagtggagctggttcagtactgggaccagtgcttttatagccaggagcagagacaagcttttgcccctttctgtgctgaggactacacagaaagtctgctccagctccacgatgctgagattgtgcggttaaaaaactactatgaagttcacaaggaactctttgaaggtgtccagaagtgggaagaaacctggaggcttttcttagagtttgagagaaaagcttcagatccaaatcgatttacaaaccgaggaggaaatcttctaaaagaagaaaaacaacgagccaagctccagaaaatgctgcccaagctggaagaagagttgaaggcacgaattgaattgtgggaacaggaacattcaaaggcatttatggtgaatgggcagaaattcatggagtatgtggcagaacaatgggagatgcatcgattggagaaagagagagccaagcaggaaagacaactgaagaacaaaaaacagacagagacagagatgctgtatggcagcgctcctcgaacacctagcaagcggcgaggactggctcccaatacaccgggcaaagcacgtaagctgaacactaccaccatgtccaatgctacggccaatagtagcattcggcctatctttggagggacagtctaccactcccccgtgtctcgacttcctccttctggcagcaagccagtcgctgcttccacctgttcagggaagaaaacaccccgtactggcaggcatggagccaacaaggagaacctggagctcaacggcagcatcctgagtggtgggtaccctggctcggcccccctccagcgcaacttcagcattaattctgttgccagcacctattctgagtttgcgcgagaactttcaaaggcttccaaatctgatgctacttctggaatcctcaattcaaccaacatccagtcctgagaagccctgatcagtcaaccagctgtggcttcctgtgcctagactggacctaattatatgggggtgactttagtttttcttcagcttaggcgtgcttgaaaccttggccaggttccatgaccatgggcctaacttaaagatgtgaatgagtgttacagttgaaagcccatcataggtttagtggtcctaggagacttggttttgacttatatacatgaaaagtttatggcaagaagtgcaaattttagcatatggggcctgacttctctaccacataattctacttgctgaagcatgatcaaagcttgttttatttcaccactgtaggaaaatgattgactatgcccatccctgggggtaattttggcatgtatacctgtaactagtaattaacatcttttttgtttaggcatgttcaattaatgctgtagctatcatagctttgctcttacctgaagccttgtccccaccacacaggacagccttcctcctgaagagaatgtctttgtgtgtccgaagttgagatggcctgccctactgccaaagaggtgacaggaaggctgggagcagctttgttaaattgtgttcagttctgttacacagtgcattgccctttgttgggggtatgcatgtatgaacacacatgcttgtcggaacgctttctcggcgtttgtcccttggctctcatctcccccattcctgtgcctactttgcctgagttcttctacccccgcagttgccagccacattgggagtctgtttgttccaatgggttgagctgtctttgtcgtggagatctggaactttgcacatgtcactactggggaggtgttcctgctctagcttccacgatgaggcgccctctttacctatcctctcaatcactactcttcttgaagcactattatttattcttccgctgtctgcctgcagcagtactactgtcaacatagtgtaaatggttctcaaaagcttaccagtgtggacttggtgttagccacgctgtttactcatacagtacgtgtcctgtttttaaaatatacaattattcttaaaaataaattaaaatctgtatacttacatttcaaaaaga

SEQ ID NO: 25258 - protein, 606 aa, Homo sapiens
MRRSEVLAEESIVCLQKALNHLREIWELIGIPEDQRLQRTEVVKKHIKELLDMMIAEEESLKERLIKSISVCQKELNTLCSELHVEPFQEEGETTILQLEKDLRTQVELMRKQKKERKQELKLLQEQDQELCEILCMPHYDIDSASVPSLEELNQFRQHVTTLRETKASRREEFVSIKRQIILCMEALDHTPDTSFERDVVCEDEDAFCLSLENIATLQKLLRQLEMQKSQNEAVCEGLRTQIRELWDRLQIPEEEREAVATIMSGSKAKVRKALQLEVDRLEELKMQNMKKVIEAIRVELVQYWDQCFYSQEQRQAFAPFCAEDYTESLLQLHDAEIVRLKNYYEVHKELFEGVQKWEETWRLFLEFERKASDPNRFTNRGGNLLKEEKQRAKLQKMLPKLEEELKARIELWEQEHSKAFMVNGQKFMEYVAEQWEMHRLEKERAKQERQLKNKKQTETEMLYGSAPRTPSKRRGLAPNTPGKARKLNTTTMSNATANSSIRPIFGGTVYHSPVSRLPPSGSKPVAASTCSGKKTPRTGRHGANKENLELNGSILSGGYPGSAPLQRNFSINSVASTYSEFARELSKASKSDATSGILNSTNIQS

SEQ ID NO: 25259 - DNA, 1783 bp, Homo sapiens
cgtactgtatgagtaaacagcgtggctaacaccaagtccacactggtaagcttttgagaaccatttacactatgttgacagtagtactgctgcaggcagacagcggaagaataaataatagtgcttcaagaagagtagtgattgagaggataggtaaagagggcgcctcatcgtggaagctagagcaggaacacctccccagtagtgacatgtgcaaagttccagatctccacgacaaagacagctcaacccattggaacaaacagactcccaatgtggctggcaactgcgggggtagaagaactcaggcaaagtaggcacaggaatgggggagatgagagccaagggacaaacgccgagaaagcgttccgacaagcatgtgtgttcatacatgcatacccccaacaaagggcaatgcactgtgtaacagaactgaacacaatttaacaaagctgctcccagccttcctgtcacctctttggcagtagggcaggccatctcaacttcggacacacaaagacattctcttcaggaggaaggctgtcctgtgtggtggggacaaggcttcagttgcaagatggtcgtctctccttcttcctgaataagacaacgtaccactgttataagattccaagtgaattccttcagaggaagagaaggacaacataagaaggcgtggatgacagactttcagttaaactaacaaagaaagaacactgcagcaccatctatgcctacctttttctcagcgtttataaaaaaaaattcatattccctacaaagcaaaactatggtataacaggacaactaagactgccctggcaccagagaaactacaatctagatgtgctctgcttccagtcggccgagaagcctgcagcaaatcacctaaacacttaaggtctttgtgtgccatccacacccaactgcaactagagactttcattagcccctttctgtctcagagctttcggtggttctacaagtcaccagcctggatctctaacaatgtgtctctccaaagctgttaatacattcacatccaaaatatctccagccacgaaatcctagtttagaggttgcccgtccttgttgaagaaacatttctacacaaatacctgttgcctataccagatggccataccaatacccaaatactgacaaacgtttaaaagaatttacggtactcccttcactttagaaatgttaacagttcaagtccaacagaacttaaaggaaaaaaagagaaatgttaacagtaagtaaggcatttatttaacataatctcaactaaagtccaactaaagagcttccccaggcaaacactccttttgcacttcattttgaagacaaaagaatgcacaagttaaaatcctaatattaccattttattaaaaataacttttaagatccaatctgtggccaatattcgatctggatgcaaaaccctggcttccagacaggccagccaggggcactgctctgaaggtcattacttaagtatcccagtctcctcagtctgacagacctacccctgcccagccaatctccacataacagctagttgttcataataaatcccatcagatccccgcttaactactccccttcaaaggctccactgccctcaggaaatagttcaaccaccttctgtagaaaggccttctaaaacctctctccgagtctgtctgctaatctctcccacttgacactccccaggtctctggccagctgaacttcccgggcatttcctgaacaatgcccctcaataaaccacatgcaa

SEQ ID NO: 25260 - protein, 81 aa, Homo sapiens [sequence omitted]

SEQ ID NO: 25261 - DNA, 1482 bp, Homo sapiens
gcggtttgaaattttgcggggctcaacggctcgcggagcggctacgcggagtgacatcgccggtgtttgcgggtggttgttgctctcggggccgtgtggagtaggtctggacctggactcacggctgcttggagcgtccgccatgaggagaagtgaggtgctggcggaggagtccatagtatgtctgcagaaagccctaaatcaccttcgggaaatatgggagctaattgggattccagaggaccagcggttacaaagaactgaggtggtaaagaagcatatcaaggaactcctggatatgatgattgctgaagaggaaagcctgaaggaaagactcatcaaaagcatatccgtctgtcagaaagagctgaacactctgtgcagcgagttacatgttgagccatttcaggaagaaggagagacgaccatcttgcaactagaaaaagatttgcgcacccaagtggaattgatgcgaaaacagaaaaaggagagaaaacaggaactgaagctacttcaagagcaagatcaagaactgtgcgaaattctttgtatgccccactatgatattgacagtgcctcagtgcccagcttagaagagctgaaccagttcaggcaacatgtgacaactttgagggaaacaaaggtacactgcctacatttgttcttcctaaaagtcactttggttttcctctaggtatcttgtaattgctttgttttaaaggcttctaggcgtgaggagtttgtcagtataaagagacagatcatactgtgtatggaagcattagaccacaccccagacacaagctttgaaagagatgtggtgtgtgaagacgaagatgccttttgtttgtctttggagaatattgcaacactacaaaagttgctacggcaggtactgtcttctcaaattatgccctaggatctccgtagtatatagcagtttgaacaaaactgacagctgtttcttcagtcttaaataaggagacaatgtaaggtaagagaatgagggaagctaaggatagtaatatatgatatacaaccttgatttttgtttaacagttaaaaaacctttatatggctccaagaaaatgaaattatagatgaaataatattagtcatttgaattagactagtgtttaattaaaatttttttcagttctaaatttgaatgctaattcttggggtctgagatcccgacagccttacagctcgtgtttaggaggcatgaaaacatgctactttgaactctcatgaaagtgcctcctcctctactccagacatttctttgcgggaggctagagggctagcctctgtgctgctgctttgccgtgagtgacactggctttctatgctgtagctggaaatgcagaaatcacaaaatgaagcagtgtgtgaggggctgcgtactcaaatccgagagctctgggacaggttgcaaatacctgaagaagaaagagaagctgtggccaccattatgtctgg

SEQ ID NO: 25262 - protein, 183 aa, Homo sapiens
MRRSEVLAEESIVCLQKALNHLREIWELIGIPEDQRLQRTEVVKKHIKELLDMMIAEEESLKERLIKSISVCQKELNTLCSELHVEPFQEEGETTILQLEKDLRTQVELMRKQKKERKQELKLLQEQDQELCEILCMPHYDIDSASVPSLEELNQFRQHVTTLRETKVHCLHLFFLKVTLVFL

SEQ ID NO: 25263 - DNA, 468 bp, Homo sapiens
gcggtttgaaattttgcggggctcaacggctcgcggagcggctacgcggagtgacatcgccggtgtttgcgggtggttgttgctctcggggccgtgtggagtaggtctggacctggactcacggctgcttggagcgtccgccatgaggagaagtgaggtgctggcggaggagtccatagtatgtctgcagaaagccctaaatcaccttcgggaaatatgggagctaattgggattccagaggaccagcggttacaaagaactgaggtggtaaagaagcatatcaaggaactcctggatatgatgattgctgaagaggaaagcctgaaggaaagactcatcaaaagcatatccgtctgtcagaaagagctgaacactctgtgcagcgagttacatgttgagccatttcaggaattcacttggaatcttataacagtggtacgttgtcttattcaggaagaaggagagac

SEQ ID NO: 25264 - protein, 107 aa, Homo sapiens
MRRSEVLAEESIVCLQKALNHLREIWELIGIPEDQRLQRTEVVKKHIKELLDMMIAEEESLKERLIKSISVCQKELNTLCSELHVEPFQEFTWNLITVVRCLIQEEG

SEQ ID NO: 25265 - DNA, 458 bp, Homo sapiens
agtagctgggattacaggtgctcaccaccatgcccggctaatttttttatttttagtagagacggaggttcaccatgttgatcaggctggtcttgaactcctgacctcaagcaatccatgcgcctcggcctcccaaagtgctgggattattgaagccaggagttcgagaccagcctggccaacatagaccgcgtttccacaaaaataaaaaaaaagaataaaacaaagaaaaacaacgataaataaacttaacagctttaaagaaaagccacgaccacagaaggtttacaacgagtcatctgcgccaagcagcggcacctgagacgctgcgggcggggagggtggggtccgagcgccagcgctgaccgcctgggtggaggccgccccgggccccgggcctcgactaccctgccgcgtccgggcaccggcgctcggctcccacccgggcgtctgagcct

SEQ ID NO: 25266 - protein, 61 aa, Homo sapiens
VAGITGAHHHARLIFLFLVETEVHHVDQAGLELLTSSNPCASASQSAGIIEARSSRPAWPT

SEQ ID NO: 25267 - DNA, 871 bp, Homo sapiens
gatcccacgtgtggacggcgagtatgatctgaaagtgccccgagacatggcttacgtcttcggtggtgcttatgtgcccctgagctgctcaactgcagtgactttgcattcacagatatgactaaggaagacaaggcttccagtgagtccctgcgcctcatcttggtggtgttcttgggtggttgtacattctctgagatctcagccctccggttcctgggcagagagaaaggctacaggttcattttcctgacgacagcagtcacaaacagcgctcgccttatggaggccatgagtgaggtgaaagcctgatgtttttcccggccagtgttgacatcttccctgaacacattcctcagtgagatgcaggcatctggcacccagctgctataaccaagtgtccaccaactacctgctaagagccgggagcatggaacgtgttgggatttagagaacattatctgagaaaagagttcacttcctgctcccaggatatttctcttttctgtttatgaagtacaacccatgctgctaagatgcgagcaggaagaggcatcctttgctaaatcctgtttgaatgtcattgtaaataaagcctctgctctcagatgtaatacgttggtcgttctggacacgcacttccatctttattagtgaaagcccattggagcttgctacaggggcttcctgtgcttcttggcctggactttgtagtggctccaggcctggtctggttcttccctgtaaaaatcactctaccactctgtacctgagtttcctctaccataaaatgagggagatggctgaggtgaccagcaagcacgtttccagttctaaaatgttgtgattcattacatttttgagaaaatga

SEQ ID NO: 25268 - protein, 64 aa, Homo sapiens
MTKEDKASSESLRLILVVFLGGCTFSEISALRFLGREKGYRFIFLTTAVTNSARLMEAMSEVKA

SEQ ID NO: 25269 - DNA, 2685 bp, Homo sapiens
tttttctggtagaaggcggggttctcctcgtacgctgcggagtctctgcggggtgtagaccggaatcctgctgacgggcagagtggatcagggagggagggtcgagacacggtggctgcaggtctgagacaaggctgctccgaggtagtagctctcttgcctggaggtggccattcattcctggagtgctgctgaggagcgagggcccatctggggtctctggaagtcggtgcccaggcctgaaggatagccccccttgcgcttccctgggctgcggccggccttctcagaacgaagggcgtccttccaccccgcggcgcaggtgaccgctgccatggcttttccccatcggccggacgcccctgagctgcctgacttctccatgctgaagaggctggctcgagaccagctcatctatctgctggagcagcttcctggaaaaaaggatttattcattgaggcagatctcatgagccctttggatcgaattgccaatgtctccatcctgaagattgtgcttcttggtcagaccccgcatcaagaatatgcgatacattgccagtcttgtcaatgctgacaaattggctggccgaactcgcaaatacaaagtgatcttcagccctcaaaagttctatgcgtgtgagatggtgcttgaggaagagggaatctatggagatgtgagctgtgatgaatgggccttctctttgctgcctcttgatgtggatctgctgagcatggaactaccagaatttttcagggattactttctggaaggagatcagcgttggatcaacactgtagctcaggccttacaccttctcagcactctctatggaccctttccaaactgctatggaattggcaggtgcgccaagatggcatatgaattgtggaggaacctggaggaggaggaggatggcgaaaccaagggccgaaggccagagattggacatatctttctcttggacagagatgtggactttgtgacagcactttgctcccaagtggtttatgagggcctagtagatgacaccttccgcatcaagtgtgggagtgtcgactttggcccagaagtcacatcctctgacaagagcctgaaggtgctactcaatgccgaggacaaggtgtttaatgagattcggaacgagcacttctccaatgtctttggcttcttgagccagaaggcccggaacttgcaggcccagtatgatcgccggagaggcatggacattaagcagatgaagaatttcgtgtcccaggagctcaagggcctgaaacaggagcaccgcctgctgagtctccatattggggcctgtgaatccatcatgaagaagaaaaccaagcaggatttccaggagctaatcaagactgagcatgcactgctagaggggttcaacatccgggagagcaccagctacattgaggaacacatagaccggcaggtgtcgcctatagaaagcctgcgcctcatgtgccttttgtccatcactgagaatggtttgatccccaaggattaccgatctctgaaaacacagtatctgcagagctatggccctgagcacctgctaaccttctccaatctgcgaagagctgggctcctaacggagcaggcccccggggacaccctcacagccgtggagagtaaagtgagcaagctggtgaccgacaaggctgcaggaaagattactgatgccttcagttctctggccaagaggagcaattttcgtgccatcagcaaaaagctgaatttgatcccacgtgtggacggcgagtatgatctgaaagtgccccgagacatggcttacgtcttcggtggtgcttatgtgcccctgagctgccgaatcattgagcaggtgctagagcggcgaagctggcagggccttgatgaggtggtacggctgctcaactgcagtgactttgcattcacagatatgactaaggaagacaaggcttccagtgagtccctgcgcctcatcttggtggtgttcttgggtggttgtacattctctgagatctcagccctccggttcctgggcagagagaaaggctacaggttcattttcctgacgacagcagtcacaaacagcgctcgccttatggaggccatgagtgaggtgaaagcctgatgtttttcccggccagtgttgacatcttccctgaacacattcctcagtgagatgcaggcatctggcacccagctgctataaccaagtgtccaccaactacctgctaagagccgggagcatggaacgtgttgggatttagagaacattatctgagaaaagagttcacttcctgctcccaggatatttctcttttctgtttatgaagtacaacccatgctgctaagatgcgagcaggaagaggcatcctttgctaaatcctgtttgaatgtcattgtaaataaagcctctgctctcagatgtaatacgttggtcgttctggacacgcacttccatctttattagtgaaagcccattggagcttgctacaggggcttcctgtgcttcttggcctggactttgtagtggctccaggcctggtctggttcttccctgtaaaaatcactctaccactctgtacctgagtttcctctaccataaaatgagggagatggctgaggtgaccagcaagcacgtttccagttctaaaatgttgtgattcattacatttttgagaaaatga

SEQ ID NO: 25270 - protein, 526 aa, Homo sapiens
MRYIASLVNADKLAGRTRKYKVIFSPQKFYACEMVLEEEGIYGDVSCDEWAFSLLPLDVDLLSMELPEFFRDYFLEGDQRWINTVAQALHLLSTLYGPFPNCYGIGRCAKMAYELWRNLEEEEDGETKGRRPEIGHIFLLDRDVDFVTALCSQVVYEGLVDDTFRIKCGSVDFGPEVTSSDKSLKVLLNAEDKVFNEIRNEHFSNVFGFLSQKARNLQAQYDRRRGMDIKQMKNFVSQELKGLKQEHRLLSLHIGACESIMKKKTKQDFQELIKTEHALLEGFNIRESTSYIEEHIDRQVSPIESLRLMCLLSITENGLIPKDYRSLKTQYLQSYGPEHLLTFSNLRRAGLLTEQAPGDTLTAVESKVSKLVTDKAAGKITDAFSSLAKRSNFRAISKKLNLIPRVDGEYDLKVPRDMAYVFGGAYVPLSCRIIEQVLERRSWQGLDEVVRLLNCSDFAFTDMTKEDKASSESLRLILVVFLGGCTFSEISALRFLGREKGYRFIFLTTAVTNSARLMEAMSEVKA

SEQ ID NO: 25271 - DNA, 2759 bp, Homo sapiens
ggaagtcgcttctttttctggtagaaggcggggttctcctcgtacgctgcggagtctctgcggggtgtagaccggaatcctgctgacgggcagagtggatcagggagggagggtcgagacacggtggctgcaggtctgagacaaggctgctccgaggtagtagctctcttgcctggaggtggccattcattcctggagtgctgctgaggagcgagggcccatctggggtctctggaagtcggtgcccaggcctgaaggatagccccccttgcgcttccctgggctgcggccggccttctcagaacgaagggcgtccttccaccccgcggcgcaggtgaccgctgccatggcttttccccatcggccggacgcccctgagctgcctgacttctccatgctgaagaggctggctcgagaccagctcatctatctgctggagcagcttcctggaaaaaaggatttattcattgaggcagatctcatgagccctttggatcgaattgccaatgtctccatcctgaagcaacacgaagtagacaagctatacaaggtggagaacaagccagccctcagctccaatgaacaattgtgcttcttggtcagaccccgcatcaagaatatgcgatacattgccagtcttgtcaatgctgacaaattggctggccgaactcgcaaatacaaagtgatcttcagccctcaaaagttctatgcgtgtgagatggtgcttgaggaagagggaatctatggagatgtgagctgtgatgaatgggccttctctttgctgcctcttgatgtggatctgctgagcatggaactaccagaatttttcagggattactttctggaaggagatcagcgttggatcaacactgtagctcaggccttacaccttctcagcactctctatggaccctttccaaactgctatggaattggcaggtgcgccaagatggcatatgaattgtggaggaacctggaggaggaggaggatggcgaaaccaagggccgaaggccagagattggacatatctttctcttggacagagatgtggactttgtgacagcactttgctcccaagtggtttatgagggcctagtagatgacaccttccgcatcaagtgtgggagtgtcgactttggcccagaagtcacatcctctgacaagagcctgaaggtgctactcaatgccgaggacaaggtgtttaatgagattcggaacgagcacttctccaatgtctttggcttcttgagccagaaggcccggaacttgcaggcccagtatgatcgccggagaggcatggacattaagcagatgaagaatttcgtgtcccaggagctcaagggcctgaaacaggagcaccgcctgctgagtctccatattggggcctgtgaatccatcatgaagaagaaaaccaagcaggatttccaggagctaatcaagactgagcatgcactgctagaggggttcaacatccgggagagcaccagctacattgaggaacacatagaccggcaggtgtcgcctatagaaagcctgcgcctcatgtgccttttgtccatcactgagaatggtttgatccccaaggattaccgatctctgaaaacacagtatctgcagagctatggccctgagcacctgctaaccttctccaatctgcgaagagctgggctcctaacggagcaggcccccggggacaccctcacagccgtggagagtaaagtgagcaagctggtgaccgacaaggctgcaggaaagattactgatgccttcagttctctggccaagaggagcaattttcgtgccatcagcaaaaagctgaatttgatcccacgtgtggacggcgagtatgatctgaaagtgccccgagacatggcttacgtcttcggtggtgcttatgtgcccctgagctgccgaatcattgagcaggtgctagagcggcgaagctggcagggccttgatgaggtggtacggctgctcaactgcagtgactttgcattcacagatatgactaaggaagacaaggcttccagtgagtccctgcgcctcatcttggtggtgttcttgggtggttgtacattctctgagatctcagccctccggttcctgggcagagagaaaggctacaggttcattttcctgacgacagcagtcacaaacagcgctcgccttatggaggccatgagtgaggtgaaagcctgatgtttttcccggccagtgttgacatcttccctgaacacattcctcagtgagatgcaggcatctggcacccagctgctataaccaagtgtccaccaactacctgctaagagccgggagcatggaacgtgttgggatttagagaacattatctgagaaaagagttcacttcctgctcccaggatatttctcttttctgtttatgaagtacaacccatgctgctaagatgcgagcaggaagaggcatcctttgctaaatcctgtttgaatgtcattgtaaataaagcctctgctctcagatgtaatacgttggtcgttctggacacgcacttccatctttattagtgaaagcccattggagcttgctacaggggcttcctgtgcttcttggcctggactttgtagtggctccaggcctggtctggttcttccctgtaaaaatcactctaccactctgtacctgagtttcctctaccataaaatgagggagatggctgaggtgaccagcaagcacgtttccagttctaaaatgttgtgattcattacatttttgagaaaatga

SEQ ID NO: 25272 - protein, 617 aa, Homo sapiens
MAFPHRPDAPELPDFSMLKRLARDQLIYLLEQLPGKKDLFIEADLMSPLDRIANVSILKQHEVDKLYKVENKPALSSNEQLCFLVRPRIKNMRYIASLVNADKLAGRTRKYKVIFSPQKFYACEMVLEEEGIYGDVSCDEWAFSLLPLDVDLLSMELPEFFRDYFLEGDQRWINTVAQALHLLSTLYGPFPNCYGIGRCAKMAYELWRNLEEEEDGETKGRRPEIGHIFLLDRDVDFVTALCSQVVYEGLVDDTFRIKCGSVDFGPEVTSSDKSLKVLLNAEDKVFNEIRNEHFSNVFGFLSQKARNLQAQYDRRRGMDIKQMKNFVSQELKGLKQEHRLLSLHIGACESIMKKKTKQDFQELIKTEHALLEGFNIRESTSYIEEHIDRQVSPIESLRLMCLLSITENGLIPKDYRSLKTQYLQSYGPEHLLTFSNLRRAGLLTEQAPGDTLTAVESKVSKLVTDKAAGKITDAFSSLAKRSNFRAISKKLNLIPRVDGEYDLKVPRDMAYVFGGAYVPLSCRIIEQVLERRSWQGLDEVVRLLNCSDFAFTDMTKEDKASSESLRLILVVFLGGCTFSEISALRFLGREKGYRFIFLTTAVTNSARLMEAMSEVKA

SEQ ID NO: 25273 - DNA, 612 bp, Homo sapiens
gatcccacgtgtggacggcgagtatgatctgaaagtgccccgagacatggcttacgtcttcggtggtgcttatgtgcccctgagctgctcaactgcagtgactttgcattcacagatatgactaaggaagacaaggcttccagtgagtccctgcgcctcatcttggtggtgttcttgggtggttgtacattctctgagatctcagccctccggttcctgggcagagagaaaggctacaggttcattttcctgacgacagcagtcacaaacagcgctcgccttatggaggccatgagtgaggtgaaagcctgatgtttttcccggccagtgttgacatcttccctgaacacattcctcagtgagatgcaggcatctggcacccagctgctataaccaagtgtccaccaactacctgctaagagccgggagcatggaacgtgttgggatttagagaacattatctgagaaaagagttcacttcctgctcccaggatatttctcttttctgtttatgaagtacaacccatgctgctaagatgcgagcaggaagaggcatcctttgctaaatcctgtttgaatgtcattgtaaataaagcctctgctctcagatgt

SEQ ID NO: 25274 - protein, 64 aa, Homo sapiens; identical to SEQ ID NO: 25268

SEQ ID NO: 25275 - DNA, 2426 bp, Homo sapiens
tttttctggtagaaggcggggttctcctcgtacgctgcggagtctctgcggggtgtagaccggaatcctgctgacgggcagagtggatcagggagggagggtcgagacacggtggctgcaggtctgagacaaggctgctccgaggtagtagctctcttgcctggaggtggccattcattcctggagtgctgctgaggagcgagggcccatctggggtctctggaagtcggtgcccaggcctgaaggatagccccccttgcgcttccctgggctgcggccggccttctcagaacgaagggcgtccttccaccccgcggcgcaggtgaccgctgccatggcttttccccatcggccggacgcccctgagctgcctgacttctccatgctgaagaggctggctcgagaccagctcatctatctgctggagcagcttcctggaaaaaaggatttattcattgaggcagatctcatgagccctttggatcgaattgccaatgtctccatcctgaagattgtgcttcttggtcagaccccgcatcaagaatatgcgatacattgccagtcttgtcaatgctgacaaattggctggccgaactcgcaaatacaaagtgatcttcagccctcaaaagttctatgcgtgtgagatggtgcttgaggaagagggaatctatggagatgtgagctgtgatgaatgggccttctctttgctgcctcttgatgtggatctgctgagcatggaactaccagaatttttcagggattactttctggaaggagatcagcgttggatcaacactgtagctcaggccttacaccttctcagcactctctatggaccctttccaaactgctatggaattggcaggtgcgccaagatggcatatgaattgtggaggaacctggaggaggaggaggatggcgaaaccaagggccgaaggccagagattggacatatctttctcttggacagagatgtggactttgtgacagcactttgctcccaagtggtttatgagggcctagtagatgacaccttccgcatcaagtgtgggagtgtcgactttggcccagaagtcacatcctctgacaagagcctgaaggtgctactcaatgccgaggacaaggtgtttaatgagattcggaacgagcacttctccaatgtctttggcttcttgagccagaaggcccggaacttgcaggcccagtatgatcgccggagaggcatggacattaagcagatgaagaatttcgtgtcccaggagctcaagggcctgaaacaggagcaccgcctgctgagtctccatattggggcctgtgaatccatcatgaagaagaaaaccaagcaggatttccaggagctaatcaagactgagcatgcactgctagaggggttcaacatccgggagagcaccagctacattgaggaacacatagaccggcaggtgtcgcctatagaaagcctgcgcctcatgtgccttttgtccatcactgagaatggtttgatccccaaggattaccgatctctgaaaacacagtatctgcagagctatggccctgagcacctgctaaccttctccaatctgcgaagagctgggctcctaacggagcaggcccccggggacaccctcacagccgtggagagtaaagtgagcaagctggtgaccgacaaggctgcaggaaagattactgatgccttcagttctctggccaagaggagcaattttcgtgccatcagcaaaaagctgaatttgatcccacgtgtggacggcgagtatgatctgaaagtgccccgagacatggcttacgtcttcggtggtgcttatgtgcccctgagctgccgaatcattgagcaggtgctagagcggcgaagctggcagggccttgatgaggtggtacggctgctcaactgcagtgactttgcattcacagatatgactaaggaagacaaggcttccagtgagtccctgcgcctcatcttggtggtgttcttgggtggttgtacattctctgagatctcagccctccggttcctgggcagagagaaaggctacaggttcattttcctgacgacagcagtcacaaacagcgctcgccttatggaggccatgagtgaggtgaaagcctgatgtttttcccggccagtgttgacatcttccctgaacacattcctcagtgagatgcaggcatctggcacccagctgctataaccaagtgtccaccaactacctgctaagagccgggagcatggaacgtgttgggatttagagaacattatctgagaaaagagttcacttcctgctcccaggatatttctcttttctgtttatgaagtacaacccatgctgctaagatgcgagcaggaagaggcatcctttgctaaatcctgtttgaatgtcattgtaaataaagcctctgctctcagatgt

SEQ ID NO: 25276 - protein, 526 aa, Homo sapiens; identical to SEQ ID NO: 25270

SEQ ID NO: 25277 - DNA, 2500 bp, Homo sapiens
ggaagtcgcttctttttctggtagaaggcggggttctcctcgtacgctgcggagtctctgcggggtgtagaccggaatcctgctgacgggcagagtggatcagggagggagggtcgagacacggtggctgcaggtctgagacaaggctgctccgaggtagtagctctcttgcctggaggtggccattcattcctggagtgctgctgaggagcgagggcccatctggggtctctggaagtcggtgcccaggcctgaaggatagccccccttgcgcttccctgggctgcggccggccttctcagaacgaagggcgtccttccaccccgcggcgcaggtgaccgctgccatggcttttccccatcggccggacgcccctgagctgcctgacttctccatgctgaagaggctggctcgagaccagctcatctatctgctggagcagcttcctggaaaaaaggatttattcattgaggcagatctcatgagccctttggatcgaattgccaatgtctccatcctgaagcaacacgaagtagacaagctatacaaggtggagaacaagccagccctcagctccaatgaacaattgtgcttcttggtcagaccccgcatcaagaatatgcgatacattgccagtcttgtcaatgctgacaaattggctggccgaactcgcaaatacaaagtgatcttcagccctcaaaagttctatgcgtgtgagatggtgcttgaggaagagggaatctatggagatgtgagctgtgatgaatgggccttctctttgctgcctcttgatgtggatctgctgagcatggaactaccagaatttttcagggattactttctggaaggagatcagcgttggatcaacactgtagctcaggccttacaccttctcagcactctctatggaccctttccaaactgctatggaattggcaggtgcgccaagatggcatatgaattgtggaggaacctggaggaggaggaggatggcgaaaccaagggccgaaggccagagattggacatatctttctcttggacagagatgtggactttgtgacagcactttgctcccaagtggtttatgagggcctagtagatgacaccttccgcatcaagtgtgggagtgtcgactttggcccagaagtcacatcctctgacaagagcctgaaggtgctactcaatgccgaggacaaggtgtttaatgagattcggaacgagcacttctccaatgtctttggcttcttgagccagaaggcccggaacttgcaggcccagtatgatcgccggagaggcatggacattaagcagatgaagaatttcgtgtcccaggagctcaagggcctgaaacaggagcaccgcctgctgagtctccatattggggcctgtgaatccatcatgaagaagaaaaccaagcaggatttccaggagctaatcaagactgagcatgcactgctagaggggttcaacatccgggagagcaccagctacattgaggaacacatagaccggcaggtgtcgcctatagaaagcctgcgcctcatgtgccttttgtccatcactgagaatggtttgatccccaaggattaccgatctctgaaaacacagtatctgcagagctatggccctgagcacctgctaaccttctccaatctgcgaagagctgggctcctaacggagcaggcccccggggacaccctcacagccgtggagagtaaagtgagcaagctggtgaccgacaaggctgcaggaaagattactgatgccttcagttctctggccaagaggagcaattttcgtgccatcagcaaaaagctgaatttgatcccacgtgtggacggcgagtatgatctgaaagtgccccgagacatggcttacgtcttcggtggtgcttatgtgcccctgagctgccgaatcattgagcaggtgctagagcggcgaagctggcagggccttgatgaggtggtacggctgctcaactgcagtgactttgcattcacagatatgactaaggaagacaaggcttccagtgagtccctgcgcctcatcttggtggtgttcttgggtggttgtacattctctgagatctcagccctccggttcctgggcagagagaaaggctacaggttcattttcctgacgacagcagtcacaaacagcgctcgccttatggaggccatgagtgaggtgaaagcctgatgtttttcccggccagtgttgacatcttccctgaacacattcctcagtgagatgcaggcatctggcacccagctgctataaccaagtgtccaccaactacctgctaagagccgggagcatggaacgtgttgggatttagagaacattatctgagaaaagagttcacttcctgctcccaggatatttctcttttctgtttatgaagtacaacccatgctgctaagatgcgagcaggaagaggcatcctttgctaaatcctgtttgaatgtcattgtaaataaagcctctgctctcagatgt

SEQ ID NO: 25278 - protein, 617 aa, Homo sapiens; identical to SEQ ID NO: 25272

SEQ ID NO: 25279 - DNA, 622 bp, Homo sapiens
caaccatatcctgtgtcacttaagggtagggaaaggagaagccatccctccagcccctttacattattcaataatggcgcatgggaactcattccagagaactggcagttactgaacaaaaactgccatcttccgttatggattctcttttcagggctattgctggttctccctttagttgaaataagaattgttccttgggccatgccactttatctgaccctttaaagggttagggagctgagctgtcacttgcctaatgaagtccctttgtcttacagatcccacgtgtggacggcgagtatgatctgaaagtgccccgagacatggcttacgtcttcggtggtgcttatgtgcccctgagctgccgaatcattgagcaggtgctagagcggcgaagctggcagggccttgatgaggtggtacggctgctcaactgcagtgactttgcattcacagatatgactaaggaagacaaggcttccagtgagtccctgcgcctcatcttggtggtgttcttgggtggttgtacattctctgagatctcagccctccggttcctgggcagagagaaaggtaagagagagcagaaaggtgagaattggcctgcattgtatctggg

SEQ ID NO: 25280 - protein, 97 aa, Homo sapiens
MAYVFGGAYVPLSCRIIEQVLERRSWQGLDEVVRLLNCSDFAFTDMTKEDKASSESLRLILVVFLGGCTFSEISALRFLGREKGKREQKGENWPALY

SEQ ID NO: 25281 - DNA, 4745 bp, Homo sapiens
ggaggaggaaggggcgatcgcggcggcggcggcggcggcgaggagctgtgccttccacctctccagccccggcaggacgggggcggccgccgcgaacccggggcggggacagcacgcagcctcgaggcgcgcacccccgcccggcagcggccccgacacccggggcgagcgggaaagcggcagcggcggcggcggcggcggcggcgggggaaggatgcaggggaagaagccgggcggttcgtcgggcggcggccggagcggcgagctgcagggggacgaggcgcagaggaacaagaaaaagaaaaagaaggtgtcctgcttttccaacatcaagatcttcctggtgtccgagtgcgccctgatgctggcgcagggcacggtgggcgcctacctggtgagcgtcctgaccaccctggagcgtaggttcaacctgcagagcgctgacgtgggtgtgatcgctagcagcttcgagatcgggaacctggcgctcatcctcttcgtgagctacttcggggcacgcgggcaccggccgcgcctgatcggctgcggcggcatcgtcatggcgctgggcgcgctgctgtcggcgctgcccgagttcctgacccaccagtacaagtacgaggcgggcgagatccgctggggcgccgagggccgcgacgtctgcgcagccaacggctcgggcggcgacgaggggcccgaccccgacctcatctgccgcaaccggacggctaccaacatgatgtacttgctgctcattggggcccaggtgctcctgggcatcggtgctacccctgtgcagcccctgggcgtctcctacatcgacgaccacgtgcggaggaaggactcctcgctctatataggaatcctgttcacgatgctggtatttggaccagcctgcgggtttatcctgggctctttctgtaccaaaatctacgtggatgcggtcttcattgacacaagtaacctggacatcactccggacgacccccgctggatcggagcctggtggggtggctttctgctctgcggtgccttactcttcttctcttccctcttgatgtttgggtttccacagtccctgcccccgcactcagagcccgccatggaaagcgagcaggccatgctctccgaaagagaatacgagagacccaagcccagcaacggggtcctgaggcaccccctggagccagacagcagtgcctcctgtttccagcagctgagagtgatcccgaaggtcaccaagcacctgctctcaaaccctgtgttcacctgcatcatcctggccgcctgcatggagattgcagtggtggctggcttcgctgcctttttggggaagtacctggagcagcagtttaacctcaccacctcttctgccaaccagctgcttgggatgactgcgatcccgtgtgcttgtctgggtatcttcctgggaggtcttttggtgaagaagctcagcctgtctgccctgggggccattcggatggccatgctcgtcaacctggtgtccactgcttgctacgtctccttcctcttcctgggctgcgacactggccctgtggctggggttactgttccctatggaaacagcacagcacctggctcagccctggacccctactcgccctgcaataataactgtgaatgccaaaccgattccttcactccagtgtgtggggcagatggcatcacctacctgtctgcctgctttgctggctgcaacagcacgaatctcacgggctgtgcgtgcctcaccaccgtccctgctgagaacgcaaccgtggttcctggaaaatgccccagtcctgggtgccaagaggccttcctcactttcctctgtgtgatgtgtatctgcagcctgatcggtgccatggcacagacaccctcagtcatcatcctcatcaggacagtcagccctgaactcaagtcttacgctttgggagttctttttctcctccttcgtttgttgggcttcatccctccacccctcatcttcggggctggcatcgactccacctgcctgttctggagcacgttctgtggggagcaaggcgcctgcgtcctctacgacaatgtggtctaccgatacctgtatgtcagcatcgccatcgcgctcaaatccttcgccttcatcctgtacaccaccacgtggcagtgcctgaggaaaaactataaacgctacatcaaaaaccacgagggcgggctgagcaccagtgagttctttgcctctactctgaccctagacaacctggggagggaccctgtgcccgcaaaccagacacataggacaaagtttatctataacctggaagaccatgagtggtgtgaaaacatggagtccgttttatagtgactaaaggagggctgaactctgtattagtaatccaagggtcatttttttcttaaaaaaagaaaaaaaggttccaaaaaaaaccaaaactcagtacacacacacaggcacagatgcacacacacgcagacagacacaccgactttgtcctttttctcagcatcagagccagacaggattcagaataaggagagaatgacatcgtgcggcagggtcctggaggccacttgcgcggctgggccacagagtctactttgaaggcacctcatggttttcaggatgctgacagctgcaagcaacaggcactgccaaattcagggaacagtggtggccagcttggaggatggacatttctggatacacatacacatacaaaacagaaaacattttttaaaagaagtttcctaaaataaaaaaaattaaaaaaaaaaaacccacaagttgaaaacattgccagattaagcactagtgacacaccccgtgccaccctcttcctccaggtgggggtgggggcgggcgcacaagtcggaggggtggaagcaccactcctctctctgactttcgcaatatgggtcactgtgtagacgactcacccagtctgcatgtggttcaaggccccagagttctctcagtgatgctaatgggtgatccgtgctggagtttgtaattggcacctctcaccagctccatttccatgttcaagactgagggcctgagggggagccaggtggggggccagcacctcccagtggcgggcatccaccttcccccagccccacagagtgacctcaggaagcagtaggcctcgcctggctatgactgacccggctcagagctggtgagacccaacgcagtccaagtcatttgcttacatttgccaaaaacattttgccatttttaaaagaaaaaaatacaatccatatgaatttcaaactgttgtatgtataatcctctaatactatttttaactacttctaaaatctgtgttaacccttcaagtcactaacacagttctctaggccggatttattatgctggttgcttttactttttttctccttttttaatgcaccaaaaatatgtgatacaagggatgcaattaacctattgtaattttcatcattttatcctcattcgaatattctacaaaaacaagaatatacaatgtgttacaagaagaaaaaaaaatgcttcaaaaagagagtgtatatgcagcctgcctttaaaagaatcacatttgagacaacaggggataatgtgatgaattgcaaatttgccttttagcttccttccccatgattcagtgatcactgtcacgggaaacccttttatattcatgcttgacattccaagaggcgttcttttcagcctgtggaggagacactcttagatgtgggtttgtgtgtatgggtgcaacacttccggggataggaaagaagaacagttccctaacacaagctgttaagaagtctgtagcatctctgataacgaatagacccacaagctcctggaagctgtcgtgtgtccaatgcgtgaaaatgtctgtgacattttcagtgttagtcttgaactaaggcccttgtctgtgtgttttgaaggtgggtgaacctcagagaatgaacctgttatgatttggggtaagaatcacgttggaaaacctctcgcaaccagcacactaggccttctacggccatttctgtaaggggacagagcttaggtaaaggcacacactcatacacacacaacaaagggccctgctaacttactcctcatgctgcttcagtgacctttgttcatgtcacattcctggcgctggaaaaaaaactcaaaggttgattggtttgctttttcaccttggacacatttgcattttacccacaaggcaaacaaaagaatcaggaagtaaaaaatggttgggagtgggacaggtatggtaccgaatttttaatgaacattgtaaatgaagaggcttgaatgacagcccaaatctagagaaggcactcagcaagaccaaccaaaagaaaagctgtgtcgtggtatggggccaccgtgatcagctacctggggcaggatgcttctgagacaggcctttcaactgcttagtgttagtatgtccttgcttatgaaaatggggacactcatcagtacgttaactactaaaggggagatggttctccaaccacttcataaaatatgtatgttctgttgttcctaaggctttgataatatcctgtacagattttggtttagttttgcaaatatattgctaataggtcactcttatagattattgcttggcccttcaaactcagtacacacacactgaggccctttgacctagtgttttatggaactatttgctttgagagaaaaaaaaaagaaagttttttaaactctt

SEQ ID NO: 25282 - protein, 710 aa, Homo sapiens
MQGKKPGGSSGGGRSGELQGDEAQRNKKKKKKVSCFSNIKIFLVSECALMLAQGTVGAYLVSVLTTLERRFNLQSADVGVIASSFEIGNLALILFVSYFGARGHRPRLIGCGGIVMALGALLSALPEFLTHQYKYEAGEIRWGAEGRDVCAANGSGGDEGPDPDLICRNRTATNMMYLLLIGAQVLLGIGATPVQPLGVSYIDDHVRRKDSSLYIGILFTMLVFGPACGFILGSFCTKIYVDAVFIDTSNLDITPDDPRWIGAWWGGFLLCGALLFFSSLLMFGFPQSLPPHSEPAMESEQAMLSEREYERPKPSNGVLRHPLEPDSSASCFQQLRVIPKVTKHLLSNPVFTCIILAACMEIAVVAGFAAFLGKYLEQQFNLTTSSANQLLGMTAIPCACLGIFLGGLLVKKLSLSALGAIRMAMLVNLVSTACYVSFLFLGCDTGPVAGVTVPYGNSTAPGSALDPYSPCNNNCECQTDSFTPVCGADGITYLSACFAGCNSTNLTGCACLTTVPAENATVVPGKCPSPGCQEAFLTFLCVMCICSLIGAMAQTPSVIILIRTVSPELKSYALGVLFLLLRLLGFIPPPLIFGAGIDSTCLFWSTFCGEQGACVLYDNVVYRYLYVSIAIALKSFAFILYTTTWQCLRKNYKRYIKNHEGGLSTSEFFASTLTLDNLGRDPVPANQTHRTKFIYNLEDHEWCENMESVL

SEQ ID NO: 25283 - DNA, 5119 bp, Homo sapiens
ggaggaggaaggggcgatcgcggcggcggcggcggcggcgaggagctgtgccttccacctctccagccccggcaggacgggggcggccgccgcgaacccggggcggggacagcacgcagcctcgaggcgcgcacccccgcccggcagcggccccgacacccggggcgagcgggaaagcggcagcggcggcggcggcggcggcggcgggggaaggatgcaggggaagaagccgggcggttcgtcgggcggcggccggagcggcgagctgcagggggacgaggcgcagaggaacaagaaaaagaaaaagaaggtgtcctgcttttccaacatcaagatcttcctggtgtccgagtgcgccctgatgctggcgcagggcacggtgggcgcctacctggtgagcgtcctgaccaccctggagcgtaggttcaacctgcagagcgctgacgtgggtgtgatcgctagcagcttcgagatcgggaacctggcgctcatcctcttcgtgagctacttcggggcacgcgggcaccggccgcgcctgatcggctgcggcggcatcgtcatggcgctgggcgcgctgctgtcggcgctgcccgagttcctgacccaccagtacaagtacgaggcgggcgagatccgctggggcgccgagggccgcgacgtctgcgcagccaacggctcgggcggcgacgaggggcccgaccccgacctcatctgccgcaaccggacggctaccaacatgatgtacttgctgctcattggggcccaggtgctcctgggcatcggtgctacccctgtgcagcccctgggcgtctcctacatcgacgaccacgtgcggaggaaggactcctcgctctatataggaatcctgttcacgatgctggtatttggaccagcctgcgggtttatcctgggctctttctgtaccaaaatctacgtggatgcggtcttcattgacacaagtaacctggacatcactccggacgacccccgctggatcggagcctggtggggtggctttctgctctgcggtgccttactcttcttctcttccctcttgatgtttgggtttccacagtccctgcccccgcactcagagcccgccatggaaagcgagcaggccatgctctccgaaagagaatacgagagacccaagcccagcaacggggtcctgaggcaccccctggagccagacagcagtgcctcctgtttccagcagctgagagtgatcccgaaggtcaccaagcacctgctctcaaaccctgtgttcacctgcatcatcctggccgcctgcatggagattgcagtggtggctggcttcgctgcctttttggggaagtacctggagcagcagtttaacctcaccacctcttctgccaaccagctgcttgggatgactgcgatcccgtgtgcttgtctgggtatcttcctgggaggtcttttggtgaagaagctcagcctgtctgccctgggggccattcggatggccatgctcgtcaacctggtgtccactgcttgctacgtctccttcctcttcctgggctgcgacactggccctgtggctggggttactgttccctatggaaacagcacagcacctggctcagccctggacccctactcgccctgcaataataactgtgaatgccaaaccgattccttcactccagtgtgtggggcagatggcatcacctacctgtctgcctgctttgctggctgcaacagcacgaatctcacgggctgtgcgtgcctcaccaccgtccctgctgagaacgcaaccgtggttcctggaaaatgccccagtcctgggtgccaagaggccttcctcactttcctctgtgtgatgtgtatctgcagcctgatcggtgccatggcacagacaccctcagtcatcatcctcatcaggacagtcagccctgaactcaagtcttacgctttgggagttctttttctcctccttcgtttgttgggcttcatccctccacccctcatcttcggggctggcatcgactccacctgcctgttctggagcacgttctgtggggagcaaggcgcctgcgtcctctacgacaatgtggtctaccgatacctgtatgtcagcatcgccatcgcgctcaaatccttcgccttcatcctgtacaccaccacgtggcagtgcctgaggaaaaactataaacgctacatcaaaaaccacgagggcgggctgagcaccagtgagttctttgcctctactctgaccctagacaacctggggagggaccctgtgcccgcaaaccagacacataggacaaagtttatctataacctggaagaccatgagtggtgtgaaaacatggagtccgttttatagtgactaaaggagggctgaactctgtattagtaatccaagggtcatttttttcttaaaaaaagaaaaaaaggttccaaaaaaaaccaaaactcagtacacacacacaggcacagatgcacacacacgcagacagacacaccgactttgtcctttttctcagcatcagagccagacaggattcagaataaggagagaatgacatcgtgcggcagggtcctggaggccacttgcgcggctgggccacagagtctactttgaaggcacctcatggttttcaggatgctgacagctgcaagcaacaggcactgccaaattcagggaacagtggtggccagcttggaggatggacatttctggatacacatacacatacaaaacagaaaacattttttaaaagaagtttcctaaaataaaaaaaattaaaaaaaaaaaacccacaagttgaaaacattgccagattaagcactagtgacacaccccgtgccaccctcttcctccaggtgggggtgggggcgggcgcacaagtcggaggggtggaagcaccactcctctctctgactttcgcaatatgggtcactgtgtagacgactcacccagtctgcatgtggttcaaggccccagagttctctcagtgatgctaatgggtgatccgtgctggagtttgtaattggcacctctcaccagctccatttccatgttcaagactgagggcctgagggggagccaggtggggggccagcacctcccagtggcgggcatccaccttcccccagccccacagagtgacctcaggaagcagtaggcctcgcctggctatgactgacccggctcagagctggtgagacccaacgcagtccaagtcatttgcttacatttgccaaaaacattttgccatttttaaaagaaaaaaatacaatccatatgaatttcaaactgttgtatgtataatcctctaatactatttttaactacttctaaaatctgtgttaacccttcaagtcactaacacagttctctaggccggatttattatgctggttgcttttactttttttctccttttttaatgcaccaaaaatatgtgatacaagggatgcaattaacctattgtaattttcatcattttatcctcattcgaatattctacaaaaacaagaatatacaatgtgttacaagaagaaaaaaaaatgcttcaaaaagagagtgtatatgcagcctgcctttaaaagaatcacatttgagacaacaggggataatgtgatgaattgcaaatttgccttttagcttccttccccatgattcagtgatcactgtcacgggaaacccttttatattcatgcttgacattccaagaggcgttcttttcagcctgtggaggagacactcttagatgtgggtttgtgtgtatgggtgcaacacttccggggataggaaagaagaacagttccctaacacaagctgttaagaagtctgtagcatctctgataacgaatagacccacaagctcctggaagctgtcgtgtgtccaatgcgtgaaaatgtctgtgacattttcagtgttagtcttgaactaaggcccttgtctgtgtgttttgaaggtgggtgaacctcagagaatgaacctgttatgatttggggtaagaatcacgttggaaaacctctcgcaaccagcacactaggccttctacggccatttctgtaaggggacagagcttaggtaaaggcacacactcatacacacacaacaaagggccctgctaacttactcctcatgctgcttcagtgacctttgttcatgtcacattcctggcgctggaaaaaaaactcaaaggttgattggtttgctttttcaccttggacacatttgcattttacccacaaggcaaacaaaagaatcaggaagtaaaaaatggttgggagtgggacaggtatggtaccgaatttttaatgaacattgtaaatgaagaggcttgaatgacagcccaaatctagagaaggcactcagcaagaccaaccaaaagaaaagctgtgtcgtggtatggggccaccgtgatcagctacctggggcaggatgcttctgagacaggcctttcaactgcttagtgttagtatgtccttgcttatgaaaatggggacactcatcagtacgttaactactaaaggggagatggttctccaaccacttcataaaatatgtatgttctgttgttcctaaggctttgataatatcctgtacagattttggtttagttttgcaaatatattgctaataggtcactcttatagattattgcttggcccttcaaactcagtacacacacactgaggccctttgacctagtgttttatggaactatttgctttgagagaaaaaaaaaagaaagttttttaaactctttgcattttggattttttttcctaagattttaggatgaatgtgaaaaagatgttagaataacaggaagacaactccagggctgagttttatcagcaattgggtataaatttaaagaccgctgttgcaggatggctctgaattctgttgtgtcgtcttttaaaattttaattattctcatatagtaccgaacagaaaactcagtctagttttaatttgccttttgtgctctaaagaagcattgtacatacaacactagatccagcccctcgattatctgtttggtttcaagtgaatgaaaagatttcctggtaagatcattggatttacagaatacaaaaatgtacgggatggaataaacctagaaagtgaatgct

SEQ ID NO: 25284 - protein, 710 aa, Homo sapiens; identical to SEQ ID NO: 25282

SEQ ID NO: 25285 - DNA, 2866 bp, Homo sapiens
ggaggaggaaggggcgatcgcggcggcggcggcggcggcgaggagctgtgccttccacctctccagccccggcaggacgggggcggccgccgcgaacccggggcggggacagcacgcagcctcgaggcgcgcacccccgcccggcagcggccccgacacccggggcgagcgggaaagcggcagcggcggcggcggcggcggcggcgggggaaggatgcaggggaagaagccgggcggttcgtcgggcggcggccggagcggcgagctgcagggggacgaggcgcagaggaacaagaaaaagaaaaagaaggtgtcctgcttttccaacatcaagatcttcctggtgtccgagtgcgccctgatgctggcgcagggcacggtgggcgcctacctggtgagcgtcctgaccaccctggagcgtaggttcaacctgcagagcgctgacgtgggtgtgatcgctagcagcttcgagatcgggaacctggcgctcatcctcttcgtgagctacttcggggcacgcgggcaccggccgcgcctgatcggctgcggcggcatcgtcatggcgctgggcgcgctgctgtcggcgctgcccgagttcctgacccaccagtacaagtacgaggcgggcgagatccgctggggcgccgagggccgcgacgtctgcgcagccaacggctcgggcggcgacgaggggcccgaccccgacctcatctgccgcaaccggacggctaccaacatgatgtacttgctgctcattggggcccaggtgctcctgggcatcggtgctacccctgtgcagcccctgggcgtctcctacatcgacgaccacgtgcggaggaaggactcctcgctctatataggaatcctgttcacgatgctggtatttggaccagcctgcgggtttatcctgggctctttctgtaccaaaatctacgtggatgcggtcttcattgacacaagtaacctggacatcactccggacgacccccgctggatcggagcctggtggggtggctttctgctctgcggtgccttactcttcttctcttccctcttgatgtttgggtttccacagtccctgcccccgcactcagagcccgccatggaaagcgagcaggccatgctctccgaaagagaatacgagagacccaagcccagcaacggggtcctgaggcaccccctggagccagacagcagtgcctcctgtttccagcagctgagagtgatcccgaaggtcaccaagcacctgctctcaaaccctgtgttcacctgcatcatcctggccgcctgcatggagattgcagtggtggctggcttcgctgcctttttggggaagtacctggagcagcagtttaacctcaccacctcttctgccaaccagctgcttgggatgactgcgatcccgtgtgcttgtctgggtatcttcctgggaggtcttttggtgaagaagctcagcctgtctgccctgggggccattcggatggccatgctcgtcaacctggtgtccactgcttgctacgtctccttcctcttcctgggctgcgacactggccctgtggctggggttactgttccctatggaaacagcacagcacctggctcagccctggacccctactcgccctgcaataataactgtgaatgccaaaccgattccttcactccagtgtgtggggcagatggcatcacctacctgtctgcctgctttgctggctgcaacagcacgaatctcacgggctgtgcgtgcctcaccaccgtccctgctgagaacgcaaccgtggttcctggaaaatgccccagtcctgggtgccaagaggccttcctcactttcctctgtgtgatgtgtatctgcagcctgatcggtgccatggcacagacaccctcagtcatcatcctcatcaggacagtcagccctgaactcaagtcttacgctttgggagttctttttctcctccttcgtttgttgggcttcatccctccacccctcatcttcggggctggcatcgactccacctgcctgttctggagcacgttctgtggggagcaaggcgcctgcgtcctctacgacaatgtggtctaccgatacctgtatgtcagcatcgccatcgcgctcaaatccttcgccttcatcctgtacaccaccacgtggcagtgcctgaggaaaaactataaacgctacatcaaaaaccacgagggcgggctgagcaccagcacagagtaccaagacattgagactgagaaaacctgccccgaatcacattcaccttcagaagactcctttgtgagaagctgagggcctggccctcttcctcttcctggagagaacagcccaccaccacccacagacctcgcgggcctcacttagcgcgctcctccctgtccgagaacccgagggtccccatgtggattatccagccagtgtgtggtcctttgaggccccaagcgcaggcctgtgatgaggaccaaagaggtgacttatggtcaggagtactccaaacagctctcagagtaggcatctttcctgggtctctaaagagtcatgctgacctggtgtgcaaattcccttccacccatccctctacctcctctggggatggcttgccgacatgctttagaaactcccctcttgggaatgctcctctgactgagggctccaacagctttaatgaaatcagccgagagggtaaaaaccaacctgttgcatagaatggaggggggaaaaagcacatactcaatagatttttgagtgtggtactctgtatttttgcagcgtttattttccaaatgagcagtttagaaatatgtgatgtaaagtacatactgtacgtttgctgaaaattatattaaaagcactattttaattctt

SEQ ID NO: 25286 - protein, 692 aa, Homo sapiens
MQGKKPGGSSGGGRSGELQGDEAQRNKKKKKKVSCFSNIKIFLVSECALMLAQGTVGAYLVSVLTTLERRFNLQSADVGVIASSFEIGNLALILFVSYFGARGHRPRLIGCGGIVMALGALLSALPEFLTHQYKYEAGEIRWGAEGRDVCAANGSGGDEGPDPDLICRNRTATNMMYLLLIGAQVLLGIGATPVQPLGVSYIDDHVRRKDSSLYIGILFTMLVFGPACGFILGSFCTKIYVDAVFIDTSNLDITPDDPRWIGAWWGGFLLCGALLFFSSLLMFGFPQSLPPHSEPAMESEQAMLSEREYERPKPSNGVLRHPLEPDSSASCFQQLRVIPKVTKHLLSNPVFTCIILAACMEIAVVAGFAAFLGKYLEQQFNLTTSSANQLLGMTAIPCACLGIFLGGLLVKKLSLSALGAIRMAMLVNLVSTACYVSFLFLGCDTGPVAGVTVPYGNSTAPGSALDPYSPCNNNCECQTDSFTPVCGADGITYLSACFAGCNSTNLTGCACLTTVPAENATVVPGKCPSPGCQEAFLTFLCVMCICSLIGAMAQTPSVIILIRTVSPELKSYALGVLFLLLRLLGFIPPPLIFGAGIDSTCLFWSTFCGEQGACVLYDNVVYRYLYVSIAIALKSFAFILYTTTWQCLRKNYKRYIKNHEGGLSTSTEYQDIETEKTCPESHSPSEDSFVRS

SEQ ID NO: 25287 - DNA, 2339 bp, Homo sapiens
ggtgccgggggaggagaggcggcgggcaggtgggcgtgaaactattcctctccccccataagagcggagcgagacgaataaatatattccagctaagtggacgtggatggttttctgcataaactcttattgttccttgactgatgtcataacactggagatgcatgctccttagatgaatgtgagcgtcctgaccaccctggagcgtaggttcaacctgcagagcgctgacgtgggtgtgatcgctagcagcttcgagatcgggaacctggcgctcatcctcttcgtgagctacttcggggcacgcgggcaccggccgcgcctgatcggctgcggcggcatcgtcatggcgctgggcgcgctgctgtcggcgctgcccgagttcctgacccaccagtacaagtacgaggcgggcgagatccgctggggcgccgagggccgcgacgtctgcgcagccaacggctcgggcggcgacgaggggcccgaccccgacctcatctgccgcaaccggacggctaccaacatgatgtacttgctgctcattggggcccaggtgctcctgggcatcggtgctacccctgtgcagcccctgggcgtctcctacatcgacgaccacgtgcggaggaaggactcctcgctctatataggaatcctgttcacgatgctggtatttggaccagcctgcgggtttatcctgggctctttctgtaccaaaatctacgtggatgcggtcttcattgacacaagtaacctggacatcactccggacgacccccgctggatcggagcctggtggggtggctttctgctctgcggtgccttactcttcttctcttccctcttgatgtttgggtttccacagtccctgcccccgcactcagagcccgccatggaaagcgagcaggccatgctctccgaaagagaatacgagagacccaagcccagcaacggggtcctgaggcaccccctggagccagacagcagtgcctcctgtttccagcagctgagagtgatcccgaaggtcaccaagcacctgctctcaaaccctgtgttcacctgcatcatcctggccgcctgcatggagattgcagtggtggctggcttcgctgcctttttggggaagtacctggagcagcagtttaacctcaccacctcttctgccaaccagctgcttgggatgactgcgatcccgtgtgcttgtctgggtatcttcctgggaggtcttttggtgaagaagctcagcctgtctgccctgggggccattcggatggccatgctcgtcaacctggtgtccactgcttgctacgtctccttcctcttcctgggctgcgacactggccctgtggctggggttactgttccctatggaaacagcacagcacctggctcagccctggacccctactcgccctgcaataataactgtgaatgccaaaccgattccttcactccagtgtgtggggcagatggcatcacctacctgtctgcctgctttgctggctgcaacagcacgaatctcacgggctgtgcgtgcctcaccaccgtccctgctgagaacgcaaccgtggttcctggaaaatgccccagtcctgggtgccaagaggccttcctcactttcctctgtgtgatgtgtatctgcagcctgatcggtgccatggcacagacaccctcagtcatcatcctcatcaggacagtcagccctgaactcaagtcttacgctttgggagttctttttctcctccttcgtttgttgggcttcatccctccacccctcatcttcggggctggcatcgactccacctgcctgttctggagcacgttctgtggggagcaaggcgcctgcgtcctctacgacaatgtggtctaccgatacctgtatgtcagcatcgccatcgcgctcaaatccttcgccttcatcctgcctgtgatgaggaccaaagaggtgacttatggtcaggagtactccaaacagctctcagagtaggcatctttcctgggtctctaaagagtcatgctgacctggtgtgcaaattcccttccacccatccctctacctcctctggggatggcttgccgacatgctttagaaactcccctcttgggaatgctcctctgactgagggctccaacagctttaatgaaatcagccgagagggtaaaaaccaacctgttgcatagaatggaggggggaaaaagcacatactcaatagatttttgagtgtggtactctgtatttttgcagcgtttattttccaaatgagcagtttagaaatatgtgatgtaaagtacatactgtacgtttgctgaaaattatattaaaagcactattttaattcttc

SEQ ID NO: 25288 - protein, 602 aa, Homo sapiens
MNVSVLTTLERRFNLQSADVGVIASSFEIGNLALILFVSYFGARGHRPRLIGCGGIVMALGALLSALPEFLTHQYKYEAGEIRWGAEGRDVCAANGSGGDEGPDPDLICRNRTATNMMYLLLIGAQVLLGIGATPVQPLGVSYIDDHVRRKDSSLYIGILFTMLVFGPACGFILGSFCTKIYVDAVFIDTSNLDITPDDPRWIGAWWGGFLLCGALLFFSSLLMFGFPQSLPPHSEPAMESEQAMLSEREYERPKPSNGVLRHPLEPDSSASCFQQLRVIPKVTKHLLSNPVFTCIILAACMEIAVVAGFAAFLGKYLEQQFNLTTSSANQLLGMTAIPCACLGIFLGGLLVKKLSLSALGAIRMAMLVNLVSTACYVSFLFLGCDTGPVAGVTVPYGNSTAPGSALDPYSPCNNNCECQTDSFTPVCGADGITYLSACFAGCNSTNLTGCACLTTVPAENATVVPGKCPSPGCQEAFLTFLCVMCICSLIGAMAQTPSVIILIRTVSPELKSYALGVLFLLLRLLGFIPPPLIFGAGIDSTCLFWSTFCGEQGACVLYDNVVYRYLYVSIAIALKSFAFILPVMRTKEVTYGQEYSKQLSE

SEQ ID NO: 25289 - DNA, 4072 bp, Homo sapiens
ccttgctttcctaaaacagtgctcttctgtagggctgtccaatgtatgggaacattactgtaggcattaataggcaagggccacacacgtggacacatgtttctgaagtccccactgagattggggtccaggaaaagcagcagcctaaaatttgtggggaaggagcaaggcaggtccacagagggccctcgttatggggtagatggaggagagaaggcggcgtccaccacatagcctggtgccagcattgagaggagaatccagtgaggaagcctggttgaaacttgtaacctggacatcactccggacgacccccgctggatcggagcctggtggggtggctttctgctctgcggtgccttactcttcttctcttccctcttgatgtttgggtttccacagtccctgcccccgcactcagagcccgccatggaaagcgagcaggccatgctctccgaaagagaatacgagagacccaagcccagcaacggggtcctgaggcaccccctggagccagacagcagtgcctcctgtttccagcagctgagagtgatcccgaaggtcaccaagcacctgctctcaaaccctgtgttcacctgcatcatcctggccgcctgcatggagattgcagtggtggctggcttcgctgcctttttggggaagtacctggagcagcagtttaacctcaccacctcttctgccaaccagctgcttgggatgactgcgatcccgtgtgcttgtctgggtatcttcctgggaggtcttttggtgaagaagctcagcctgtctgccctgggggccattcggatggccatgctcgtcaacctggtgtccactgcttgctacgtctccttcctcttcctgggctgcgacactggccctgtggctggggttactgttccctatggaaacagcacagcacctggctcagccctggacccctactcgccctgcaataataactgtgaatgccaaaccgattccttcactccagtgtgtggggcagatggcatcacctacctgtctgcctgctttgctggctgcaacagcacgaatctcacgggctgtgcgtgcctcaccaccgtccctgctgagaacgcaaccgtggttcctggaaaatgccccagtcctgggtgccaagaggccttcctcactttcctctgtgtgatgtgtatctgcagcctgatcggtgccatggcacagacaccctcagtcatcatcctcatcaggacagtcagccctgaactcaagtcttacgctttgggagttctttttctcctccttcgtttgttgggcttcatccctccacccctcatcttcggggctggcatcgactccacctgcctgttctggagcacgttctgtggggagcaaggcgcctgcgtcctctacgacaatgtggtctaccgatacctgtatgtcagcatcgccatcgcgctcaaatccttcgccttcatcctgtacaccaccacgtggcagtgcctgaggaaaaactataaacgctacatcaaaaaccacgagggcgggctgagcaccagtgagttctttgcctctactctgaccctagacaacctggggagggaccctgtgcccgcaaaccagacacataggacaaagtttatctataacctggaagaccatgagtggtgtgaaaacatggagtccgttttatagtgactaaaggagggctgaactctgtattagtaatccaagggtcatttttttcttaaaaaaagaaaaaaaggttccaaaaaaaaccaaaactcagtacacacacacaggcacagatgcacacacacgcagacagacacaccgactttgtcctttttctcagcatcagagccagacaggattcagaataaggagagaatgacatcgtgcggcagggtcctggaggccacttgcgcggctgggccacagagtctactttgaaggcacctcatggttttcaggatgctgacagctgcaagcaacaggcactgccaaattcagggaacagtggtggccagcttggaggatggacatttctggatacacatacacatacaaaacagaaaacattttttaaaagaagtttcctaaaataaaaaaaattaaaaaaaaaaaacccacaagttgaaaacattgccagattaagcactagtgacacaccccgtgccaccctcttcctccaggtgggggtgggggcgggcgcacaagtcggaggggtggaagcaccactcctctctctgactttcgcaatatgggtcactgtgtagacgactcacccagtctgcatgtggttcaaggccccagagttctctcagtgatgctaatgggtgatccgtgctggagtttgtaattggcacctctcaccagctccatttccatgttcaagactgagggcctgagggggagccaggtggggggccagcacctcccagtggcgggcatccaccttcccccagccccacagagtgacctcaggaagcagtaggcctcgcctggctatgactgacccggctcagagctggtgagacccaacgcagtccaagtcatttgcttacatttgccaaaaacattttgccatttttaaaagaaaaaaatacaatccatatgaatttcaaactgttgtatgtataatcctctaatactatttttaactacttctaaaatctgtgttaacccttcaagtcactaacacagttctctaggccggatttattatgctggttgcttttactttttttctccttttttaatgcaccaaaaatatgtgatacaagggatgcaattaacctattgtaattttcatcattttatcctcattcgaatattctacaaaaacaagaatatacaatgtgttacaagaagaaaaaaaaatgcttcaaaaagagagtgtatatgcagcctgcctttaaaagaatcacatttgagacaacaggggataatgtgatgaattgcaaatttgccttttagcttccttccccatgattcagtgatcactgtcacgggaaacccttttatattcatgcttgacattccaagaggcgttcttttcagcctgtggaggagacactcttagatgtgggtttgtgtgtatgggtgcaacacttccggggataggaaagaagaacagttccctaacacaagctgttaagaagtctgtagcatctctgataacgaatagacccacaagctcctggaagctgtcgtgtgtccaatgcgtgaaaatgtctgtgacattttcagtgttagtcttgaactaaggcccttgtctgtgtgttttgaaggtgggtgaacctcagagaatgaacctgttatgatttggggtaagaatcacgttggaaaacctctcgcaaccagcacactaggccttctacggccatttctgtaaggggacagagcttaggtaaaggcacacactcatacacacacaacaaagggccctgctaacttactcctcatgctgcttcagtgacctttgttcatgtcacattcctggcgctggaaaaaaaactcaaaggttgattggtttgctttttcaccttggacacatttgcattttacccacaaggcaaacaaaagaatcaggaagtaaaaaatggttgggagtgggacaggtatggtaccgaatttttaatgaacattgtaaatgaagaggcttgaatgacagcccaaatctagagaaggcactcagcaagaccaaccaaaagaaaagctgtgtcgtggtatggggccaccgtgatcagctacctggggcaggatgcttctgagacaggcctttcaactgcttagtgttagtatgtccttgcttatgaaaatggggacactcatcagtacgttaactactaaaggggagatggttctccaaccacttcataaaatatgtatgttctgttgttcctaaggctttgataatatcctgtacagattttggtttagttttgcaaatatattgctaataggtcactcttatagattattgcttggcccttcaaactcagtacacacacactgaggccctttgacctagtgttttatggaactatttgctttgagagaaaaaaaaaagaaagttttttaaactctt

SEQ ID NO: 25290 - protein, 429 aa, Homo sapiens
MFGFPQSLPPHSEPAMESEQAMLSEREYERPKPSNGVLRHPLEPDSSASCFQQLRVIPKVTKHLLSNPVFTCIILAACMEIAVVAGFAAFLGKYLEQQFNLTTSSANQLLGMTAIPCACLGIFLGGLLVKKLSLSALGAIRMAMLVNLVSTACYVSFLFLGCDTGPVAGVTVPYGNSTAPGSALDPYSPCNNNCECQTDSFTPVCGADGITYLSACFAGCNSTNLTGCACLTTVPAENATVVPGKCPSPGCQEAFLTFLCVMCICSLIGAMAQTPSVIILIRTVSPELKSYALGVLFLLLRLLGFIPPPLIFGAGIDSTCLFWSTFCGEQGACVLYDNVVYRYLYVSIAIALKSFAFILYTTTWQCLRKNYKRYIKNHEGGLSTSEFFASTLTLDNLGRDPVPANQTHRTKFIYNLEDHEWCENMESVL

SEQ ID NO: 25291 - DNA, 4446 bp, Homo sapiens
ccttgctttcctaaaacagtgctcttctgtagggctgtccaatgtatgggaacattactgtaggcattaataggcaagggccacacacgtggacacatgtttctgaagtccccactgagattggggtccaggaaaagcagcagcctaaaatttgtggggaaggagcaaggcaggtccacagagggccctcgttatggggtagatggaggagagaaggcggcgtccaccacatagcctggtgccagcattgagaggagaatccagtgaggaagcctggttgaaacttgtaacctggacatcactccggacgacccccgctggatcggagcctggtggggtggctttctgctctgcggtgccttactcttcttctcttccctcttgatgtttgggtttccacagtccctgcccccgcactcagagcccgccatggaaagcgagcaggccatgctctccgaaagagaatacgagagacccaagcccagcaacggggtcctgaggcaccccctggagccagacagcagtgcctcctgtttccagcagctgagagtgatcccgaaggtcaccaagcacctgctctcaaaccctgtgttcacctgcatcatcctggccgcctgcatggagattgcagtggtggctggcttcgctgcctttttggggaagtacctggagcagcagtttaacctcaccacctcttctgccaaccagctgcttgggatgactgcgatcccgtgtgcttgtctgggtatcttcctgggaggtcttttggtgaagaagctcagcctgtctgccctgggggccattcggatggccatgctcgtcaacctggtgtccactgcttgctacgtctccttcctcttcctgggctgcgacactggccctgtggctggggttactgttccctatggaaacagcacagcacctggctcagccctggacccctactcgccctgcaataataactgtgaatgccaaaccgattccttcactccagtgtgtggggcagatggcatcacctacctgtctgcctgctttgctggctgcaacagcacgaatctcacgggctgtgcgtgcctcaccaccgtccctgctgagaacgcaaccgtggttcctggaaaatgccccagtcctgggtgccaagaggccttcctcactttcctctgtgtgatgtgtatctgcagcctgatcggtgccatggcacagacaccctcagtcatcatcctcatcaggacagtcagccctgaactcaagtcttacgctttgggagttctttttctcctccttcgtttgttgggcttcatccctccacccctcatcttcggggctggcatcgactccacctgcctgttctggagcacgttctgtggggagcaaggcgcctgcgtcctctacgacaatgtggtctaccgatacctgtatgtcagcatcgccatcgcgctcaaatccttcgccttcatcctgtacaccaccacgtggcagtgcctgaggaaaaactataaacgctacatcaaaaaccacgagggcgggctgagcaccagtgagttctttgcctctactctgaccctagacaacctggggagggaccctgtgcccgcaaaccagacacataggacaaagtttatctataacctggaagaccatgagtggtgtgaaaacatggagtccgttttatagtgactaaaggagggctgaactctgtattagtaatccaagggtcatttttttcttaaaaaaagaaaaaaaggttccaaaaaaaaccaaaactcagtacacacacacaggcacagatgcacacacacgcagacagacacaccgactttgtcctttttctcagcatcagagccagacaggattcagaataaggagagaatgacatcgtgcggcagggtcctggaggccacttgcgcggctgggccacagagtctactttgaaggcacctcatggttttcaggatgctgacagctgcaagcaacaggcactgccaaattcagggaacagtggtggccagcttggaggatggacatttctggatacacatacacatacaaaacagaaaacattttttaaaagaagtttcctaaaataaaaaaaattaaaaaaaaaaaacccacaagttgaaaacattgccagattaagcactagtgacacaccccgtgccaccctcttcctccaggtgggggtgggggcgggcgcacaagtcggaggggtggaagcaccactcctctctctgactttcgcaatatgggtcactgtgtagacgactcacccagtctgcatgtggttcaaggccccagagttctctcagtgatgctaatgggtgatccgtgctggagtttgtaattggcacctctcaccagctccatttccatgttcaagactgagggcctgagggggagccaggtggggggccagcacctcccagtggcgggcatccaccttcccccagccccacagagtgacctcaggaagcagtaggcctcgcctggctatgactgacccggctcagagctggtgagacccaacgcagtccaagtcatttgcttacatttgccaaaaacattttgccatttttaaaagaaaaaaatacaatccatatgaatttcaaactgttgtatgtataatcctctaatactatttttaactacttctaaaatctgtgttaacccttcaagtcactaacacagttctctaggccggatttattatgctggttgcttttactttttttctccttttttaatgcaccaaaaatatgtgatacaagggatgcaattaacctattgtaattttcatcattttatcctcattcgaatattctacaaaaacaagaatatacaatgtgttacaagaagaaaaaaaaatgcttcaaaaagagagtgtatatgcagcctgcctttaaaagaatcacatttgagacaacaggggataatgtgatgaattgcaaatttgccttttagcttccttccccatgattcagtgatcactgtcacgggaaacccttttatattcatgcttgacattccaagaggcgttcttttcagcctgtggaggagacactcttagatgtgggtttgtgtgtatgggtgcaacacttccggggataggaaagaagaacagttccctaacacaagctgttaagaagtctgtagcatctctgataacgaatagacccacaagctcctggaagctgtcgtgtgtccaatgcgtgaaaatgtctgtgacattttcagtgttagtcttgaactaaggcccttgtctgtgtgttttgaaggtgggtgaacctcagagaatgaacctgttatgatttggggtaagaatcacgttggaaaacctctcgcaaccagcacactaggccttctacggccatttctgtaaggggacagagcttaggtaaaggcacacactcatacacacacaacaaagggccctgctaacttactcctcatgctgcttcagtgacctttgttcatgtcacattcctggcgctggaaaaaaaactcaaaggttgattggtttgctttttcaccttggacacatttgcattttacccacaaggcaaacaaaagaatcaggaagtaaaaaatggttgggagtgggacaggtatggtaccgaatttttaatgaacattgtaaatgaagaggcttgaatgacagcccaaatctagagaaggcactcagcaagaccaaccaaaagaaaagctgtgtcgtggtatggggccaccgtgatcagctacctggggcaggatgcttctgagacaggcctttcaactgcttagtgttagtatgtccttgcttatgaaaatggggacactcatcagtacgttaactactaaaggggagatggttctccaaccacttcataaaatatgtatgttctgttgttcctaaggctttgataatatcctgtacagattttggtttagttttgcaaatatattgctaataggtcactcttatagattattgcttggcccttcaaactcagtacacacacactgaggccctttgacctagtgttttatggaactatttgctttgagagaaaaaaaaaagaaagttttttaaactctttgcattttggattttttttcctaagattttaggatgaatgtgaaaaagatgttagaataacaggaagacaactccagggctgagttttatcagcaattgggtataaatttaaagaccgctgttgcaggatggctctgaattctgttgtgtcgtcttttaaaattttaattattctcatatagtaccgaacagaaaactcagtctagttttaatttgccttttgtgctctaaagaagcattgtacatacaacactagatccagcccctcgattatctgtttggtttcaagtgaatgaaaagatttcctggtaagatcattggatttacagaatacaaaaatgtacgggatggaataaacctagaaagtgaatgct

SEQ ID NO: 25292 - protein, 429 aa, Homo sapiens; identical to SEQ ID NO: 25290

SEQ ID NO: 25293 - DNA, 1305 bp, Homo sapiens
tgacttcatgaggcctgaggcaatgacaaagagcccccagggtcttggtctgtcacccagcctggagtgcagtggtgggttcacagctcactgcagcctcaacctatgggctcgcgcgatcttcctatctcagccttccaagtagctgggactacaggcatgcaccaccacacctgggctgtctggtcctctgggcaggaacttgtggatgaagcaggtgttaatagggttccatcactggggcactgggaacccaccctgtgctgaggaagctatcatatgtcactaggaacaaagtgagcaaggtgctaagatctcccttcatatcctgttgggaaattgcttcctatgagaagaagaatccttcttggcttgagtcatgaagaaacggggagggctccgtgtgaacactattgaaagctctggacaacgctgggagggagtcttagttctaaaggtactagctgggtgaccttgagaacactgcctaatttctctcggagcccagcgtggggcctaagaggggctgggcatcagctttcaacctcgcttccagatgttctgagcactgttgttgggatggtcctgtttggcatgacagtgggtccattcttctgggaggggcaagggctggtgcacatctgtgcccctgtgccagcctgagacatctgtgatggcaaatcagactaggaaggtgatggaataaaactgtgtcttggacctctcaatatgcacaatgcatagcatgcgcttccagcacagcgtggagttacaagcctaggtcatttaggccatctgtggctgattaatttagagggaatcaaatatttccagcaaagctccaagagctgtttatcaagctgagatctggaagtgattaagaatttcaacaaactttccatgtttggtagtcaccactagtcagcgtctagaggctgggtttttgcagaggagtcgtggggcaagctaataagagactagtcatttttcatgcttctccaatgcctttagtgtatgaatatcacaatataacttcacgaaaacgtctaataatgaaaaataaactactcataaggcagccacctaaaacctatacatgagatctgatgggttttgtccaaatgcatattataatcatcttctctaaatagttttaaattcaatagttcatttcataaacactttcacattcttaagaattttcattattccatggagctgcagtgccataatttaactcactattccaattcaggtttttctgctattatagttaacgttgtaataaaaatttgtctgcattga

SEQ ID NO: 25294 - protein, 53 aa, Homo sapiens
MGSRDLPISAFQVAGTTGMHHHTWAVWSSGQELVDEAGVNRVPSLGHWEPTLC

SEQ ID NO: 25295 - DNA, 663 bp, Homo sapiens
ggtcttggtctgtcacccagcctggagtgcagtggtgggttcacagctcactgcagcctcaacctatgggctcgcgcgattttcctgcctcagtctcccaagtagctgggactacaggtgcctgccaccacgcccggttctccctaggtcctctgggcaggaacttgtggatgaagcaggtgttaatagggttccatcactggggcactgggaacccaccctgtgctgaggaagctatcatatgtcactaggaacaaagtgagcaaggtgctaagatctcccttcatatcctgttgggaaattgcttcctatgagaagaagaatccttcttggcttgagtcatgaagaaacggggagggctccgtgtgaacactattgaaagctctggacaacgctgggagggagtcttagttctaaaggtactagctgggtgaccttgagaacactgcctaatttctctcggagcccagcgtggggcctaagaggggctgggcatcagctttcaacctcgcttccagatgttctgagcactgttgttgggatggtcctgtttggcatgacagtgggtccattcttctgggaggggcaagggctggtgcacatctgtgcccctgtgccagcctgagacatctgtgatggcaaatcagactaggaaggtgatgg

SEQ ID NO: 25296 - protein, 61 aa, Homo sapiens [sequence omitted]

SEQ ID NO: 25297 - DNA, 2837 bp, Homo sapiens
atcatcaacttttttgctggcctagcaagggcaatggggatacaatggggacatcacaggcttcatccctccacccctcatcttcggggctggcatcgactccacctgcctgttctggagcacgttctgtggggagcaaggcgcctgcgtcctctacgacaatgtggtctaccgatacctgtatgtcagcatcgccatcgcgctcaaatccttcgccttcatcctgtacaccaccacgtggcagtgcctgaggaaaaactataaacgctacatcaaaaaccacgagggcgggctgagcaccagtgagttctttgcctctactctgaccctagacaacctggggagggaccctgtgcccgcaaaccagacacataggacaaagtttatctataacctggaagaccatgagtggtgtgaaaacatggagtccgttttatagtgactaaaggagggctgaactctgtattagtaatccaagggtcatttttttcttaaaaaaagaaaaaaaggttccaaaaaaaaccaaaactcagtacacacacacaggcacagatgcacacacacgcagacagacacaccgactttgtcctttttctcagcatcagagccagacaggattcagaataaggagagaatgacatcgtgcggcagggtcctggaggccacttgcgcggctgggccacagagtctactttgaaggcacctcatggttttcaggatgctgacagctgcaagcaacaggcactgccaaattcagggaacagtggtggccagcttggaggatggacatttctggatacacatacacatacaaaacagaaaacattttttaaaagaagtttcctaaaataaaaaaaattaaaaaaaaaaaacccacaagttgaaaacattgccagattaagcactagtgacacaccccgtgccaccctcttcctccaggtgggggtgggggcgggcgcacaagtcggaggggtggaagcaccactcctctctctgactttcgcaatatgggtcactgtgtagacgactcacccagtctgcatgtggttcaaggccccagagttctctcagtgatgctaatgggtgatccgtgctggagtttgtaattggcacctctcaccagctccatttccatgttcaagactgagggcctgagggggagccaggtggggggccagcacctcccagtggcgggcatccaccttcccccagccccacagagtgacctcaggaagcagtaggcctcgcctggctatgactgacccggctcagagctggtgagacccaacgcagtccaagtcatttgcttacatttgccaaaaacattttgccatttttaaaagaaaaaaatacaatccatatgaatttcaaactgttgtatgtataatcctctaatactatttttaactacttctaaaatctgtgttaacccttcaagtcactaacacagttctctaggccggatttattatgctggttgcttttactttttttctccttttttaatgcaccaaaaatatgtgatacaagggatgcaattaacctattgtaattttcatcattttatcctcattcgaatattctacaaaaacaagaatatacaatgtgttacaagaagaaaaaaaaatgcttcaaaaagagagtgtatatgcagcctgcctttaaaagaatcacatttgagacaacaggggataatgtgatgaattgcaaatttgccttttagcttccttccccatgattcagtgatcactgtcacgggaaacccttttatattcatgcttgacattccaagaggcgttcttttcagcctgtggaggagacactcttagatgtgggtttgtgtgtatgggtgcaacacttccggggataggaaagaagaacagttccctaacacaagctgttaagaagtctgtagcatctctgataacgaatagacccacaagctcctggaagctgtcgtgtgtccaatgcgtgaaaatgtctgtgacattttcagtgttagtcttgaactaaggcccttgtctgtgtgttttgaaggtgggtgaacctcagagaatgaacctgttatgatttggggtaagaatcacgttggaaaacctctcgcaaccagcacactaggccttctacggccatttctgtaaggggacagagcttaggtaaaggcacacactcatacacacacaacaaagggccctgctaacttactcctcatgctgcttcagtgacctttgttcatgtcacattcctggcgctggaaaaaaaactcaaaggttgattggtttgctttttcaccttggacacatttgcattttacccacaaggcaaacaaaagaatcaggaagtaaaaaatggttgggagtgggacaggtatggtaccgaatttttaatgaacattgtaaatgaagaggcttgaatgacagcccaaatctagagaaggcactcagcaagaccaaccaaaagaaaagctgtgtcgtggtatggggccaccgtgatcagctacctggggcaggatgcttctgagacaggcctttcaactgcttagtgttagtatgtccttgcttatgaaaatggggacactcatcagtacgttaactactaaaggggagatggttctccaaccacttcataaaatatgtatgttctgttgttcctaaggctttgataatatcctgtacagattttggtttagttttgcaaatatattgctaataggtcactcttatagattattgcttggcccttcaaactcagtacacacacactgaggccctttgacctagtgttttatggaactatttgctttgagagaaaaaaaaaagaaagttttttaaactctt

SEQ ID NO: 25298 - protein, 76 aa, Homo sapiens
MGIQWGHHRLHPSTPHLRGWHRLHLPVLEHVLWGARRLRPLRQCGLPIPVCQHRHRAQILRLHPVHHHVAVPEEKL

SEQ ID NO: 25299 - DNA, 3211 bp, Homo sapiens
atcatcaacttttttgctggcctagcaagggcaatggggatacaatggggacatcacaggcttcatccctccacccctcatcttcggggctggcatcgactccacctgcctgttctggagcacgttctgtggggagcaaggcgcctgcgtcctctacgacaatgtggtctaccgatacctgtatgtcagcatcgccatcgcgctcaaatccttcgccttcatcctgtacaccaccacgtggcagtgcctgaggaaaaactataaacgctacatcaaaaaccacgagggcgggctgagcaccagtgagttctttgcctctactctgaccctagacaacctggggagggaccctgtgcccgcaaaccagacacataggacaaagtttatctataacctggaagaccatgagtggtgtgaaaacatggagtccgttttatagtgactaaaggagggctgaactctgtattagtaatccaagggtcatttttttcttaaaaaaagaaaaaaaggttccaaaaaaaaccaaaactcagtacacacacacaggcacagatgcacacacacgcagacagacacaccgactttgtcctttttctcagcatcagagccagacaggattcagaataaggagagaatgacatcgtgcggcagggtcctggaggccacttgcgcggctgggccacagagtctactttgaaggcacctcatggttttcaggatgctgacagctgcaagcaacaggcactgccaaattcagggaacagtggtggccagcttggaggatggacatttctggatacacatacacatacaaaacagaaaacattttttaaaagaagtttcctaaaataaaaaaaattaaaaaaaaaaaacccacaagttgaaaacattgccagattaagcactagtgacacaccccgtgccaccctcttcctccaggtgggggtgggggcgggcgcacaagtcggaggggtggaagcaccactcctctctctgactttcgcaatatgggtcactgtgtagacgactcacccagtctgcatgtggttcaaggccccagagttctctcagtgatgctaatgggtgatccgtgctggagtttgtaattggcacctctcaccagctccatttccatgttcaagactgagggcctgagggggagccaggtggggggccagcacctcccagtggcgggcatccaccttcccccagccccacagagtgacctcaggaagcagtaggcctcgcctggctatgactgacccggctcagagctggtgagacccaacgcagtccaagtcatttgcttacatttgccaaaaacattttgccatttttaaaagaaaaaaatacaatccatatgaatttcaaactgttgtatgtataatcctctaatactatttttaactacttctaaaatctgtgttaacccttcaagtcactaacacagttctctaggccggatttattatgctggttgcttttactttttttctccttttttaatgcaccaaaaatatgtgatacaagggatgcaattaacctattgtaattttcatcattttatcctcattcgaatattctacaaaaacaagaatatacaatgtgttacaagaagaaaaaaaaatgcttcaaaaagagagtgtatatgcagcctgcctttaaaagaatcacatttgagacaacaggggataatgtgatgaattgcaaatttgccttttagcttccttccccatgattcagtgatcactgtcacgggaaacccttttatattcatgcttgacattccaagaggcgttcttttcagcctgtggaggagacactcttagatgtgggtttgtgtgtatgggtgcaacacttccggggataggaaagaagaacagttccctaacacaagctgttaagaagtctgtagcatctctgataacgaatagacccacaagctcctggaagctgtcgtgtgtccaatgcgtgaaaatgtctgtgacattttcagtgttagtcttgaactaaggcccttgtctgtgtgttttgaaggtgggtgaacctcagagaatgaacctgttatgatttggggtaagaatcacgttggaaaacctctcgcaaccagcacactaggccttctacggccatttctgtaaggggacagagcttaggtaaaggcacacactcatacacacacaacaaagggccctgctaacttactcctcatgctgcttcagtgacctttgttcatgtcacattcctggcgctggaaaaaaaactcaaaggttgattggtttgctttttcaccttggacacatttgcattttacccacaaggcaaacaaaagaatcaggaagtaaaaaatggttgggagtgggacaggtatggtaccgaatttttaatgaacattgtaaatgaagaggcttgaatgacagcccaaatctagagaaggcactcagcaagaccaaccaaaagaaaagctgtgtcgtggtatggggccaccgtgatcagctacctggggcaggatgcttctgagacaggcctttcaactgcttagtgttagtatgtccttgcttatgaaaatggggacactcatcagtacgttaactactaaaggggagatggttctccaaccacttcataaaatatgtatgttctgttgttcctaaggctttgataatatcctgtacagattttggtttagttttgcaaatatattgctaataggtcactcttatagattattgcttggcccttcaaactcagtacacacacactgaggccctttgacctagtgttttatggaactatttgctttgagagaaaaaaaaaagaaagttttttaaactctttgcattttggattttttttcctaagattttaggatgaatgtgaaaaagatgttagaataacaggaagacaactccagggctgagttttatcagcaattgggtataaatttaaagaccgctgttgcaggatggctctgaattctgttgtgtcgtcttttaaaattttaattattctcatatagtaccgaacagaaaactcagtctagttttaatttgccttttgtgctctaaagaagcattgtacatacaacactagatccagcccctcgattatctgtttggtttcaagtgaatgaaaagatttcctggtaagatcattggatttacagaatacaaaaatgtacgggatggaataaacctagaaagtgaatgct

SEQ ID NO: 25300 - protein, 76 aa, Homo sapiens; identical to SEQ ID NO: 25298

SEQ ID NO: 25301 - DNA, 2671 bp, Homo sapiens
tcgactccacctgcctgttctggagcacgttctgtggggagcaaggcgcctgcgtcctctacgacaatgtggtctaccgatacctgtatgtcagcatcgccatcgcgctcaaatccttcgccttcatcctgtacaccaccacgtggcagtgcctgaggaaaaactataaacgctacatcaaaaaccacgagggcgggctgagcaccagtgagttctttgcctctactctgaccctagacaacctggggagggaccctgtgcccgcaaaccagacacataggacaaagtttatctataacctggaagaccatgagtggtgtgaaaacatggagtccgttttatagtgactaaaggagggctgaactctgtattagtaatccaagggtcatttttttcttaaaaaaagaaaaaaaggttccaaaaaaaaccaaaactcagtacacacacacaggcacagatgcacacacacgcagacagacacaccgactttgtcctttttctcagcatcagagccagacaggattcagaataaggagagaatgacatcgtgcggcagggtcctggaggccacttgcgcggctgggccacagagtctactttgaaggcacctcatggttttcaggatgctgacagctgcaagcaacaggcactgccaaattcagggaacagtggtggccagcttggaggatggacatttctggatacacatacacatacaaaacagaaaacattttttaaaagaagtttcctaaaataaaaaaaattaaaaaaaaaaaacccacaaggcgggcgcacaagtcggaggggtggaagcaccactcctctctctgactttcgcaatatgggtcactgtgtagacgactcacccagtctgcatgtggttcaaggccccagagttctctcagtgatgctaatgggtgatccgtgctggagtttgtaattggcacctctcaccagctccatttccatgttcaagactgagggcctgagggggagccaggtggggggccagcacctcccagtggcgggcatccaccttcccccagccccacagagtgacctcaggaagcagtaggcctcgcctggctatgactgacccggctcagagctggtgagacccaacgcagtccaagtcatttgcttacatttgccaaaaacattttgccatttttaaaagaaaaaaatacaatccatatgaatttcaaactgttgtatgtataatcctctaatactatttttaactacttctaaaatctgtgttaacccttcaagtcactaacacagttctctaggccggatttattatgctggttgcttttactttttttctccttttttaatgcaccaaaaatatgtgatacaagggatgcaattaacctattgtaattttcatcattttatcctcattcgaatattctacaaaaacaagaatatacaatgtgttacaagaagaaaaaaaaatgcttcaaaaagagagtgtatatgcagcctgcctttaaaagaatcacatttgagacaacaggggataatgtgatgaattgcaaatttgccttttagcttccttccccatgattcagtgatcactgtcacgggaaacccttttatattcatgcttgacattccaagaggcgttcttttcagcctgtggaggagacactcttagatgtgggtttgtgtgtatgggtgcaacacttccggggataggaaagaagaacagttccctaacacaagctgttaagaagtctgtagcatctctgataacgaatagacccacaagctcctggaagctgtcgtgtgtccaatgcgtgaaaatgtctgtgacattttcagtgttagtcttgaactaaggcccttgtctgtgtgttttgaaggtgggtgaacctcagagaatgaacctgttatgatttggggtaagaatcacgttggaaaacctctcgcaaccagcacactaggccttctacggccatttctgtaaggggacagagcttaggtaaaggcacacactcatacacacacaacaaagggccctgctaacttactcctcatgctgcttcagtgacctttgttcatgtcacattcctggcgctggaaaaaaaactcaaaggttgattggtttgctttttcaccttggacacatttgcattttacccacaaggcaaacaaaagaatcaggaagtaaaaaatggttgggagtgggacaggtatggtaccgaatttttaatgaacattgtaaatgaagaggcttgaatgacagcccaaatctagagaaggcactcagcaagaccaaccaaaagaaaagctgtgtcgtggtatggggccaccgtgatcagctacctggggcaggatgcttctgagacaggcctttcaactgcttagtgttagtatgtccttgcttatgaaaatggggacactcatcagtacgttaactactaaaggggagatggttctccaaccacttcataaaatatgtatgttctgttgttcctaaggctttgataatatcctgtacagattttggtttagttttgcaaatatattgctaataggtcactcttatagattattgcttggcccttcaaactcagtacacacacactgaggccctttgacctagtgttttatggaactatttgctttgagagaaaaaaaaaagaaagttttttaaactctt

SEQ ID NO: 25302 - protein, 64 aa, Homo sapiens
MHQKYVIQGMQLTYCNFHHFILIRIFYKNKNIQCVTRRKKNASKRECICSLPLKESHLRQQGIM

SEQ ID NO: 25303 - DNA, 3045 bp, Homo sapiens
tcgactccacctgcctgttctggagcacgttctgtggggagcaaggcgcctgcgtcctctacgacaatgtggtctaccgatacctgtatgtcagcatcgccatcgcgctcaaatccttcgccttcatcctgtacaccaccacgtggcagtgcctgaggaaaaactataaacgctacatcaaaaaccacgagggcgggctgagcaccagtgagttctttgcctctactctgaccctagacaacctggggagggaccctgtgcccgcaaaccagacacataggacaaagtttatctataacctggaagaccatgagtggtgtgaaaacatggagtccgttttatagtgactaaaggagggctgaactctgtattagtaatccaagggtcatttttttcttaaaaaaagaaaaaaaggttccaaaaaaaaccaaaactcagtacacacacacaggcacagatgcacacacacgcagacagacacaccgactttgtcctttttctcagcatcagagccagacaggattcagaataaggagagaatgacatcgtgcggcagggtcctggaggccacttgcgcggctgggccacagagtctactttgaaggcacctcatggttttcaggatgctgacagctgcaagcaacaggcactgccaaattcagggaacagtggtggccagcttggaggatggacatttctggatacacatacacatacaaaacagaaaacattttttaaaagaagtttcctaaaataaaaaaaattaaaaaaaaaaaacccacaaggcgggcgcacaagtcggaggggtggaagcaccactcctctctctgactttcgcaatatgggtcactgtgtagacgactcacccagtctgcatgtggttcaaggccccagagttctctcagtgatgctaatgggtgatccgtgctggagtttgtaattggcacctctcaccagctccatttccatgttcaagactgagggcctgagggggagccaggtggggggccagcacctcccagtggcgggcatccaccttcccccagccccacagagtgacctcaggaagcagtaggcctcgcctggctatgactgacccggctcagagctggtgagacccaacgcagtccaagtcatttgcttacatttgccaaaaacattttgccatttttaaaagaaaaaaatacaatccatatgaatttcaaactgttgtatgtataatcctctaatactatttttaactacttctaaaatctgtgttaacccttcaagtcactaacacagttctctaggccggatttattatgctggttgcttttactttttttctccttttttaatgcaccaaaaatatgtgatacaagggatgcaattaacctattgtaattttcatcattttatcctcattcgaatattctacaaaaacaagaatatacaatgtgttacaagaagaaaaaaaaatgcttcaaaaagagagtgtatatgcagcctgcctttaaaagaatcacatttgagacaacaggggataatgtgatgaattgcaaatttgccttttagcttccttccccatgattcagtgatcactgtcacgggaaacccttttatattcatgcttgacattccaagaggcgttcttttcagcctgtggaggagacactcttagatgtgggtttgtgtgtatgggtgcaacacttccggggataggaaagaagaacagttccctaacacaagctgttaagaagtctgtagcatctctgataacgaatagacccacaagctcctggaagctgtcgtgtgtccaatgcgtgaaaatgtctgtgacattttcagtgttagtcttgaactaaggcccttgtctgtgtgttttgaaggtgggtgaacctcagagaatgaacctgttatgatttggggtaagaatcacgttggaaaacctctcgcaaccagcacactaggccttctacggccatttctgtaaggggacagagcttaggtaaaggcacacactcatacacacacaacaaagggccctgctaacttactcctcatgctgcttcagtgacctttgttcatgtcacattcctggcgctggaaaaaaaactcaaaggttgattggtttgctttttcaccttggacacatttgcattttacccacaaggcaaacaaaagaatcaggaagtaaaaaatggttgggagtgggacaggtatggtaccgaatttttaatgaacattgtaaatgaagaggcttgaatgacagcccaaatctagagaaggcactcagcaagaccaaccaaaagaaaagctgtgtcgtggtatggggccaccgtgatcagctacctggggcaggatgcttctgagacaggcctttcaactgcttagtgttagtatgtccttgcttatgaaaatggggacactcatcagtacgttaactactaaaggggagatggttctccaaccacttcataaaatatgtatgttctgttgttcctaaggctttgataatatcctgtacagattttggtttagttttgcaaatatattgctaataggtcactcttatagattattgcttggcccttcaaactcagtacacacacactgaggccctttgacctagtgttttatggaactatttgctttgagagaaaaaaaaaagaaagttttttaaactctttgcattttggattttttttcctaagattttaggatgaatgtgaaaaagatgttagaataacaggaagacaactccagggctgagttttatcagcaattgggtataaatttaaagaccgctgttgcaggatggctctgaattctgttgtgtcgtcttttaaaattttaattattctcatatagtaccgaacagaaaactcagtctagttttaatttgccttttgtgctctaaagaagcattgtacatacaacactagatccagcccctcgattatctgtttggtttcaagtgaatgaaaagatttcctggtaagatcattggatttacagaatacaaaaatgtacgggatggaataaacctagaaagtgaatgct

SEQ ID NO: 25304 - protein, 64 aa, Homo sapiens; identical to SEQ ID NO: 25302

SEQ ID NO: 25305 - DNA, 453 bp, Homo sapiens
gaaattaaatgtgtggctacaacatcaaacaaccagaatttaagaattattacagaacagaataaagtgagggtctgaagaattatccataaagcatgatcctttcagaacgctgggctttaactgaacacatagctacccaactaaagcatcttttgcagctagaaatggccatgtgatcaagtttggaggaactagaggggttggcaagtgatgagtgtgactttggaccacctccttgaagatgcagctgcttcccaggacttctttcccacttcccacaggctggagagtgggcacccaggctttagtcacaaccaccaagatgaccctgtggggaggtgacagggagagaagatggacctcttggagaggagcagccacttctccagctatggactgctgacataagtactatttagagagaggaaaataaactatcccgtgtaagtc

SEQ ID NO: 25306 - protein, 53 aa, Homo sapiens
MQLLPRTSFPLPTGWRVGTQALVTTTKMTLWGGDRERRWTSWRGAATSPAMDC

SEQ ID NO: 25307 - DNA, 2131 bp, Homo sapiens
caacaatggcggcgcccgcggagtcgctgaggaggcggaagactgggtactcggatccggagcctgagtcgccgcccgcgccggggcgtggccccgcaggctctccggcccatctccacacgggcaccttctggctgacccggatcgtgctcctgaaggccctagccttcgtgtactggcctgatcaagatccggggggaccggtgctggcgagacctcacctgcatggacttccactatgagacccagccgatgcccaatcctgtggcgtactacctgcaccactcaccctggtggttccatcgcttcgagacgctcagcaaccacttcatcgagctcctggtgcccttcttcctcttcctcggccggcgggcgtgcatcatccacggggtgctgcagatcctgttccaggccgtcctcatcgtcagcgggaacctcagcttcctgaactggctgactatggtgcccagcctggcctgctttgatgacgccaccctgggattcttgttcccctctgggccaggcagcctgaaggaccgagttctgcagatgcagagggacatccgaggggcccggcccgagcccagattcggctccgtggtgcggcgtgcagccaacgtctcgctgggcgtcctgctggcctggctcagcgtgcccgtggtcctcaacttgctgagctccaggcaggtcatgaacacccacttcaactctcttcacatcgtcaacacttacggggccttcggaagcatcaccaaggagcgggcggaggtgatcctgcagggcacagccagctccaacgccagcgcccccgatgccatgtgggaggactacgagttcaagtgcaagccaggtgaccccagcagacggccctgcctcatctccccgtaccactaccgcctggactggctgatgtggttcgcggccttccagacctacgagcacaacgactggatcatccacctggctggcaagctcctggccagcgacgccgaggccttgtccctgctggcacacaaccccttcgcgggcaggcccccgcccaggtgggtccgaggagagcactacaggtacaagttcagccgtcctgggggcaggcacgccgccgagggcaagtggtgggtgcggaagaggatcggagcctacttccctccgctcagcctggaggagctgaggccctacttcagggaccgtgggtggcctctgcccgggcccctctagacgtgcaccagaaataaaggcgaagacccagcccctcggcggctcagcaacgtttgcccttccctgcgcccagcccaagctgggcatcgccaagagagacgtggagaggagagcggtgggacccagcccccagcacgggggtccagggtggggtctgttgtcacatactgtggcggctcccaggccctgcccacctggggccccacatccaggccaacccttgtcccaggcgccaggggctctgatctcccatccatcccaccctcctcccagaggcccagcctggggctgtgccgcccacaggagttgagacaatggccatcctgacaccttcctccactacagccctgaccatagacccagccaggtagctcttggggtctctagcgtcccagggcctggtttctgttccctcttcaatggtgtgttcccagccaggtcctgaccctcagagccaagtccctgtcacgtctggggcagccaaaccctcgccccacagggacctggacacgcccggccaggatgtggggttggatgggccattttctgtcctatccctcatctccacccccgccacagcctacacgcatcccacacatgcaggcacacacagcctgtgcacacatgtgttcttggcccggtttcatccccccatgactggtgtctgtgaggtgcagatggacacagcgcacacccagaccctccaccaggctgtgacctcgctgcctctgaggccttgacaaggcccctcaatcggaggacagccggccgtgcacactttcatcatcgtcggacaaacagcgtctactgcacatttttcttattcctattcttgagccatagctatggcatattcttctactattcctattataccacttaccagcttactcgaaaacacactgtttaaatg

SEQ ID NO: 25308 - protein, 330 aa, Homo sapiens
MDFHYETQPMPNPVAYYLHHSPWWFHRFETLSNHFIELLVPFFLFLGRRACIIHGVLQILFQAVLIVSGNLSFLNWLTMVPSLACFDDATLGFLFPSGPGSLKDRVLQMQRDIRGARPEPRFGSVVRRAANVSLGVLLAWLSVPVVLNLLSSRQVMNTHFNSLHIVNTYGAFGSITKERAEVILQGTASSNASAPDAMWEDYEFKCKPGDPSRRPCLISPYHYRLDWLMWFAAFQTYEHNDWIIHLAGKLLASDAEALSLLAHNPFAGRPPPRWVRGEHYRYKFSRPGGRHAAEGKWWVRKRIGAYFPPLSLEELRPYFRDRGWPLPGPL

SEQ ID NO: 25309 - DNA, 2619 bp, Homo sapiens
acatgcgccctgacagcccaacaatggcggcgcccgcggagtcgctgaggaggcggaagactgggtactcggatccggagcctgagtcgccgcccgcgccggggcgtggccccgcaggctctccggcccatctccacacgggcaccttctggctgacccggatcgtgctcctgaaggccctagccttcgtgtacttcgtggcattcctggtggctttccatcagaacaagcagctcatcggtgacagggggctgcttccctgcagagtgttcctgaagaacttccagcagtacttccaggacaggacgagctgggaagtcttcagctacatgcccaccatcctctggctgatggactggtcagacatgaactccaacctggacttgctggctcttctcggactgggcatctcgtctttcgtactgatcacgggctgcgccaacatgcttctcatggctgccctgtggggcctctacatgtccctggttaatgtgggccatgtctggtactctttcggatgggagtcccagcttctggagacggggttcctggggatcttcctgtgccctctgtggacgctgtcaaggctgccccagcatacccccacatcccggattgtcctgtggggcttccggtggctgatcttcaggatcatgcttggagcaggcctgatcaagatccggggggaccggtgctggcgagacctcacctgcatggacttccactatgagacccagccgatgcccaatcctgtggcgtactacctgcaccactcaccctggtggttccatcgcttcgagacgctcagcaaccacttcatcgagctcctggtgcccttcttcctcttcctcggccggcgggcgtgcatcatccacggggtgctgcagatcctgttccaggccgtcctcatcgtcagcgggaacctcagcttcctgaactggctgactatggtgcccagcctggcctgctttgatgacgccaccctgggattcttgttcccctctgggccaggcagcctgaaggaccgagttctgcagatgcagagggacatccgaggggcccggcccgagcccagattcggctccgtggtgcggcgtgcagccaacgtctcgctgggcgtcctgctggcctggctcagcgtgcccgtggtcctcaacttgctgagctccaggcaggtcatgaacacccacttcaactctcttcacatcgtcaacacttacggggccttcggaagcatcaccaaggagcgggcggaggtgatcctgcagggcacagccagctccaacgccagcgcccccgatgccatgtgggaggactacgagttcaagtgcaagccaggtgaccccagcagacggccctgcctcatctccccgtaccactaccgcctggactggctgatgtggttcgcggccttccagacctacgagcacaacgactggatcatccacctggctggcaagctcctggccagcgacgccgaggccttgtccctgctggcacacaaccccttcgcgggcaggcccccgcccaggtgggtccgaggagagcactacaggtacaagttcagccgtcctgggggcaggcacgccgccgagggcaagtggtgggtgcggaagaggatcggagcctacttccctccgctcagcctggaggagctgaggccctacttcagggaccgtgggtggcctctgcccgggcccctctagacgtgcaccagaaataaaggcgaagacccagcccctcggcggctcagcaacgtttgcccttccctgcgcccagcccaagctgggcatcgccaagagagacgtggagaggagagcggtgggacccagcccccagcacgggggtccagggtggggtctgttgtcacatactgtggcggctcccaggccctgcccacctggggccccacatccaggccaacccttgtcccaggcgccaggggctctgatctcccatccatcccaccctcctcccagaggcccagcctggggctgtgccgcccacaggagttgagacaatggccatcctgacaccttcctccactacagccctgaccatagacccagccaggtagctcttggggtctctagcgtcccagggcctggtttctgttccctcttcaatggtgtgttcccagccaggtcctgaccctcagagccaagtccctgtcacgtctggggcagccaaaccctcgccccacagggacctggacacgcccggccaggatgtggggttggatgggccattttctgtcctatccctcatctccacccccgccacagcctacacgcatcccacacatgcaggcacacacagcctgtgcacacatgtgttcttggcccggtttcatccccccatgactggtgtctgtgaggtgcagatggacacagcgcacacccagaccctccaccaggctgtgacctcgctgcctctgaggccttgacaaggcccctcaatcggaggacagccggccgtgcacactttcatcatcgtcggacaaacagcgtctactgcacatttttcttattcctattcttgagccatagctatggcatattcttctactattcctattataccacttaccagcttactcgaaaacacactgtttaaatg

SEQ ID NO: 25310 - protein, 567 aa, Homo sapiens
MRPDSPTMAAPAESLRRRKTGYSDPEPESPPAPGRGPAGSPAHLHTGTFWLTRIVLLKALAFVYFVAFLVAFHQNKQLIGDRGLLPCRVFLKNFQQYFQDRTSWEVFSYMPTILWLMDWSDMNSNLDLLALLGLGISSFVLITGCANMLLMAALWGLYMSLVNVGHVWYSFGWESQLLETGFLGIFLCPLWTLSRLPQHTPTSRIVLWGFRWLIFRIMLGAGLIKIRGDRCWRDLTCMDFHYETQPMPNPVAYYLHHSPWWFHRFETLSNHFIELLVPFFLFLGRRACIIHGVLQILFQAVLIVSGNLSFLNWLTMVPSLACFDDATLGFLFPSGPGSLKDRVLQMQRDIRGARPEPRFGSVVRRAANVSLGVLLAWLSVPVVLNLLSSRQVMNTHFNSLHIVNTYGAFGSITKERAEVILQGTASSNASAPDAMWEDYEFKCKPGDPSRRPCLISPYHYRLDWLMWFAAFQTYEHNDWIIHLAGKLLASDAEALSLLAHNPFAGRPPPRWVRGEHYRYKFSRPGGRHAAEGKWWVRKRIGAYFPPLSLEELRPYFRDRGWPLPGPL

SEQ ID NO: 25311 - DNA, 3026 bp, Homo sapiens
ggcgccgcaccacgtgggccaggcgccccacgcctggagctcccctctctggagccccgggaaaggaagcggggcagggaggccgggtgggagcaggggggtctccggcgcttcctctcctctgcgggcgccgcgcggctcctgagagtccgccccccgtcctgacgctcagctaggaagcgggtcctcgggcccctcccccgacacacacacacacacacacacacacacacacacacacacacactctctctctctctctctctctctctctctctctctctctctctcacacacacacacacacacacagcccgtctcgcgcctgaggtctcgcccgcaggccggtggcgcggggtcagctgctgcctgcggtccaggacagggtcggttccgccgcgcagcgcccaggcccagctcgtccagagtctgcggacagcgcacgtccagtcgtggcattcctggtggctttccatcagaacaagcagctcatcggtgacagggggctgcttccctgcagagtgttcctgaagaacttccagcagtacttccaggacaggacgagctgggaagtcttcagctacatgcccaccatcctctggctgatggactggtcagacatgaactccaacctggacttgctggctcttctcggactgggcatctcgtctttcgtactgatcacgggctgcgccaacatgcttctcatggctgccctgtggggcctctacatgtccctggttaatgtgggccatgtctggtactctttcgcggctcagcacgtcactttggactgtcgcgcagaaattcagaagactcgtagtagcttcggcagtgctctccctgccttccgagcagccatgcgtctttgaactgtcttcccttccctgatcttggagaacatagagctgccagttactgaggatgggagtcccagcttctggagacggggttcctggggatcttcctgtgccctctgtggacgctgtcaaggctgccccagcatacccccacatcccggattgtcctgtggggcttccggtggctgatcttcaggatcatgcttggagcaggcctgatcaagatccggggggaccggtgctggcgagacctcacctgcatggacttccactatgagacccagccgatgcccaatcctgtggcgtactacctgcaccactcaccctggtggttccatcgcttcgagacgctcagcaaccacttcatcgagctcctggtgcccttcttcctcttcctcggccggcgggcgtgcatcatccacggggtgctgcagatcctgttccaggccgtcctcatcgtcagcgggaacctcagcttcctgaactggctgactatggtgcccagcctggcctgctttgatgacgccaccctgggattcttgttcccctctgggccaggcagcctgaaggaccgagttctgcagatgcagagggacatccgaggggcccggcccgagcccagattcggctccgtggtgcggcgtgcagccaacgtctcgctgggcgtcctgctggcctggctcagcgtgcccgtggtcctcaacttgctgagctccaggcaggtcatgaacacccacttcaactctcttcacatcgtcaacacttacggggccttcggaagcatcaccaaggagcgggcggaggtgatcctgcagggcacagccagctccaacgccagcgcccccgatgccatgtgggaggactacgagttcaagtgcaagccaggtgaccccagcagacggccctgcctcatctccccgtaccactaccgcctggactggctgatgtggttcgcggccttccagacctacgagcacaacgactggatcatccacctggctggcaagctcctggccagcgacgccgaggccttgtccctgctggcacacaaccccttcgcgggcaggcccccgcccaggtgggtccgaggagagcactacaggtacaagttcagccgtcctgggggcaggcacgccgccgagggcaagtggtgggtgcggaagaggatcggagcctacttccctccgctcagcctggaggagctgaggccctacttcagggaccgtgggtggcctctgcccgggcccctctagacgtgcaccagaaataaaggcgaagacccagcccctcggcggctcagcaacgtttgcccttccctgcgcccagcccaagctgggcatcgccaagagagacgtggagaggagagcggtgggacccagcccccagcacgggggtccagggtggggtctgttgtcacatactgtggcggctcccaggccctgcccacctggggccccacatccaggccaacccttgtcccaggcgccaggggctctgatctcccatccatcccaccctcctcccagaggcccagcctggggctgtgccgcccacaggagttgagacaatggccatcctgacaccttcctccactacagccctgaccatagacccagccaggtagctcttggggtctctagcgtcccagggcctggtttctgttccctcttcaatggtgtgttcccagccaggtcctgaccctcagagccaagtccctgtcacgtctggggcagccaaaccctcgccccacagggacctggacacgcccggccaggatgtggggttggatgggccattttctgtcctatccctcatctccacccccgccacagcctacacgcatcccacacatgcaggcacacacagcctgtgcacacatgtgttcttggcccggtttcatccccccatgactggtgtctgtgaggtgcagatggacacagcgcacacccagaccctccaccaggctgtgacctcgctgcctctgaggccttgacaaggcccctcaatcggaggacagccggccgtgcacactttcatcatcgtcggacaaacagcgtctactgcacatttttcttattcctattcttgagccatagctatggcatattcttctactattcctattataccacttaccagcttactcgaaaacacactgtttaaatg

SEQ ID NO: 25312 - protein, 350 aa, Homo sapiens
MLGAGLIKIRGDRCWRDLTCMDFHYETQPMPNPVAYYLHHSPWWFHRFETLSNHFIELLVPFFLFLGRRACIIHGVLQILFQAVLIVSGNLSFLNWLTMVPSLACFDDATLGFLFPSGPGSLKDRVLQMQRDIRGARPEPRFGSVVRRAANVSLGVLLAWLSVPVVLNLLSSRQVMNTHFNSLHIVNTYGAFGSITKERAEVILQGTASSNASAPDAMWEDYEFKCKPGDPSRRPCLISPYHYRLDWLMWFAAFQTYEHNDWIIHLAGKLLASDAEALSLLAHNPFAGRPPPRWVRGEHYRYKFSRPGGRHAAEGKWWVRKRIGAYFPPLSLEELRPYFRDRGWPLPGPL

SEQ ID NO: 25313 - DNA, 3374 bp, Homo sapiens
gtttccgtgggtcaggcatagggctctgggtcactgctgtcgtggatgctgatggactggtgttagacctcagcagattctctacctcccaccatgttcttctgccctcatctcctctctgtgacactgaagagagacctgggttcacgcccaccagagtgcccacctggaacacaatgcatttcctcagcagagggtccccgcgagcgcaggggtgtcctcggcggagggtccccgcgaacaggcatgtcctcggcggagggtccctgtgagcgcgggcgtgtcctcggcagagggtccccacaagccacctgttctccgtggcagctgacaggcaggaggctgcatccaaagatgccactcttccttcttggggccatgcgccgttggcctcggaacacctgctgctccgtctcttgggcccaggattccatcacctcaagctcctcttcctgtgccggccttggggaccccctcgggcctcgcctccgctcccagccaccggccgggtcatctgtgggccgcacagccttgtgaggactccgccggcgggggcgagcacagatgggcagtgagaagactgatttccctctgaggagatggctcagtgatgctagaagaaaaacaaggaaggcgaggtcccccaggagcgctcaggccgtgcactctacgcggaactgcgttttcataacaaaacagccgaccagatggagggcgagagatgcaccagagcagctgaacggggcgcagctggggatgcctctgcatggagcagggccccgagccccgaagctttcttagaaacaggatctgatgcccagatctgtgctctctggagccctagttccctgaggctagagttccccactgagcccacagcaggatgacccaagggggctttggaaatacactcaggcagggcccaccctgacccaggcaggcaggtgctcagggctgggtgttcctcaaagctcctgatggttctggcatggccgagcatccgaacgggcactggctcaggctgtgccccaggtcgctttggtcccatctgccagtcaggctgaccacagcgaagggccagaaagacccgagcttttcccaccaggacattccagtgtcacctgtggcatctcctccagagcatccccaagagtgggcccaaaggtcagacctcagtgcctagccctgcaccctccctgtcacgggagctcaggggctcccagccaccccaccccagaccagccctggtcacactcaggacggagggcatgggggtctggaccagcggaggggagctggtggcagaggtggctaaccccagccagggcgaggcggggctgtttttggcacaggggtttagtaaccttgtagacagtggagaataagaaataactgttttggggctcagaaccagaaaagctatttttcccaattcacccagggagagccatgagtgcacagttcataaaacaccatcatcgcccataacactgatgtggctgccctcacgagtcccttcattagacgtcgatgtccctgccctcaaccttcctcctgagttacggggataaaggctgggctttgatgcatcaaatctggctgacggagctgtctgaggaagccacacccaggtcctgccggcccagggtccaccggctcagctgcagaccatcacccatgcagggcgaccggccacgcaagctgcccctgtctccctgatgcctccacggcaacggcaggggtgaggtctggcagcacacctgtgatatcacccgacggagctgcagggacagcggctccatctccagtttcgtcacctaacgatcgctggcctgcggggatgtccagaagcgggtccctctgagtccctcctgccgcaggtttactcactgctgctgctgagtctttccttggagctctcccagccgtgctgctcagccagccctgcatgcagcccctcccctctcctgctgttcatctctgtggcacagggtcctgtgcctgtgtctcacttccttgcatttcgtattttggagtgggggcgttactggtggcccccccacggcccctgttgtctgtgtcacccatcggctgaggggcgtccccagtacccactctccaagcacagcctcctctgtttggactcaccagccttccccgggcatgaccccggcaggtgccctctgaaagtgaggagttccaggagggcacagggtctggtggtctggtccagcccccgccttgcggatcactaaagcaagggacagaacctgcacagaaatgtgcagtcatgggaggaatgttctggaagcacctgccggaaggcacctctgaggcatctgctgtcccctccatgaaggcacagctgggtttcagttgtgatgctgggcccgagggacagcaagggcagagctgggtgcaggttccctcccccctccctgctccaggaagagaggcgccagctgcccaggggccccacacgagcccctgcacgagactcagctgcggcgtctccacaggccgtcctcatcgtcagcgggaacctcagcttcctgaactggctgactatggtgcccagcctggcctgctttgatgacgccaccctgggattcttgttcccctctgggccaggcagcctgaaggaccgagttctgcagatgcagagggacatccgaggggcccggcccgagcccagattcggctccgtggtgcggcgtgcagccaacgtctcgctgggcgtcctgctggcctggctcagcgtgcccgtggtcctcaacttgctgagctccaggcaggtcatgaacacccacttcaactctcttcacatcgtcaacacttacggggccttcggaagcatcaccaaggagcgggcggaggtgatcctgcagggcacagccagctccaacgccagcgcccccgatgccatgtgggaggactacgagttcaagtgcaagccaggtgaccccagcagacggccctgcctcatctccccgtaccactaccgcctggactggctgatgtggttcgcggccttccagacctacgagcacaacgactggatcatccacctggctggcaagctcctggccagcgacgccgaggccttgtccctgctggcacacaaccccttcgcgggcaggcccccgcccaggtgggtccgaggagagcactacaggtacaagttcagccgtcctgggggcaggcacgccgccgagggcaagtggtgggtgcggaagaggatcggagcctacttccctccgctcagcctggaggagctgaggccctacttcagggaccgtgggtggcctctgcccgggcccctctagacgtgcaccagaaataaaggcgaagacccagcccctcggcggctcagc

SEQ ID NO: 25314 - protein, 314 aa, Homo sapiens
MLGPRDSKGRAGCRFPPPSLLQEERRQLPRGPTRAPARDSAAASPQAVLIVSGNLSFLNWLTMVPSLACFDDATLGFLFPSGPGSLKDRVLQMQRDIRGARPEPRFGSVVRRAANVSLGVLLAWLSVPVVLNLLSSRQVMNTHFNSLHIVNTYGAFGSITKERAEVILQGTASSNASAPDAMWEDYEFKCKPGDPSRRPCLISPYHYRLDWLMWFAAFQTYEHNDWIIHLAGKLLASDAEALSLLAHNPFAGRPPPRWVRGEHYRYKFSRPGGRHAAEGKWWVRKRIGAYFPPLSLEELRPYFRDRGWPLPGPL

SEQ ID NO: 25315 - DNA, 1754 bp, Homo sapiens
acatgcgccctgacagcccaacaatggcggcgcccgcggagtcgctgaggaggcggaagactgggtactcggatccggagcctgagtcgccgcccgcgccggggcgtggccccgcaggctctccggcccatctccacacgggcaccttctggctgacccggatcgtgctcctgaaggccctagccttcgtgtacttcgtggcattcctggtggctttccatcagaacaagcagctcatcggtgacagggggctgcttccctgcagagtgttcctgaagaacttccagcagtacttccaggacaggacgagctgggaagtcttcagctacatgcccaccatcctctggctgatggactggtcagacatgaactccaacctggacttgctggctcttctcggactgggcatctcgtctttcgtactgatcacgggctgcgccaacatgcttctcatggctgccctgtggggcctctacatgtccctggttaatgtgggccatgtctggtactctttcggatgggagtcccagcttctggagacggggttcctggggatcttcctgtgccctctgtggacgctgtcaaggctgccccagcatacccccacatcccggattgtcctgtggggcttccggtggctgatcttcaggatcatgcttggagcaggcctgatcaagatccggggggaccggtgctggcgagacctcacctgcatggacttccactatgagacccagccgatgcccaatcctgtggcgtactacctgcaccactcaccctggtggttccatcgcttcgagacgctcagcaaccacttcatcgagctcctggtgcccttcttcctcttcctcggccggcgggcgtgcatcatccacggggtgctgcagatcctgttccaggccgtcctcatcgtcagcgggaacctcagcttcctgaactggctgactatggtgcccagcctggcctgctttgatgacgccaccctgggattcttgttcccctctgggccaggcagcctgaaggaccgagttctgcagatgcagagggacatccgaggggcccggcccgagcccagattcggctccgtggtgcggcgtgcagccaacgtctcgctgggcgtcctgctggcctggctcagcgtgcccgtggtcctcaacttgctgagctccaggcaggtcatgaacacccacttcaactctcttcacatcgtcaacacttacggggccttcggaagcatcaccaaggagcgggcggaggtgatcctgcagggcacagccagctccaacgccagcgcccccgatgccatgtgggaggactacgagttcaagtgcaagccaggtgaccccagcagacggccctgcctcatctccccgtaccactaccgcctggactggctgatgtggttcgcggccttccagacctacgagcacaacgactggatcatccacctggctggcaagctcctggccagcgacgccgaggccttgtccctgctggcacacaaccccttcgcgggcaggcccccgcccaggtgggtccgaggagagcactacaggtacaagttcagccgtcctgggggcaggcacgccgccgagggcaagtggtgggtgcggaagaggatcggagcctacttccctccgctcagcctggaggagctgaggccctacttcagggaccgtgggtggcctctgcccgggcccctctagacgtgcaccagaaataaaggcgaagacccagcccctcggcggctcagc

SEQ ID NO: 25316 - protein, 567 aa, Homo sapiens; identical to SEQ ID NO: 25310

SEQ ID NO: 25317 - DNA, 581 bp, Homo sapiens
ctgcacacccgtcccgagacaccactgcacacccgtcccgagacaccacgcacacccgtcccgagacaccactgcacacccgtcccgagacaccactgcacacccgtcccgagacaccactgcacacccgtcccgtgacatcactgcacacccgtcccgagacaccactcacaacccatcccgagacaccactgcacacccgtcccgagacaccactgcacacccgtcccgtgacaacatgcacacccgtcccgtgacaccactgcacacccgtcccgagacaccactcacacccgtcccgagacaccactcacacccgtcccgagacaccactgcacaacccgtcccgagacaccactcacacccgtcccgagacaccactcacacccgtcccgtgacaccactcacacccgtcccgtgacaccactcacacccgtcccgagacaccactgcacacccgtcccgagacaccactgcacacccgtcccgagacaccactcacacccgtcccgagacaccactcacacccgtcccgagacaccatcacacccgtcccgagacaccactcacacccgtcccgt

SEQ ID NO: 25318 - protein, 60 aa, Homo sapiens
MHTRPVTPLHTRPETPLTPVPRHHSHPSRDTTAQPVPRHHSHPSRDTTHTRPVTPLTPVP

SEQ ID NO: 25319 - DNA, 455 bp, Homo sapiens
acacccatcccgagacaccactgcacacccgtcccgagacaccactgcacacccgtcccgagacaccactgcacacccgtcccgagacaccactgcacacccgtcccgagacaaccactgcacacccctcccgagacaccactgcacacccatcccgagacaccactgcacacccgtcccgagacaccactgcacacccgtcccgtgacaacactgcacacccgtcccgagacaccactcacacccgtcccgagacaccactcacacccgtcccgtgacaccactgcacacccgtcccgtgacaccactgcacacccgtcccgagacaccactcacacccgtcccgagacaccactcacacccgtcccgagacaccactgcacaacccgtcccgagacaccactcacacccgtcccgagacaccactcacacccgtcccgtgacaccactcacac

SEQ ID NO: 25320 - protein, 150 aa, Homo sapiens
TPIPRHHCTPVPRHHCTPVPRHHCTPVPRHHCTPVPRQPLHTPPETPLHTHPETPLHTRPETPLHTRPVTTLHTRPETPLTPVPRHHSHPSRDTTAHPSRDTTAHPSRDTTHTRPETPLTPVPRHHCTTRPETPLTPVPRHHSHPSRDTT

SEQ ID NO: 25321 - DNA, 3218 bp, Homo sapiens
cagaggtcaccaccacgcagcagagacaggtgtcctgtgggcggtgcagaggtcaccaccacgcagcagagacaggcgtcctgtgggcagtgcagaggtcaccaccacgcagcagagacaggcgtcctcacaggcagtgcagaggtcaccaccacgcagcagagacaggcgtccccacgggcagtgcagaggtcaccaccacacagcagagacaggcgtcctgtgggcggtgcagaggtcaccaccacgcagcagagacaggcgtcctgtgggcgatgcagaggtcaccccacgcagcagagacaggcgtcctgtgggcgatgcagaggtcaccaccacgcagcagagacggccgtccccacaggcagtgcagaggtcaccaccacgcagcagagacaggcgtccccacgggcagtgcagaggtcaccaccacacagcagagacaggcgtcctgtgggcggtgcagaggtcaccaccacgcagcagagacaggcgtcctgtgggcgatgcagaggtcaccccacgcagcagagacaggcgtcctgtgggcgatgcagaggtcaccaccacacagcagagacgggcgtccccacaggcagtgcagaggtcaccaccacgcagcagagacaggcgtccccacgggcagtgcaaaggtcaccaccacacagcagagataggcgtcctgtgggcgatgcagaggtcaccaccacgcagcagagacaggcgtcctgtgggcggtgcagaggtcaccaccacgcagcagagacaggcgtcctgtgggcgatgcagaggtcaccaccacgcagcagagacaggcgtccccacgggcagtgcagaggtcaccaccacacagcagagacaggcgtcctgtgggcagtgcagaggtcaccaccacgcagcagagacaggctcctgtgggcagtgcagaggtcaccaccacgcagcagagacaggcgtcctgtgggcagtgcagaggtcaccaccacgcagcagagacaggcgtcctgtgggcagtgcagaggtcaccaccacgcagcagagacgggcgtccccacaggcagtgcagaggtcaccaccacacagcagagacaggagtcctgtgggcagtgcagaggtcaccaccacgcagcagagacgggcgtccccacaggcagtgcagaggtcaccacactgagccagactgtcctcggccttccctgggttgagcaccggatgaaaaccatgtgctttgagccctggaaagacaatcagcccagccagagccagagcctgaaacaggcagcccccagggcgcagctgcaggaagccgcatcctctcgtgggctccagcaaggcgggggacgctgtgttccctcagtggcttcttggtgccccttgatgtccaggagtgtgaggtgaggtgagggctctgagctgggaagctgacaagtcagggagaatgccaggccagacgcatcggcctgcgggggctggagcagagcctggcactcactgtacttgctccgtctcactccggctgctgcgctggcccagggctgtccaccccaggcgtgtggcagagcaagcctggctcccagagctcccctcaggccctggagcggcaggcagtgggcatcctcagcccaacccatgtccgtgccatgcacaggatagctgagcttgccgctgccacagggtgtcagcgggttggggcaacagacagggccccagtgctggtggccaggctggctgtatgtgtgggttggctgccacctgactgcactgaaacaagaaccacccccaccccaccccccactgctctccacccggttcggggccggccctggctgggcttcgtggatcctcaggttgtgcgggtcatggcttcctggggctgggccagagccatcatggagtcagcacggttccttgcagacacaggcggggcaggcggcgcctctccaccttccttgcctcaagctgcggggacagcaccaaaaagccacgtggacccagatggcctcgccggacttcctgactcagggctgtctccagcctacatcccaccggggctgcacgcacagacggcttctcctggagccctggagcatttcccccgtgtttcggccaggttttctgctttaaatgagtttatttcagtcgtgtcaaagtgaaggtctctttcactcaggacgtgatcaatggcgtggccatcaagtcacagcgttgaaggcaacagatggcctttaatgacgctattttaaaaaataatttcccctttctttccccatcctggttttgtgaggacagagcatcggcatctcagggcgggggtgggtctgcctactctgtggccagcacgcagcagatccctgtaggtggagccccacagctctgtgtcccggcacctctgtgccacctgcacaggggcagagggtgggttttccgtgacgccccctggagccaaaccaccgttgatcacttcctcctgatgaactgggctgtgttggggtgcagaggtctcggttgcgtatgttctgggaattgagccagggtccttgttgctgggaattctcagacctggacaatatcagtagaggagaccacttgatttttagtttgacccctggagaattgaaaagctggaaatctgttttctgtaccttccccctcccaaccctcccccgactccctacctggcttctgtctggagaggacgtctgcatggctgtcctggggtggctgcaggtgtgcagatgctcaccgccactgtctccccattcctgctggagcccactttggtgtgagtgtttgcctggcagaggcatcgcaggcccacgggaggataaagagaagccagagaactcataattccaaaagctggcaaagttaaaacgtgatgtctggccgggtgcagtggctcacacctgtaatcccagcactttgggaggctgagatgggcagatcacctgaggtcaggagttcgagaccagcctggccaacatggtgaaatcccgtctgtactaaaacacacacacacacacacacacacacacacacacacacacacacacacacataaaaattagcaggtatgctggcgggcgcctgtaattccagttattcaggaggctgaggcaggagaattgcttgaacctgggaggcggaggttgcagtgagccaagatcgtgccattgcactccagcctgggcaacagagtgagactccagctcaaaaaa

SEQ ID NO: 25322 - protein, 204 aa, Homo sapiens
MQRSPPRSRDRRPHGQCRGHHHTAETGVLWAVQRSPPRSRDRLLWAVQRSPPRSRDRRPVGSAEVTTTQQRQASCGQCRGHHHAAETGVPTGSAEVTTTQQRQESCGQCRGHHHAAETGVPTGSAEVTTLSQTVLGLPWVEHRMKTMCFEPWKDNQPSQSQSLKQAAPRAQLQEAASSRGLQQGGGRCVPSVASWCPLMSRSVR

SEQ ID NO: 25323 - DNA, 798 bp, Homo sapiens
caacaatggcggcgcccgcggagtcgctgaggaggcggaagactgggtactcggatccggagcctgagtcgccgcccgcgccggggcgtggccccgcaggctctccggcccatctccacacgggcaccttctggctgacccggatcgtgctcctgaaggccctagccttcgtgtacttcgtggcattcctggtggctttccatcagaacaagcagctcatcggtgacagggggctgcttccctgcagagtgttcctgaagaacttccagcagtacttccaggacaggacgagctgggaagtcttcagctacatgcccaccatcctctggctgatggactggtcagacatgaactccaacctggacttgctggctcttctcggactgggcatctcgtctttcgtactgatcacgggctgcgccaacatgcttctcatggctgccctgtggggcctctacatgtccctggttaatgtgggccatgtctggtactctttcgcctctgccatcagccttcccagtatgcacggagggcagtgatgggcgcttgtgatctgatccgtgcctcctccctggatgtgggagctcctgggcttccaggccccgggcacctagagacggatggtcgcacgcatgattgtcggcatctcacaggatgggagtcccagcttctggagacggggttcctggggatcttcctgtgccctctgtggacgctgtcaaggctgccccagcatacccccacatcccggattgtcctgtggggcttccggtggctgatcttcaggatcatgcttgg

SEQ ID NO: 25324 - protein, 177 aa, Homo sapiens
MAAPAESLRRRKTGYSDPEPESPPAPGRGPAGSPAHLHTGTFWLTRIVLLKALAFVYFVAFLVAFHQNKQLIGDRGLLPCRVFLKNFQQYFQDRTSWEVFSYMPTILWLMDWSDMNSNLDLLALLGLGISSFVLITGCANMLLMAALWGLYMSLVNVGHVWYSFASAISLPSMHGGQ

SEQ ID NO: 25325 - DNA, 946 bp, Homo sapiens
caacaatggcggcgcccgcggagtcgctgaggaggcggaagactgggtactcggatccggagcctgagtcgccgcccgcgccggggcgtggccccgcaggctctccggcccatctccacacgggcaccttctggctgacccggatcgtgctcctgaaggccctagccttcgtgtacttcgtggcattcctggtggctttccatcagaacaagcagctcatcggtgacagggggctgcttccctgcagagtgttcctgaagaacttccagcagtacttccaggacaggacgagctgggaagtcttcagctacatgcccaccatcctctggctgatggactggtcagacatgaactccaacctggacttgctggctcttctcggactgggcatctcgtctttcgtactgatcacgggctgcgccaacatgcttctcatggctgccctgtggggcctctacatgtccctggttaatgtgggccatgtctggtactctttcgcctctgccatcagccttcccagtatgcacggagggcagtgatgggcgcttgtgatctgatccgtgcctcctccctggatgtgggagctcctgggcttccaggccccgggcacctagagacggatggtcgcacgcatgattgtcggcatctcacagcggctcagcacgtcactttggactgtcgcgcagaaattcagaagactcgtagtagcttcggcagtgctctccctgccttccgagcagccatgcgtctttgaactgtcttcccttccctgatcttggagaacatagagctgccagttactgaggatgggagtcccagcttctggagacggggttcctggggatcttcctgtgccctctgtggacgctgtcaaggctgccccagcatacccccacatcccggattgtcctgtggggcttccggtggctgatcttcaggatcatgc

SEQ ID NO: 25326 - protein, 177 aa, Homo sapiens; identical to SEQ ID NO: 25324

SEQ ID NO: 25327 - DNA, 1322 bp, Homo sapiens
gtcagcaggtcgcctgggtctctgtctcagtgctcagcagggcgaggacaggacagaacgggccccatcacagactgcgcttagaaggaactcagtaaaacaaagaccattttcttctggaggcaactcaaggagatttccagcatcactggtactcaatattgaaggaatgaaaatacgtgaggaataaaagaatgaagaaagtgacctctaccgcaaggacacaggccctgaaggctgagactgtgaagggggcaggcaaagatccacgcccagacaggccacccctgctctcctgggaaaggggccgagagccagagagttcggggcagagagagcctgagtgcgaggcccaggccagggcctttaccagcaaagaccggcccctctgcctgcgccctgaggtcatggagaaaggcaggggtgggggtatggtcatccttcccaaggtcctggagtcaggtctgcttaccaagccaccgtgtgtcccatgacattctggaggcctccgggcccaatggaggtcacatccaccgtcctcccggccctgtcctgtccactgggtggctgccctcttcccaccctccagtattgactgcgttgtgtgggatggggaagacctccggtcccctccaccaaacaaagcacaagccaaagtgcccaccagcgtgagtgccgtgagcaccgtgaaccttctctatgccgaggggcacacagccttgagcgtccacgggggatgggcctgtgggtgctttccctctgccccagggaagcggtggtaatcacacctgtgagatgccgacaatcatgcgtgcgaccatccgtctctaggtgcccggggcctggaagcccaggagctcccacatccagggaggaggcacggatcagatcacaagcgcccatcactgccctccgtgcatactgggaaggctgatggcagaggctaaggaaggggagaggccaggaaaagtgcgtgaagatacataccaaacacacaacgctcaactctcgcagagctttctctaaatgcatctcacttaccgaaagagtacctgaaaaacaaaagaagaaacgagtattaacactttggcttgtttcaaccaaaaacccactgtttccccactgagtgaagcccaccctggcacccagcacggtgtggggtcagggaagccctgcgaggaggacctgcccgctgggcattaggggaacaggagcccctccccacggctcacacacaggcaggcccagaacaggcaaccaaaacatattccaagatacacctactaagtacccatagaaataaaaaaatatgtattttgcga

SEQ ID NO: 25328 - protein, 99 aa, Homo sapiens
MKKVTSTARTQALKAETVKGAGKDPRPDRPPLLSWERGREPESSGQREPECEAQARAFTSKDRPLCLRPEVMEKGRGGGMVILPKVLESGLLTKPPCVP

SEQ ID NO: 25329 - DNA, 1437 bp, Homo sapiens
ggcgaggacaggacagaacgggccccatcacagactgcgcttagaaggaactcagtaaaacaaagaccattttcttctggaggcaactcaaggagaaaaacatggaaacaatgaacagacgcaagcacgcagagccgcacgccctgacggtgcaccccgagccaggtggcacccagcagccaggaaacccatgagtgacagtggccaaggtggcctggtcgtctgcaattacaggaacctgcctttcaagatttccagcatcactggtactcaatattgaaggaatgaaaatacgtgaggaataaaagaatgaagaaagtgacctctaccgcaaggacacaggccctgaaggctgagactgtgaagggggcaggcaaagatccacgcccagacaggccacccctgctctcctgggaaaggggccgagagccagagagttcggggcagagagagcctgagtgcgaggcccaggccagggcctttaccagcaaagaccggcccctctgcctgcgccctgaggtcatggagaaaggcaggggtgggggtatggtcatccttcccaaggtcctggagtcaggtctgcttaccaagccaccgtgtgtcccatgacattctggaggcctccgggcccaatggaggtcacatccaccgtcctcccggccctgtcctgtccactgggtggctgccctcttcccaccctccagtattgactgcgttgtgtgggatggggaagacctccggtcccctccaccaaacaaagcacaagccaaagtgcccaccagcgtgagtgccgtgagcaccgtgaaccttctctatgccgaggggcacacagccttgagcgtccacgggggatgggcctgtgggtgctttccctctgccccagggaagcggtggtaatcacacctgtgagatgccgacaatcatgcgtgcgaccatccgtctctaggtgcccggggcctggaagcccaggagctcccacatccagggaggaggcacggatcagatcacaagcgcccatcactgccctccgtgcatactgggaaggctgatggcagaggctaaggaaggggagaggccaggaaaagtgcgtgaagatacataccaaacacacaacgctcaactctcgcagagctttctctaaatgcatctcacttaccgaaagagtacctgaaaaacaaaagaagaaacgagtattaacactttggcttgtttcaaccaaaaacccactgtttccccactgagtgaagcccaccctggcacccagcacggtgtggggtcagggaagccctgcgaggaggacctgcccgctgggcattaggggaacaggagcccctccccacggctcacacacaggcaggcccagaacaggcaaccaaaacatattccaagatacacctactaagtacccatagaaataaaaaaatatgtattttgcga

SEQ ID NO: 25330 - protein, 99 aa, Homo sapiens; identical to SEQ ID NO: 25328

SEQ ID NO: 25331 - DNA, 3733 bp, Homo sapiens
aaaactagcatggagatcccctagaggtcggattttcaacataatctcagtgagcccaggactccaatgtgacaatgtggaactggaaagacgagcaagaaaagcccctccgttcccgccagcgttgggcattccttctgcagtccaggctgtccccgtcactcgggatcacagccaagcggtgggttctgtgtggtgcttggctcctagggcctcgcggaagccatgttcttctccattcagcttcatggagagactttcccaggtttcagcccacgctacgaagctagacaggagagtggcccccacccgccctgtttggaacccagctggggcatgcggtgtttggaacacatgggcagattggggagaggccagaagagcctcatccagagccaaggacaagccttgaggctgaagagctcaccaaggccactacaagagagcaaaaaaaagagcctcagagactcctcgataaataaccagaacagagagcaaaggtggagagcaggagggcaaggcactgagactttagaagcttccagggagaagaagagtcagatgcttgaagatgcctcctcaatgctgcaaagctctgagggaaagtggctttgatggagaattagagatccgggcaagttggtcctttctggaaaagctgcttggggatacactccagcaaaaagagaatccaccagcaaacaggaaggcatgagcagcccaggaagtatgaacacaaccaagggagggctgtggcagtatctgtcctgctgggccgcacctcggggctggaggtgggtagaggggaaagaaggggtaatggctggaaaagtgtcccatgctgacactaagccctggtagagaccacctgctacgggtcagcacatttcactgagcaggagatgcccctagaagacaagggatagaggtataaagaaagtcctctccctgactgcaaggagctagaggggagacaggcacaagaacaacactggaatggggacaatatcagccgcaaaggaagcagagagcagggctccggtggtcagccctgggtggggtcaggagtccacgagtgatgagggctaagtctgaaggccagaagggtgtcggcagccacggagagaacaagtacagttaaccctgggaaggcagaggccaggtggtctcaggaccacggtcaggaagagatgcctcacgtggcggggacacagcgggagcagttcaggcaccacggctcgtccactggggccccagcctctcactgcaagcagtgcaggtggacatctgccccagaggcagcagggagcgtgtgtcccaaagcccccagcactcatgccctgtgcaggcgccgagcagccggccctggccggggcggttccctcctaggcctgtccaggactcggcccccacaaacacatggaccgacagacgaaatccctcaggagtgtctctgcgccgacgccatggcacccacgaaaagtgccacacataaagtcagtctgcaaatgccaacgttacccagtcttcatgtcacatttcacctacagatcccttccgaattgtaacaatatctcataaatgtttgagcttcaaaggaaaggtcctttccgacgttcagatatatatactccgtggctgcctgcgagccgtctcccaggcgggtgtgtccttggtccgccttctgggaagtgtgcacaggcaaggaatcccatgtcagcctcaggacggcccagcggtcactctcacctcatcagtgacaggaaggtcttgatgagcaacttggccaaggccacacagctaaggtgtggcccaccaaccctgagccccactacttccacctgtcacagcttccagaaagttctctgcagtgaactgctatcaacccaattctgaccaactgtaattacactgtttccagataacaccttaattctgaggcagttaaaatgcattgtgtacatatactatgtgactctcatcaatagcaaaccaacgtcagttcagtccaggagaacccacccagggtgggcagctctagcctagggtgtcttcagtagcacctgcaaggctgtccttcccccgtcttgtcagggaatccagctctaccactggcgctgtaacagacacagggctgctggaaattccaggagtccagccccagctgcctgtggccgcccatggacggacctggccaggccccctgggagggggatttcaaagcatcaaggagccggcctggctgacgaggctccagaccagctgtttgccacacacgcccccgtactgcagggttgaccagtgagggcctcaatcttccgcagggaacgccgggccacaacgtcgacgcacgaccctgggggttcctgccataaaacagtgagggattctggccaggctgctctgccctctgttccggtgagcctgggcatggtgcccactcttgggttcggtttccttattgcgcacacagacagcagcaggcctgactgcaggaggcaccggcacccatgggcggccggcactgcccctacacaccaagaacatggcacccaggtcccgctgcttaggccggaaactcctgtcacataagcttttactcgtccagatttcagccattcctgggagtgacatctgtgctgaggggaagctcagtgtcagtgtcaggcatccccgaccacctcgggcagcctcggtcctcccaggagccgtcacggcccgagaacgccgctgcccagatgtgaaccgggtgtccaggatacgcaggctgcacagtggcgtgaatgaagggcagggctgaactccagggcctacggacaatcgctgcacagccgggccagtggctgaccctgcttcctcgctgtccactgggggtagtggcgttgtcaccaggaggtcagcaccgggcagggtgctacttcagcatctgctcaacgcagtaatcacactagggacccgagtccacacgtcaggaagacaggtgtgtcttcaactctgagccctgtgaaaatgccgctttccgctaacacactccggctcccacagcacagcagggcatgcccgacaccccaggacgcccgcggtatgcacgtctgtgtgcagtgagcacacccctagcacctacacacctcggtggcagcacatggaaacgcccaggcccgcggtgggaaggagccagccccaggacggatgcaaagtcaggttgaatgcagaggcctgtcgctggcagccggcctctccaggtctggcttcgaagcttccccgacagggcaggcgtttctgtgttctcctgatctgtacatctttactacatgtctgctgagacaatctgcctaagggtaagcctccctcagttcaatgtcttttaacaaggggagtttccacagaatacatttggttatgtgtttaattacaagtgtttcaatagctataaacattgtaaaattcagtatcaagtgaaatatttggagagcccctatggcaacttggaaaaaccctgggattctgaggaacagggagtagcgcacagtcccagtaaaatccagaactttctagaaggagataaatgcaggatgactgcctgcttgccctgggccagctcagccagaaaaccatgtccctgaaagatgggaaactggttccttgatacagcagaaaaacactgattctaccccaaatgtaccgtctttattgcttgtttaattacctgtttaattatatcttcaccacctgc

SEQ ID NO: 25332 - protein, 129 aa, Homo sapiens [sequence omitted]

SEQ ID NO: 25333 - DNA, 441 bp, Homo sapiens
tgaacccgcgctggcgggagtagctactgaccgctggggacccctgcccaggctgttcgcatgtggaaaggattcagggagcaggcgatgcccaaagcgtggagaccagcactgctctctccccagtgacagtacagctgtgccgtgtacaggagggtgctgtctgacgccagacacctggactacagatcgcagcctgattcctgagttcatgaggccccttgcccggaatgtccacatttgaaacctcccaacaccgagccccatttcaagtataaccaggagggaaaatggtgcttgaaataagcatgccacaaaggaaaacctgctttctcgaaatgggccctggccgcccaggccctgacctccccggccaggatggaacgttccagagacccattagtgccaaaggcaaatgaaaacacaccctgtgaaaatgtc

SEQ ID NO: 25334 - protein, 42 aa, Homo sapiens [sequence omitted]

SEQ ID NO: 25335 - DNA, 384 bp, Homo sapiens
gggagcctcctgatccatgaacccgcgctggcgggagtagctactgaccgctggggacccctgcccaggctgttcgcatgtggaaaggattcagggagcaggcgatgcccaaagcgtggagaccagcactgctctctccccagtgacagagttcatgaggccccttgcccggaatgtccacatttgaaacctcccaacaccgagccccatttcaagtataaccaggagggaaaatggtgcttgaaataagcatgccacaaaggaaaacctgctttctcgaaatgggccctggccgcccaggccctgacctccccggccaggatggaacgttccagagacccattagtgccaaaggcaaatgaaaacacaccctgtgaaaatgtc

SEQ ID NO: 25336 - protein, 42 aa, Homo sapiens [sequence omitted]

SEQ ID NO: 25337 - DNA, 1686 bp, Homo sapiens
ggggcctaggccagtcagctgaggacgtgttggtgcactcccgggagggcggtatgtgggtgaggatccccatgcagagtggtgcccacaaaccccccttccagagtcatctctggtccaccttgaagtccccaggaaaatgacctcgtcctccgcgggtgtgagccactaggcctgagaggacgccgggacggagctttcagagagggaggtgtcgggatggcttgagggtcaccaggtattaattaagcacttgctgtgtgccaggcactttcccacacaggatggagccgggccaccctcacagctcctgccctgcagacgctggccttgtggagggaggcaggcagcaggagcagtgctttctgggcctctgtagccagagctggccctgctgcagcttacgtctgcctgcagcccagacgtcctcctggtcctcctgatgcccccgacctccacggaggacgagcatttccagcccagccctccccatcttcacctcgcactcccctgacacactgggagcctcctgatccatgaacccgcgctggcgggagtagctactgaccgctggggacccctgcccaggctgttcgcatgtggaaaggattcagggagcaggcgatgcccaaagcgtggagaccagcactgctctctccccagtgacaggtgcacgcccagatcacggatgtgtcgggaacagctgtgctcctgctgctcagcgtccgtcactccaggctgggagcgggtccccaagcttctggctgggcctatccgtctccactctcagtgtgggggtggggggcgccaacagcacgcatttgctctctgcacttctcgtctgataatgggcagagggtccttctgcagccccaaaacatccctaggcaggagccctggggccccaagcagccagggaggtgagcaccaaggacctcccagagagcgtcaccttccgtcgagggaggcccagcctgggggcggtgtctgagacttggaatcaacgcttccgttggtggcagtaaatcctgtccctaaccctgcagtacagctgtgccgtgtacaggagggtgctgtctgacgccagacacctggactacagatcgcagcctgattcctggtcattgctccactgaaccccagaccccagcctcgttctgggccctcatcccctagatccagggaccccagccccatttcagcccttgggcccttgtaggatgcgaggccctgggccccagcccccagcccatccgtggcccaggcactggggggctgaggtcctctgagaagggacacagggcctggggggctctctcagcccatcagcaggagaggactgactccagaaaaatcagcgtttgtacccactcaggctgccaagacctgtgtccgtccttccaagctcaaccttcagagttcatgaggccccttgcccagaatgtccacagagttcatgaggccccttgcccggaatgtccacatttgaaacctcccaacaccgagccccatttcaagtataaccaggagggaaaatggtgcttgaaataagcatgccacaaaggaaaacctgctttctcgaaatgggccctggccgcccaggccctgacctccccggccaggatggaacgttccagagacccattagtgccaaaggcaaatgaaaacacaccctgtgaaaatgtc

SEQ ID NO: 25338 - protein, 52 aa, Homo sapiens
MEPGHPHSSCPADAGLVEGGRQQEQCFLGLCSQSWPCCSLRLPAAQTSSWSS

SEQ ID NO: 25339 - DNA, 1869 bp, Homo sapiens
ggcgccgcaccacgtgggccaggcgccccacgcctggagctcccctctctggagccccgggaaaggaagcggggcagggaggccgggtgggagcaggggggtctccggcgcttcctctcctctgcgggcgccgcgcggctcctgagagtccgccccccgtcctgacgctcagctaggaagcgggtcctcgggcccctcccccgacacacacacacacacacacacacacacacacacacacacacactctctctctctctctctctctctctctctctctctctctctctcacacacacacacacacacacagcccgtctcgcgcctgaggtctcgcccgcaggccggtggcgcggggtcagctgctgcctgcggtccaggacagggtcggttccgccgcgcagcgcccaggcccagctcgtccagagtctgcggacagcgcacgtccaggcactttcccacacaggatggagccgggccaccctcacagctcctgccctgcagacgctggccttgtggagggaggcaggcagcaggagcagtgctttctgggcctctgtagccagagctggccctgctgcagcttacgtctgcctgcagcccagacgtcctcctggtcctcctgatgcccccgacctccacggaggacgagcatttccagcccagccctccccatcttcacctcgcactcccctgacacactgggagcctcctgatccatgaacccgcgctggcgggagtagctactgaccgctggggacccctgcccaggctgttcgcatgtggaaaggattcagggagcaggcgatgcccaaagcgtggagaccagcactgctctctccccagtgacaggtgcacgcccagatcacggatgtgtcgggaacagctgtgctcctgctgctcagcgtccgtcactccaggctgggagcgggtccccaagcttctggctgggcctatccgtctccactctcagtgtgggggtggggggcgccaacagcacgcatttgctctctgcacttctcgtctgataatgggcagagggtccttctgcagccccaaaacatccctaggcaggagccctggggccccaagcagccagggaggtgagcaccaaggacctcccagagagcgtcaccttccgtcgagggaggcccagcctgggggcggtgtctgagacttggaatcaacgcttccgttggtggcagtaaatcctgtccctaaccctgcagtacagctgtgccgtgtacaggagggtgctgtctgacgccagacacctggactacagatcgcagcctgattcctggtcattgctccactgaaccccagaccccagcctcgttctgggccctcatcccctagatccagggaccccagccccatttcagcccttgggcccttgtaggatgcgaggccctgggccccagcccccagcccatccgtggcccaggcactggggggctgaggtcctctgagaagggacacagggcctggggggctctctcagcccatcagcaggagaggactgactccagaaaaatcagcgtttgtacccactcaggctgccaagacctgtgtccgtccttccaagctcaaccttcagagttcatgaggccccttgcccagaatgtccacagagttcatgaggccccttgcccggaatgtccacatttgaaacctcccaacaccgagccccatttcaagtataaccaggagggaaaatggtgcttgaaataagcatgccacaaaggaaaacctgctttctcgaaatgggccctggccgcccaggccctgacctccccggccaggatggaacgttccagagacccattagtgccaaaggcaaatgaaaacacaccctgtgaaaatgtc

SEQ ID NO: 25340 - protein, 52 aa, Homo sapiens; identical to SEQ ID NO: 25338

SEQ ID NO: 25341 - DNA, 2027 bp, Homo sapiens
ggcgccgcaccacgtgggccaggcgccccacgcctggagctcccctctctggagccccgggaaaggaagcggggcagggaggccgggtgggagcaggggggtctccggcgcttcctctcctctgcgggcgccgcgcggctcctgagagtccgccccccgtcctgacgctcagctaggaagcgggtcctcgggcccctcccccgacacacacacacacacacacacacacacacacacacacacacactctctctctctctctctctctctctctctctctctctctctctcacacacacacacacacacacagcccgtctcgcgcctgaggtctcgcccgcaggccggtggcgcggggtcagctgctgcctgcggtccaggacagggtcggttccgccgcgcagcgcccaggcccagctcgtccagagtctgcggacagcgcacgtccagacatcgcccactcgggctcacagtgccatccgggtgaggacctccgtggagagctctctttgccaaagaaaagcagttgcattaggtctgcgagcaggcagggtggcctcttcctggctccccatccaccaaggaagcttcaagtccctgggacacaggcactttcccacacaggatggagccgggccaccctcacagctcctgccctgcagacgctggccttgtggagggaggcaggcagcaggagcagtgctttctgggcctctgtagccagagctggccctgctgcagcttacgtctgcctgcagcccagacgtcctcctggtcctcctgatgcccccgacctccacggaggacgagcatttccagcccagccctccccatcttcacctcgcactcccctgacacactgggagcctcctgatccatgaacccgcgctggcgggagtagctactgaccgctggggacccctgcccaggctgttcgcatgtggaaaggattcagggagcaggcgatgcccaaagcgtggagaccagcactgctctctccccagtgacaggtgcacgcccagatcacggatgtgtcgggaacagctgtgctcctgctgctcagcgtccgtcactccaggctgggagcgggtccccaagcttctggctgggcctatccgtctccactctcagtgtgggggtggggggcgccaacagcacgcatttgctctctgcacttctcgtctgataatgggcagagggtccttctgcagccccaaaacatccctaggcaggagccctggggccccaagcagccagggaggtgagcaccaaggacctcccagagagcgtcaccttccgtcgagggaggcccagcctgggggcggtgtctgagacttggaatcaacgcttccgttggtggcagtaaatcctgtccctaaccctgcagtacagctgtgccgtgtacaggagggtgctgtctgacgccagacacctggactacagatcgcagcctgattcctggtcattgctccactgaaccccagaccccagcctcgttctgggccctcatcccctagatccagggaccccagccccatttcagcccttgggcccttgtaggatgcgaggccctgggccccagcccccagcccatccgtggcccaggcactggggggctgaggtcctctgagaagggacacagggcctggggggctctctcagcccatcagcaggagaggactgactccagaaaaatcagcgtttgtacccactcaggctgccaagacctgtgtccgtccttccaagctcaaccttcagagttcatgaggccccttgcccagaatgtccacagagttcatgaggccccttgcccggaatgtccacatttgaaacctcccaacaccgagccccatttcaagtataaccaggagggaaaatggtgcttgaaataagcatgccacaaaggaaaacctgctttctcgaaatgggccctggccgcccaggccctgacctccccggccaggatggaacgttccagagacccattagtgccaaaggcaaatgaaaacacaccctgtgaaaatgtc

SEQ ID NO: 25342 - protein, 52 aa, Homo sapiens; identical to SEQ ID NO: 25338

SEQ ID NO: 25343 - DNA, 3347 bp, Homo sapiens
ggcgccgcaccacgtgggccaggcgccccacgcctggagctcccctctctggagccccgggaaaggaagcggggcagggaggccgggtgggagcaggggggtctccggcgcttcctctcctctgcgggcgccgcgcggctcctgagagtccgccccccgtcctgacgctcagctaggaagcgggtcctcgggcccctcccccgacacacacacacacacacacacacacacacacacacacacacactctctctctctctctctctctctctctctctctctctctctctcacacacacacacacacacacagcccgtctcgcgcctgaggtctcgcccgcaggccggtggcgcggggtcagctgctgcctgcggtccaggacagggtcggttccgccgcgcagcgcccaggcccagctcgtccagagtctgcggacagcgcacgtccaggtaacgcgcttcaaggggccgcggctcggagctgggggaccccgggccgccctgcccatacgagtgcgagcgtggagagcgcgggcgggggcgcggtcccgggggccggccagctggagggggcgggagcgctgggcggggcctgcgctgaccccggcgctgagtccctggggccgccgggcggatggcgtggccggacgcgggggccccgggccttccgggcgtgacctagggctcgggggcggggaggcccctccggcggggcggccctgggtggtccggcagaggcggaggccgctccgagcctgtgagccctgggcgcctgcggaggcggggagagggcggggtgtgccgccctggtggggaccgcggggtcggagaggggacattgccccccccgaggcgaacgtccaaccgcgggtccgggtccccgcccaaggccgccccgcgaggtggcctcggcccggccgtccccgagggtggctcggatcctttcaaccagcgcgctggaggcgaaggggctgcgccattccgggtcaggcagccaacgcgggacacgcgcgtctccgagcttgcggcccgcgaaacccgggtgacctaccgcgccggtgccctcaaagcccccacgcccgggccggtggccgctgcagccactgagccacgcggtctccccggcccggtcggcagaaggagctggtccgttactagaaaagtccagatgcaaagtcgggggtcgtgctgccgcttcctgccagcgcaccgcacccacctggggccgccaccgaccgcacaggacgcgcctcctaccccctgttctggcccggccgagagctggtgcccccagcggccgcccgcccccgtccgcagaccccggggcccttgctgctttgcattgggaacaaccggagccaggcccggagctgagggggccagggcctttggaggaagcattggcctccaggctgaagagcaagggccgtgtcacctgcccggagggcggtctcatctctgcagccaggtcagaggaagcagcggtggggagacggagtgcgcgagttgggaggctccacgcatcgtaggtggagagctggctgccagcctggcctgccctctcttccccgtcccaccatctcgcttggctccggcacctgcctgggaagacccacacctccgtctgcagtgcctcttccccctggaggccctgccctccgctcggggtccccgcatccttccgtggccctcagagcatcgcctggggcgcccgcggaactcatctgttaggcctgggatgcaggcaggcagaagtgggggtttaagtggaagcagtgagggtgggggtccggtccaaactgtgccaccttccaccccctgcccctgggagagcagacatcgcccactcgggctcacagtgccatccgggtgaggacctccgtggagagctctctttgccaaagaaaagcagttgcattaggtctgcgagcaggcagggtggcctcttcctggctccccatccaccaaggaagcttcaagtccctgggacacaggtggggaactccagcacccctggaggaagggagactgaggttggggagtggcatccaggccctgactctggggcacggtggtctgtgcaactgagaccctgcctcaggctccaacagcgcctgctcctttccccaggttgcagtgatcaccaggggaggtgctgggcgtgcaggctgccacaggaggggtggggaggtggggagtctctgtggcggggtggtgggggcctaggccagtcagctgaggacgtgttggtgcactcccgggagggcggtatgtgggtgaggatccccatgcagagtggtgcccacaaaccccccttccagagtcatctctggtccaccttgaagtccccaggaaaatgacctcgtcctccgcgggtgtgagccactaggcctgagaggacgccgggacggagctttcagagagggaggtgtcgggatggcttgagggtcaccagcccagacgtcctcctggtcctcctgatgcccccgacctccacggaggacgagcatttccagcccagccctccccatcttcacctcgcactcccctgacacactgggagcctcctgatccatgaacccgcgctggcgggagtagctactgaccgctggggacccctgcccaggctgttcgcatgtggaaaggattcagggagcaggcgatgcccaaagcgtggagaccagcactgctctctccccagtgacagtacagctgtgccgtgtacaggagggtgctgtctgacgccagacacctggactacagatcgcagcctgattcctggtcattgctccactgaaccccagaccccagcctcgttctgggccctcatcccctagatccagggaccccagccccatttcagcccttgggcccttgtaggatgcgaggccctgggccccagcccccagcccatccgtggcccaggcactggggggctgaggtcctctgagaagggacacagggcctggggggctctctcagcccatcagcaggagaggactgactccagaaaaatcagcgtttgtacccactcaggctgccaagacctgtgtccgtccttccaagctcaaccttcagagttcatgaggccccttgcccagaatgtccacagagttcatgaggccccttgcccggaatgtccacatttgaaacctcccaacaccgagccccatttcaagtataaccaggagggaaaatggtgcttgaaataagcatgccacaaaggaaaacctgctttctcgaaatgggccctggccgcccaggccctgacctccccggccaggatggaacgttccagagacccattagtgccaaaggcaaatgaaaacacaccctgtgaaaatgtc

SEQ ID NO: 25344 - protein, 234 aa, Homo sapiens
MQSRGSCCRFLPAHRTHLGPPPTAQDAPPTPCSGPAESWCPQRPPAPVRRPRGPCCFALGTTGARPGAEGARAFGGSIGLQAEEQGPCHLPGGRSHLCSQVRGSSGGETECASWEAPRIVGGELAASLACPLFPVPPSRLAPAPAWEDPHLRLQCLFPLEALPSARGPRILPWPSEHRLGRPRNSSVRPGMQAGRSGGLSGSSEGGGPVQTVPPSTPCPWESRHRPLGLTVPSG

SEQ ID NO: 25345 - DNA, 3724 bp, Homo sapiens
ggcgccgcaccacgtgggccaggcgccccacgcctggagctcccctctctggagccccgggaaaggaagcggggcagggaggccgggtgggagcaggggggtctccggcgcttcctctcctctgcgggcgccgcgcggctcctgagagtccgccccccgtcctgacgctcagctaggaagcgggtcctcgggcccctcccccgacacacacacacacacacacacacacacacacacacacacacactctctctctctctctctctctctctctctctctctctctctctcacacacacacacacacacacagcccgtctcgcgcctgaggtctcgcccgcaggccggtggcgcggggtcagctgctgcctgcggtccaggacagggtcggttccgccgcgcagcgcccaggcccagctcgtccagagtctgcggacagcgcacgtccaggtaacgcgcttcaaggggccgcggctcggagctgggggaccccgggccgccctgcccatacgagtgcgagcgtggagagcgcgggcgggggcgcggtcccgggggccggccagctggagggggcgggagcgctgggcggggcctgcgctgaccccggcgctgagtccctggggccgccgggcggatggcgtggccggacgcgggggccccgggccttccgggcgtgacctagggctcgggggcggggaggcccctccggcggggcggccctgggtggtccggcagaggcggaggccgctccgagcctgtgagccctgggcgcctgcggaggcggggagagggcggggtgtgccgccctggtggggaccgcggggtcggagaggggacattgccccccccgaggcgaacgtccaaccgcgggtccgggtccccgcccaaggccgccccgcgaggtggcctcggcccggccgtccccgagggtggctcggatcctttcaaccagcgcgctggaggcgaaggggctgcgccattccgggtcaggcagccaacgcgggacacgcgcgtctccgagcttgcggcccgcgaaacccgggtgacctaccgcgccggtgccctcaaagcccccacgcccgggccggtggccgctgcagccactgagccacgcggtctccccggcccggtcggcagaaggagctggtccgttactagaaaagtccagatgcaaagtcgggggtcgtgctgccgcttcctgccagcgcaccgcacccacctggggccgccaccgaccgcacaggacgcgcctcctaccccctgttctggcccggccgagagctggtgcccccagcggccgcccgcccccgtccgcagaccccggggcccttgctgctttgcattgggaacaaccggagccaggcccggagctgagggggccagggcctttggaggaagcattggcctccaggctgaagagcaagggccgtgtcacctgcccggagggcggtctcatctctgcagccaggtcagaggaagcagcggtggggagacggagtgcgcgagttgggaggctccacgcatcgtaggtggagagctggctgccagcctggcctgccctctcttccccgtcccaccatctcgcttggctccggcacctgcctgggaagacccacacctccgtctgcagtgcctcttccccctggaggccctgccctccgctcggggtccccgcatccttccgtggccctcagagcatcgcctggggcgcccgcggaactcatctgttaggcctgggatgcaggcaggcagaagtgggggtttaagtggaagcagtgagggtgggggtccggtccaaactgtgccaccttccaccccctgcccctgggagagcagacatcgcccactcgggctcacagtgccatccgggtgaggacctccgtggagagctctctttgccaaagaaaagcagttgcattaggtctgcgagcaggcagggtggcctcttcctggctccccatccaccaaggaagcttcaagtccctgggacacaggtggggaactccagcacccctggaggaagggagactgaggttggggagtggcatccaggccctgactctggggcacggtggtctgtgcaactgagaccctgcctcaggctccaacagcgcctgctcctttccccaggttgcagtgatcaccaggggaggtgctgggcgtgcaggctgccacaggaggggtggggaggtggggagtctctgtggcggggtggtgggggcctaggccagtcagctgaggacgtgttggtgcactcccgggagggcggtatgtgggtgaggatccccatgcagagtggtgcccacaaaccccccttccagagtcatctctggtccaccttgaagtccccaggaaaatgacctcgtcctccgcgggtgtgagccactaggcctgagaggacgccgggacggagctttcagagagggaggtgtcgggatggcttgagggtcaccagcccagacgtcctcctggtcctcctgatgcccccgacctccacggaggacgagcatttccagcccagccctccccatcttcacctcgcactcccctgacacactgggagcctcctgatccatgaacccgcgctggcgggagtagctactgaccgctggggacccctgcccaggctgttcgcatgtggaaaggattcagggagcaggcgatgcccaaagcgtggagaccagcactgctctctccccagtgacaggtgcacgcccagatcacggatgtgtcgggaacagctgtgctcctgctgctcagcgtccgtcactccaggctgggagcgggtccccaagcttctggctgggcctatccgtctccactctcagtgtgggggtggggggcgccaacagcacgcatttgctctctgcacttctcgtctgataatgggcagagggtccttctgcagccccaaaacatccctaggcaggagccctggggccccaagcagccagggaggtgagcaccaaggacctcccagagagcgtcaccttccgtcgagggaggcccagcctgggggcggtgtctgagacttggaatcaacgcttccgttggtggcagtaaatcctgtccctaaccctgcagtacagctgtgccgtgtacaggagggtgctgtctgacgccagacacctggactacagatcgcagcctgattcctggtcattgctccactgaaccccagaccccagcctcgttctgggccctcatcccctagatccagggaccccagccccatttcagcccttgggcccttgtaggatgcgaggccctgggccccagcccccagcccatccgtggcccaggcactggggggctgaggtcctctgagaagggacacagggcctggggggctctctcagcccatcagcaggagaggactgactccagaaaaatcagcgtttgtacccactcaggctgccaagacctgtgtccgtccttccaagctcaaccttcagagttcatgaggccccttgcccagaatgtccacagagttcatgaggccccttgcccggaatgtccacatttgaaacctcccaacaccgagccccatttcaagtataaccaggagggaaaatggtgcttgaaataagcatgccacaaaggaaaacctgctttctcgaaatgggccctggccgcccaggccctgacctccccggccaggatggaacgttccagagacccattagtgccaaaggcaaatgaaaacacaccctgtgaaaatgtc

SEQ ID NO: 25346 - protein, 234 aa, Homo sapiens; identical to SEQ ID NO: 25344

SEQ ID NO: 25347 - DNA, 3059 bp, Homo sapiens
ggcgagggtcggggccaccgcgcggcgacctcgggtcccggagcgaccgcagggcagccccgggcgccggccccggtgcgcgtctcctgtgcgcgcccctccgcgcgcggccccgatgctggacatgagcgaggcccgctcccagccgccctgcagcccgtccggcaccgccagctccatgtcgcacgtggaggactcggactcggacgcgccgccgtctcccgccggctccgagggcctgggccgcgcgggggtcgcggtggggggcgcccggggcgacccggcggaggcggcggacgagcgcttcccggcctgcatccgcgacgccgtgtcgcaggtgctcaagggctacgactggagtctggtgcccatgccggtgcgcggcggcggcggcggcgcgctcaaagccaagccgcatgtgaagcggcccatgaacgcattcatggtgtgggcgcaggcggcgcgccgcaagctggccgaccagtacccgcacctgcacaacgccgagctcagcaagacgctgggcaagctgtggcgcttgctgagcgagagcgagaagcggcccttcgtggaggaggcagagcgccttcgcgtgcagcacaagaaggaccaccccgactacaagtaccagccacggcgcaggaagagcgccaaagccggccacagcgactccgactcgggcgcggagctgggaccccaccctggcggcggtgccgtgtacaaggctgaagcagggcttggagatgggcaccaccatggcgaccacacagggcagacccacgggccgcccaccccgcccaccacccccaagacggagctgcagcaggcgggcgccaagccggagctgaagctggagggacgccggccggtggacagcgggcgccagaacatcgacttcagcaatgtggacatctcggagctcagcagcgaggtcatgggcaccatggacgccttcgacgtccacgagttcgaccagtacctgcccctgggcggccccgccccacccgagccgggccaggcctatgggggcgcctacttccacgccggggcgtcccccgtgtgggcccacaagagtgccccgtcggcctccgcgtcgcccaccgagacgggtcccccacggccgcacatcaagacggagcagccgagccccggccactacggcgaccagccccgaggctcgcccgactacggttcctgcagcggccagtccagcgccaccccggccgcccccgccggccccttcgccggctcacagggcgactatggcgacctgcaggcctccagctactatggtgcctaccctggctacgcacccggcctctaccagtacccctgcttccactcgccgcgccggccctacgcctcacccctgctcaacggcctggccctgccgcccgcccacagccccaccagtcactgggaccagccggtgtacaccaccctgaccaggccctgagggcccagccgcggggagggactcgcaggcgtcagggggcagccttgtcccggcccagtgtgtgtgaccagggcgggaggggccccagtggctgagctccaagtgcctgctgaagtctgcagggaaacacgcttgctgcccgtggccctcggcctccagatggccacacctctgccgacgacggaccagctccctctcccttctatctttctttttgaggtggtgggattattccacaaagaagggctgccgtttggtccctcttccgtgaggactggcggcaccagcaccttcgctttgcatctcggtagaggagaaacggcagcacagcccaaggaccaaaggagggggtggcaggggccttgcagggcgctgtgaggtccaggccggtcttggcgccgagagcccctgcactcaaggccacattccctcgacaacggctgcacgggctgtccgggatccggggtgtctgtccgcagactgggatgagtctactcgagcatctccgggacctgcctgtcagatctgaggtgtctccttgctggcagagtgcgctcacgcgagggctggctgtgatgaacacatctctcttttatttttatgtttttgataatttttatttttgaagcttaaatgtgtttcttctgaaagctgttaaagatgtatttatgttctgtgttattttatctttaattaatgaggtaattcgggcaaagagtagaatttaagacaaaacggaagctgggaagcttcccttgagggcaggcaggaggtggagttgcagctgttggccggcatcacgttgctcgttgctcggcttatgggaggccgccctggagggcccggaggtcccaaggtccctgggaggactgggcccctcatgcctcgagcttggcaaccgaaaacccgagggaggagaagggacctgccttgtgacatctctgatcaggttggggtgccccagcacccagtaccagtttggggtttgggaagcaggactccgtccctgtccccgactgtgccacgtggtaggacacataggacacaggaattcctgggtccttgcccatgactgtgccatgtggtaggacacaggacacaggaattcctggaaagtggtggcttcagaagtgatcttggctcgcaggcaccagtgccacctaccaagctgtgaaactaaaccttctccactaaacgtcgttagggcctcagttctagacgagtcatacctgattcacctgcactgcttcccctgtgtgctgagcatagagcatacaatagcgcctacttcacggaaacttgtgcctttaaactttgtaaacttaaacacagccgagaagttgcttctttgtactttttctacttttcctacttttttgtagaaaaaaaagataatgcctctgcttctatttctctgggggtgggggtgggggccgggagccgtcgcagacccgtttcatgcagcgtctcccttggcaccgcgttcggaggacgcaccctcactcccctgctgccttcactcctttctgaccaagcaacgctaacttttgtacagatcgatttgataaaattaaacaaagtgctttttatggacgtgggctgc

SEQ ID NO: 25348 - protein, 446 aa, Homo sapiens [sequence omitted]

SEQ ID NO: 25349 - DNA, 4322 bp, Homo sapiens
ggacatgagcgaggcccgctcccagccgccctgcagcccgtccggcaccgccagctccatgtcgcacgtggaggactcggactcggacgcgccgccgtctcccgccggctccgagggcctgggccgcgcgggggtcgcggtggggggcgcccggggcgacccggcggaggcggcggacgagcgcttcccggcctgcatccgcgacgccgtgtcgcaggtgctcaagggctacgactggagtctggtgcccatgccggtgcgcggcggcggcggcggcgcgctcaaagccaagccgcatgtgaagcggcccatgaacgcattcatggtgtgggcgcaggcggcgcgccgcaagctggccgaccagtacccgcacctgcacaacgccgagctcagcaagacgctgggcaagctgtggcggtgagtgccggcgccccgggggcggggttcgggaccttggccgcccctggtctcggactgcgagcgggggcctggagggcgcagagctcgcggaggtggtggccacacgcaggctccgggctctgcaccccgggcgggtgtcagggcgggtcccagtggaaaaacatcctctggccagccggggtccggcgccagctatgggagtcgggatccgcggagggcagcgcctggggtgtgcaccctcgtggcgggtgcgctctggagccagttctcctggcggggaacaccctgcggagggccatggctggcaccccgacgtgccctccagccgttgcgagtggccccagccccgggaggcacgcccggcacgacagcaagttgcatgcggctctctggaggtgctccctccttagaaagggctcagctcctctagctcctggaccacccatggggagggagtgcggcaggcggatgggtgggcagcaggtttgcctgcgagtaccctccccgcagtttctccctctcctggacaccctcggtccgaagcagggagggcaggagtggagatgacggggtgcgccgtgtgcacgccttggcgtggtggggccggtcagttttccagaaattaggactgcagagtgaagaacttgttgctcaggacaggccgcccccaccgagtgtcctctggttgggtttcaaatggttctcttggtttggggctctggttcccgtatcctgctcctcacctggaagaagggagcttggagcttgcgtatttgcacctcctgccttctgtctggatctagggcgcagccacggggcgctgtggacggcaggcccctgctcccccaagtcctgccgcacaggcggttggaggtgagcctcgggaagagtcccaaggagtgtgtcctgtggctcagtgaggacgggcgcctgggccctgccagggcttctgggtgtctgggaatggagggacagcagcccagctgcccgccgaaggccggcaccgttcccgggaagcctcgcttttgtccaccgccggctgggtcctgcccgcctcccccgcctcccttagaaagccccagagggagggaacagcaggcccggaatagggggaaatagaaggaggaagatgggaggcgtggggcttgttcttctttggctgtcgtaagcataccaaccttcccaaacaggcgccggccggttctcccagaggagtgtactgcctggtgccacgggaggctccggagcgcacggcaggcgggtttccctggtcagagcctcctggccccggcctctgctgccggttccccctgtggtgtgtgcctgcgccgagggcacagtgggcgccctggccatccctgcctctgccctgtgctgcagcttgctgagcgagagcgagaagcggcccttcgtggaggaggcagagcgccttcgcgtgcagcacaagaaggaccaccccgactacaagtaccagccacggcgcaggaagagcgccaaagccggccacagcgactccgactcgggcgcggagctgggaccccaccctggcggcggtgccgtgtacaaggctgaagcagggcttggagatgggcaccaccatggcgaccacacagggcagacccacgggccgcccaccccgcccaccacccccaagacggagctgcagcaggcgggcgccaagccggagctgaagctggagggacgccggccggtggacagcgggcgccagaacatcgacttcagcaatgtggacatctcggagctcagcagcgaggtcatgggcaccatggacgccttcgacgtccacgagttcgaccagtacctgcccctgggcggccccgccccacccgagccgggccaggcctatgggggcgcctacttccacgccggggcgtcccccgtgtgggcccacaagagtgccccgtcggcctccgcgtcgcccaccgagacgggtcccccacggccgcacatcaagacggagcagccgagccccggccactacggcgaccagccccgaggctcgcccgactacggttcctgcagcggccagtccagcgccaccccggccgcccccgccggccccttcgccggctcacagggcgactatggcgacctgcaggcctccagctactatggtgcctaccctggctacgcacccggcctctaccagtacccctgcttccactcgccgcgccggccctacgcctcacccctgctcaacggcctggccctgccgcccgcccacagccccaccagtcactgggaccagccggtgtacaccaccctgaccaggccctgagggcccagccgcggggagggactcgcaggcgtcagggggcagccttgtcccggcccagtgtgtgtgaccagggcgggaggggccccagtggctgagctccaagtgcctgctgaagtctgcagggaaacacgcttgctgcccgtggccctcggcctccagatggccacacctctgccgacgacggaccagctccctctcccttctatctttctttttgaggtggtgggattattccacaaagaagggctgccgtttggtccctcttccgtgaggactggcggcaccagcaccttcgctttgcatctcggtagaggagaaacggcagcacagcccaaggaccaaaggagggggtggcaggggccttgcagggcgctgtgaggtccaggccggtcttggcgccgagagcccctgcactcaaggccacattccctcgacaacggctgcacgggctgtccgggatccggggtgtctgtccgcagactgggatgagtctactcgagcatctccgggacctgcctgtcagatctgaggtgtctccttgctggcagagtgcgctcacgcgagggctggctgtgatgaacacatctctcttttatttttatgtttttgataatttttatttttgaagcttaaatgtgtttcttctgaaagctgttaaagatgtatttatgttctgtgttattttatctttaattaatgaggtaattcgggcaaagagtagaatttaagacaaaacggaagctgggaagcttcccttgagggcaggcaggaggtggagttgcagctgttggccggcatcacgttgctcgttgctcggcttatgggaggccgccctggagggcccggaggtcccaaggtccctgggaggactgggcccctcatgcctcgagcttggcaaccgaaaacccgagggaggagaagggacctgccttgtgacatctctgatcaggttggggtgccccagcacccagtaccagtttggggtttgggaagcaggactccgtccctgtccccgactgtgccacgtggtaggacacataggacacaggaattcctgggtccttgcccatgactgtgccatgtggtaggacacaggacacaggaattcctggaaagtggtggcttcagaagtgatcttggctcgcaggcaccagtgccacctaccaagctgtgaaactaaaccttctccactaaacgtcgttagggcctcagttctagacgagtcatacctgattcacctgcactgcttcccctgtgtgctgagcatagagcatacaatagcgcctacttcacggaaacttgtgcctttaaactttgtaaacttaaacacagccgagaagttgcttctttgtactttttctacttttcctacttttttgtagaaaaaaaagataatgcctctgcttctatttctctgggggtgggggtgggggccgggagccgtcgcagacccgtttcatgcagcgtctcccttggcaccgcgttcggaggacgcaccctcactcccctgctgccttcactcctttctgaccaagcaacgctaacttttgtacagatcgatttgataaaattaaacaaagtgctttttatggacgtgggctgc

SEQ ID NO: 25350 - protein, 34 aa, Homo sapiens
MGTTMATTQGRPTGRPPRPPPPRRSCSRRAPSRS

SEQ ID NO: 25351 - DNA, 460 bp, Homo sapiens
ggcaggacccagcgctgcactcaagcctcagccaggcccttcctgcaggacccagcgctgcactcaagcctcagccgggcccttcctgcagaactgcaggggcatcaggcaggtgatggaagccagaggctcagatcgcccactgcccaggccctgccagtgacgacatctgcttctctttcctgggaccagaggccccacctctgctccccacagcctggctctgccggcccagtcctgaggccactgcaaacaagggggctgtggcctcctgattactcactggccctcggctgcctgggagctgcagggacccacccaggctccctaccacctgcgaagcccacagtgccccccaggtgcctgacgtactgttgtgctgttggtggtattattaccacctcgggccatgcgatgacccttttgcttatctgcaaaataaagcgggtttggcagcaag

SEQ ID NO: 25352 - protein, 60 aa, Homo sapiens [sequence omitted]

SEQ ID NO: 25353 - DNA, 2962 bp, Homo sapiens
ggaaaataagccaggagaggaaggagcggcgggcaggtggccccgggagcccagacggacggctgctgtcgatatggcgacagctgccctgtggccgcccctgcacccagatggcgcctggcctggccgcagcatcctggagtctgaggccagcacctgcgtctccctgaagcccctcagagcctgccctgcagtgctgctgccctcgtctaccagtggctcaagcctgtcatcccagcactgtgggaggccgaggcgggtggatcacctgaggacaggagttcaagaccagcctgggcaacatggctatatggaaagcacaggtgtttctgcttctggagaggccccaggaagcttccaaccgtggtggaaggcgaagcgggagcaggtgtctcacatggcgtgagcgggaacgagaaagacagagcagggaaacgtgcagaggaaatggttggagagcgaagtccaggcacaggggccatgagagccggaccccacgcagctgcagacctcgacccgaactgcatgcggctgaggacccccaagccaggcagaccccgacccagaccccacgcggccgcggacccccgacctcgacccaaactgcatgcggctgaggacccccaagccaggcagacgccaatccagaccccacgcggccgcggaccccaacccagacagaccccgacccacccgtgcagcccccagccccagaagtcaaaccccagcgtcccccagggcggcccgggctccctcagatacagcagcttcctgaggtggcctcacctgcaactccagaccaatcagagaaggccaaatgggctccccaagcccagcaggtgggacccccgatctagagagccccttccccgccccaggccaacagccaccctcgggctccgcatcaggtctgccaaatgcaggggcgaggggccgaccccgccacgggaaccaaactcaggaaacagcccatccagcgtccatctccatccggacccgccgccgcggccgcaggttcacgcgccgttccgcggagatctctcaggcgcctccggcccggcagaaacccgcggttccgatggcagaggtcctggtgggaatcgcaccgcctgccgttcctgcctccgcggaggatgcgctgccctaaactgcccccggctcttcatcccccaacccccggcagcctccgaccctcccccggccggcgcagctcagcctttcgcagacgcgggggagctggaatccgaccacgcgcagccttctcaccgtggtgcacgcttcgggccccccacgcctttcccaggcttcatcacccatttctctccagcgctgaaggaaaccccccagatgcttctccactcacccaccgaagcaggtctcggttgcccccagccccgggccctcccgagaacactgcaagcccccactggtcccctcccggcaaccccacggcccatccccaacctgcactcaccctgtggggcctccaccctttggaggaaggacgtgtcaaagcttggaggtgcgcggcctgtctaacctccgcccaaggcgcgcggcaggcgacaggtctcagcccggatcagcgtggtccaaaaggacttatcgttaaaagtgctggtcccagaacccaaggggaagacatgctggttctctgatgagctgggccgcctcctccaggaagcctcctccttggagctctgtagccatcgtgggcttgcaagagtcaaagggcctggcccacagcggcgcccggcactgagctggacagtgtcctgcccccaaaattcatgtccgcccagaacctcagaatgcaaccttccctggtagtagggctttgcagatgtaattaaggatctggggacgaggtcaccctggattgaggctgagtcccaagtcagtcactggtgttcctccatgaagagcagagcagaatagagacagatgcacagagcaggccctgtgaggacagaggcagggactggagcgtcggccgcagcaggggcgtggagcccccagagctggaagagggagggatcctccccagggcctccggaaggagtgtgctgcgtgctgcccacaccgtgattttggactcgtggcatccagaactgggagagaataaatttctgatgttgtaagcctgcactacagcagccccaggacgctgaaatagttcagccggtgcaggctcctccctccctctctctctcttgttgtgagatattttttagacggggtctcacctgtcgctggagtgcagtggtgtgatcatagctcactggagcctctaatgcctgggctcaagcgatcctcccacctcagcctcccgagtagctgggactacaggtgccatcagacctggctaatttttaaaaatctttttagagatgggggaggtctccctatgtggcccaggctggccttgaactcttgggctcaagtgatcctctcgccttggcctcccaaagtgttaggatggcaggcttgagccaccacgcctggcagctccatctgtgttgactcctgaagcccctcatcttggctaatccggacaggcttgctggggaccccatctccccttggagactttgggatgtggctggatgtccaagtggccggggtcctccacagcccccagcttcccagggcgggaggcaggctgtgtcctcggtgggcactgacagtgaggctgaaatgtttgcacttcacatttccacatttaggggcattttgttgttgactcattcaaagctcttttaagtcgcttaatttgctgctcagagggaaatgaaaagggagccattttccctgatttgtttgcctcatcaacttttcaatcaataaaaaagtgcattttgctcatcggatgcaaataggtccatctttcctaatatgttgaaatatagtgattcatcagccatttcatttcatctggaagctgaaagcctaatggcgtttg

SEQ ID NO: 25354 - protein, 110 aa, Homo sapiens
MATAALWPPLHPDGAWPGRSILESEASTCVSLKPLRACPAVLLPSSTSGSSLSSQHCGRPRRVDHLRTGVQDQPGQHGYMESTGVSASGEAPGSFQPWWKAKREQVSHMA

SEQ ID NO: 25355 - DNA, 469 bp, Homo sapiens
gcaggagaatcacttcaacccaggagcagagggtgcattgagctgagatcgccccactgcactccctcctgggcgacagagagagacgctgtccacccccgcctccaccaaaacaaacaaacaaacaaacaaaaaaaaccctgagactgggtaatttatagagaaaagagtttgattggctcacgctttgtaggctatatggaaagcacaggtgtttctgcttctggagaggccccaggaagcttccaaccgtggtggaaggcgaagcgggagcaggtgtctcacatggcgtgagcgggaacgagaaagacagagcagggaaacgtgcagaggaaatggttggagagcgaagtccaggcacaggggccatgagagccggaccccacgcagctgcagacctcgacccgaactgcatgcggctgaggacccccaagccaggcagaccccgacccagaccccacgcggccgc

SEQ ID NO: 25356 - protein, 43 aa, Homo sapiens
MVGERSPGTGAMRAGPHAAADLDPNCMRLRTPKPGRPRPRPHA

SEQ ID NO: 25357 - DNA, 705 bp, Homo sapiens
atgctttacgagaaaacagtcattgtggtttggggaaatcacaatgagacactaagaagtctttggcagatgtacagaactgaaattcgaatggcgaggatggcaagaaaagctggcaacttctatgtacctgcagaacccaaattggcgtttgtcttcagaatcagaggtatcaatggcgtgagcccaaaggttcgaaagatgttgcagcttctttgccttcgtcgagtcttcaatggaaccttcgtgaagctcaacaaggcttcgattaacatgctgaggattgtagagccatatactgcatgggggtgccccaatctgaagtcagtaaatgaactaatctacaagcgtggttatggcaaaatcaataagaagcaaattgctttgacagataacgctttgattgctcgatctcttggtaaatacggcatcatctgcatggaggatctgattcatgagatctatactgttggaaaacacttcaaagaggcaaataacttcctgtggcccttcaaattgtcttctccacgagttggaatgaagaaaaagaccacccatcttgtagaaggtggagatgctggcaacagggaggacaagatcaacaggcttattagaaaaatgaaccaaggtgtctaccatgattatttttctaagctggttggttaataaacagtacctgctctcaaattgaaaaaaaaaatagtc

SEQ ID NO: 25358 - protein, 221 aa, Homo sapiens
MLYEKTVIVVWGNHNETLRSLWQMYRTEIRMARMARKAGNFYVPAEPKLAFVFRIRGINGVSPKVRKMLQLLCLRRVFNGTFVKLNKASINMLRIVEPYTAWGCPNLKSVNELIYKRGYGKINKKQIALTDNALIARSLGKYGIICMEDLIHEIYTVGKHFKEANNFLWPFKLSSPRVGMKKKTTHLVEGGDAGNREDKINRLIRKMNQGVYHDYFSKLVG

SEQ ID NO: 25359 - DNA, 691 bp, Homo sapiens
tcaggtgggacattttgattggagagggtctctgattcagagagtgagaatgttagagttccctcgccgatgtgcctagcactgtgccatgtgttataaaggacgttgaaaagatgaacttcatcaccttgtggaagaagcagacacattttagaagcaaagaaacaacacagagttaatgtggagaacagaggatgagataggggaaagaaaaaggcagctgctgacaggcgggagctggcctggcatgtccagctagtctctcccgctgtcctcctgaacaggaacaatttcacaaatgataaacgtcagataaggaccactctgcagctaatgatggagaaagacaaacacaagactggcccataattgtgtctgagcacaaacaaaagcaagaacattgtccaaagcataagaatcataaaatatctttatttcctgccttatgcctgcttctttatcaataataacaataataataataataataataataaataaagtagagttttaggtcaacttcattcctcttgacccctagataagccctagtcatggaactggcctcccttcctgacatatccaatccctgcttccttgaaacctcctccacagtgtacggcacaagcccaaatcctgcaagaagctctgctcagtctcttacactgatgcctcatggttctccacggtg

SEQ ID NO: 25360 - protein, 44 aa, Homo sapiens
MELASLPDISNPCFLETSSTVYGTSPNPARSSAQSLTLMPHGSP

SEQ ID NO: 25361 - DNA, 646 bp, Homo sapiens
tcccaatgacttttctttaccccctagctgtcggcagtactcagtggaagggtgatattatgacactgacactgctattttgaaacctggaggatggaaaggtgcaaaaatctatcaccagcaacagaaggtcagaatggcggcagtggagcatcgtcattcttcaggattgccctactggccctacctcacagctgaaactttaaaaaacaggatgggccaccagccacctcctccaactcaacaacattctataattgataactccctgagcctcaagacaccttccgagtgtgtgctctatccccttccaccctcagcggatgataatctcaagacacctcccgagtgtctgctcactccccttccaccctcagctctaccctcagcggatgataatctcaagacacctgccgagtgcctgctctatccccttccaccctcagcggatgataatctcaagacacctcccgagtgtctgctcactccccttccaccctcagctccaccctcagcggatgataatctcaagacacctcctgagtgtgtctgctcactccccttccaccctcagcggatgataatctcaagaaactaaggaagaataaataaataatataaaaataaaatgaatactgcagtcctt

SEQ ID NO: 25362 - protein, 34 aa, Homo sapiens
MERCKNLSPATEGQNGGSGASSFFRIALLALPHS

SEQ ID NO: 25363 - DNA, 1118 bp, Homo sapiens
atcaccccttctgcaagaaagcctctttgcaaccgggtaagtttgcttgttttccttgcttttggacatagtctgccaggtcaggacatggatacatttttctccctacggctctgtgctcaagccctgcagagggagatggcagagaggaaggctgcctacaagcatcacagtcccatccctgttggtaactgtgttgcgcaaaaacaccttcatccccacccagtggggcccccatctaatattctaagtgtcagaggttccgtatttgtaatagcaaatgggccctgactgtaaattagtgaagagtgaatgtaacttattacccacagggacaattccaaatgagggccttaaatgatgctcagctaagctggttcttgtgtggcctctgtaccttcaaaagctgccgagtcctatgattacacgcgatgggacttgtacacttgaagtgaaacacagttttaaaacttgctttgtttagaattcccacctcatttttccatggacaaaagtattctttatgtcctagtgcacttacaatttggtattacctgggagtgaaaagaaatattacagccatgcctaactgacttcttgaggtcagaatggcggcagtggagcatcgtcattcttcaggattgccctactggccctacctcacagctgaaactttaaaaaacaggatgggccaccagccacctcctccaactcaacaacattctataattgataactccctgagcctcaagacaccttccgagtgtgtgctctatccccttccaccctcagcggatgataatctcaagacacctcccgagtgtctgctcactccccttccaccctcagctctaccctcagcggatgataatctcaagacacctgccgagtgcctgctctatccccttccaccctcagcggatgataatctcaagacacctcccgagtgtctgctcactccccttccaccctcagctccaccctcagcggatgataatctcaagacacctcctgagtgtgtctgctcactccccttccaccctcagcggatgataatctcaagaaactaaggaagaataaataaataatataaaaataaaatgaatactgcagtcctt

SEQ ID NO: 25364 - protein, 153 aa, Homo sapiens
MAAVEHRHSSGLPYWPYLTAETLKNRMGHQPPPPTQQHSIIDNSLSLKTPSECVLYPLPPSADDNLKTPPECLLTPLPPSALPSADDNLKTPAECLLYPLPPSADDNLKTPPECLLTPLPPSAPPSADDNLKTPPECVCSLPFHPQRMIISRN

SEQ ID NO: 25365 - DNA, 645 bp, Homo sapiens
caaagttcgagctaaaatccgtaagatgaaggtgacaacaaaagtcaaccgtcatgacaaaatcaatggaaagaggaagaccgccaaagaacaatcaccccttctgcaagaaagcctctttgcaaccgggtcagaatggcggcagtggagcatcgtcattcttcaggattgccctactggccctacctcacagctgaaactttaaaaaacaggatgggccaccagccacctcctccaactcaacaacattctataattgataactccctgagcctcaagacaccttccgagtgtgtgctctatccccttccaccctcagcggatgataatctcaagacacctcccgagtgtctgctcactccccttccaccctcagctctaccctcagcggatgataatctcaagacacctgccgagtgcctgctctatccccttccaccctcagcggatgataatctcaagacacctcccgagtgtctgctcactccccttccaccctcagctccaccctcagcggatgataatctcaagacacctcctgagtgtgtctgctcactccccttccaccctcagcggatgataatctcaagaaactaaggaagaataaataaataatataaaaataaaatgaatactgcagtcctt

SEQ ID NO: 25366 - protein, 59 aa, Homo sapiens
MKVTTKVNRHDKINGKRKTAKEQSPLLQESLFATGSEWRQWSIVILQDCPTGPTSQLKL

SEQ ID NO: 25367 - DNA, 546 bp, Homo sapiens
agattatttaaaatcatcctgaaagtggtgctttatctgatgaaagtgattgtaatccatagggaaatgtttcaacgtgcgcaagcgttgcggcggcgggcagaggactactacagatgcaaaatcaccccttctgcaagaaagcctctttgcaaccgggtcagaatggcggcagtggagcatcgtcattcttcaggattgccctactggccctacctcacagctgaaactttaaaaaacaggatgggccaccagccacctcctccaactcaacaacattctataattgataactccctgagcctcaagacaccttccgagtgtgtgctctatccccttccaccctcagcggatgataatctcaagacacctcccgagtgtctgctcactccccttccaccctcagctctaccctcagcggatgataatctcaagacacctgccgagtgcctgctctatccccttccaccctcagcggatgataatctcaagaaactaaggaagaataaataaataatataaaaataaaatgaatactgcagtcct

SEQ ID NO: 25368 - protein, 157 aa, Homo sapiens
MKVIVIHREMFQRAQALRRRAEDYYRCKITPSARKPLCNRVRMAAVEHRHSSGLPYWPYLTAETLKNRMGHQPPPPTQQHSIIDNSLSLKTPSECVLYPLPPSADDNLKTPPECLLTPLPPSALPSADDNLKTPAECLLYPLPPSADDNLKKLRKNK

SEQ ID NO: 25369 - DNA, 838 bp, Homo sapiens
atcaccccttctgcaagaaagcctctttgcaaccgggtaagtttgcttgttttccttgcttttggacatagtctgccaggtcaggacatggatacatttttctccctacggctctgtgctcaagccctgcagagggagatggcagagaggaaggctgcctacaagcatcacagtcccatccctgttggtaactgtgttgcgcaaaaacaccttcatccccacccagtggggcccccatctaatattctaagtgtcagaggttccgtatttgtaatagcaaatgggccctgactgtaaattagtgaagagtgaatgtaacttattacccacagggacaattccaaatgagggccttaaatgatgctcagctaagctggttcttgtgtggcctctgtaccttcaaaagctgccgagtcctatgattacacgcgatgggacttgtacacttgaagtgaaacacagttttaaaacttgctttgtttagaattcccacctcatttttccatggacaaaagtattctttatgtcctagtgcacttacaatttggtattacctgggagtgaaaagaaatattacagccatgcctaactgacttcttgaggtcagaatggcggcagtggagcatcgtcattcttcaggattgccctactggccctacctcacagctgaaactttaaaaaacaggatgggccaccagccacctcctccaactcaacaacattctataattgataactccctgagcctcaaacacctcctgagtgtgtctgctcactccccttccaccctcagcggatgataatctcaagaaactaaggaagaataaataaataatat

SEQ ID NO: 25370 - protein, 63 aa, Homo sapiens
MAAVEHRHSSGLPYWPYLTAETLKNRMGHQPPPPTQQHSIIDNSLSLKHLLSVSAHSPSTLSG

SEQ ID NO: 25371 - DNA, 635 bp, Homo sapiens
acggaggccaacgggggcctggtggagaaggaggtgctggctgcgagtcacgcagccctgttgcgcttccggcgcctgctggtggctgagctgcagcgtggcttctttgacaagcacatctggctctccatatgggaccggccacctcgtagctgtttcactcgcatccagagggccacctgctgcgttctcctcatctgcctcttcctgggcgccaacgccgtgtggtacggggctgttggtgactctgcctacagcacggggcatgtgtccaggctgagcccgctgagcgtcgacacagtcgctgttggcctggtgtccagcgtggttgtctatcccgtctacctggccatcctctttctcttccggatgtcccggagcaaggtggctgggagcctgagccccacacctgccgggcagtaggtgctggacatcgacagctgcctggactcgtccgtgctggacagctccttcctcacgttctcaggcctccacgctgaggtgagggctctactgggggtcctgggctgggctgggggtcctgccgccttggcgcagcttggactccagacactgtgcacctctcagcaggcctttgctggacaggtgaagagtgacttgtttctggatgattc

SEQ ID NO: 25372 - protein, 84 aa, Homo sapiens [sequence omitted]

SEQ ID NO: 25373 - DNA, 739 bp, Homo sapiens
ccacctcgtagctgtttcactcgcatccagagggccacctgctgcgttctcctcatctgcctcttcctgggcgccaacgccgtgtggtacggggctgttggtgactctgcctacagcacggggcatgtgtccaggctgagcccgctgagcgtcgacacagtcgctgttggcctggtgtccagcgtggttgtctatcccgtctacctggccatcctctttctcttccggatgtcccggagcaaggtgggctggggctggggacccgggagtactgggaatggagcctgggcctcggcaccatgcccagggccgccactttccagtgctgcagccagagggaaaggcgtccaccaaaggctgctcgggaagggtcaacacacttgagcagccttagctagactgaccagggagaaagagagaagactcagaagccagaatcgtgaaagaacgagggcacttcgctaagcagacgccacggacaactgcacagcagcacgccagataactcagaagaagcaagcacgcggctgtgcacgcttccgaaatgcactccagaagaaaatctcagtacatctatagcaagtgaagaggccgagttagtcccttagaaacctcccagtggccgggccgggtgtggtggctcacgcctgtaatcccaacacttcaggaggccgaggtgggcggatctgagtccaggagtttgagaccagcctgggcaacatagcaagaccccatctat

SEQ ID NO: 25374 - protein, 51 aa, Homo sapiens
MSRSKVGWGWGPGSTGNGAWASAPCPGPPLSSAAARGKGVHQRLLGKGQHT

SEQ ID NO: 25375 - DNA, 242 bp, Homo sapiens
gggcctggccggagaggagctgggggccacggagaagcaggccgctacctgtctgaggaacccgagccctacctggcagtctacctgcactcggagccccggcccaatgagcgcaactgctcggctagcaggaggatccgcccagagtccctccagggtgccgaccaccggccctacaccttcttcatttccccggggaccagagacccagtggggagttaccgtctgaacctctccagcca

SEQ ID NO: 25376 - protein, 40 aa, Homo sapiens
MSATARLAGGSAQSPSRVPTTGPTPSSFPRGPETQWGVTV

SEQ ID NO: 25377 - DNA, 778 bp, Homo sapiens
ccgacggaggcctggggctggaccacaacggagttggcggagctgcggtggccccgggcagcccagtccgagttgttgggcaccttcacggtgatggcgcgctctgaggccagccgctcgatggggatctgggcgccggcctgtgtctggaacgccatcgaggccaccttggtggagacggtgtagttgctgatatagccaaagagaaagggattggagtccaccagaaagacgagctgcaccacgtcactgaggttggcgggggccctgctgaaagcctaggggatggagaggtggcagccaggccctggggcgccgccatagcacagcaggctccgcgggtccgagcgcttgccctgggccatgatctcctcgcccgccagcgtcacgggctcctcgttgagcacgcgggagcgcgtgaggatgcgcatgagggcagaggtcaggttgtaggcctgggacgccaccatccgcaatggtgactcggctcccagctctgagcgctgcggtgcccgcacgtctgagctggccaggtggatgaggtctcctgtgatgttgaggatgctgtctccgatggcggtgggcgtcacggtgcccgcggtggtctctgcctgcaggatgcgcatcatggcctccagcttgtgcagcgtctgcttcaggcacgagcggcatacgagctccctgctgggccccatgcactgggccagcgcagcagcgatctgctggatgtcatccacagtgtggaccctcagggacaccagagtctccgtgatgttct

SEQ ID NO: 25378 - protein, 79 aa, Homo sapiens
MRSPVMLRMLSPMAVGVTVPAVVSACRMRIMASSLCSVCFRHERHTSSLLGPMHWASAAAICWMSSTVWTLRDTRVSVM

SEQ ID NO: 25379 - DNA, 563 bp, Homo sapiens
ggctggcatgacgcggaggatgctggcgccccgctggtgtacgccctgctgctgcagcgctgtcgccagggccactgcgaggagttctgtgtctacaagggcagcctctccggctacggagccgtgctgcccccgggtttcaggccacacttcgaggtgggcctggccgtggtggtgcaggaccagctgggagccgctgtggtcgccctcaacaggtctctggccatcaccctcccagagcccaacggcagcgcaatggggctcacagtctggctgcacgggctcaccgctagtgtgctcccggggctgctgcggcaggccgatccccagcacgtcatcgagtactcgctggccctggtcactgtgctgaacgaggtgagtgcagcctgggaggggacctcacatctgctgcatgcgtgctggggaccaagacctgttcccctgcctggagctttgcggagggctcatcccgggccccagagataaatcccagtgaccctgaagcagcaccccgacgttccgctcccagcagccacacccaccgggccctctccggcgtctgc

SEQ ID NO: 25380 - protein, 120 aa, Homo sapiens
MTRRMLAPRWCTPCCCSAVARATARSSVSTRAASPATEPCCPRVSGHTSRWAWPWWCRTSWEPLWSPSTGLWPSPSQSPTAAQWGSQSGCTGSPLVCSRGCCGRPIPSTSSSTRWPWSLC

SEQ ID NO: 25381 - DNA, 455 bp, Homo sapiens
gctggtggactcggccgtggaggtggccttcctgtggacctttggggatggggagcaggccctccaccagttccagcctccgtacaacgagtccttcccggttccagacccctcggtggcccaggtgctggtggagcacaatgtcacccacacctacgctgccccaggtgagtacgtcctgaccttgctggcatctaatgccttcgagaaccggacgcagcaggtgctgatccgcagtggccgggtgcccattgtgtccttggagtgtgtgtcctgcaaggcacaggccgtgtacgaagtgagccgcagctcctacgtgtacctggagggccgctgcctcaattgcagcagcggctccaagcgagggcggtgggctgcacgtacgttcagcaacaagacgctggtgctggatgagaccaccacatccacgggcagcgcaggcatgtgactggtgc

SEQ ID NO: 25382 - protein, 44 aa, Homo sapiens [sequence omitted]

SEQ ID NO: 25383 - DNA, 385 bp, Homo sapiens
ggcagctgaaaaggacactgctgccacggtgcctgagctgttgtcagggaggcaggcgacatactcctcaccacagccactgtccagcaaggggatgccaagcagaggctggccagccagggagccaggcccagcacacgtggctgcctcgggctgcaccacccgcacctgctgctcctccgcccatcgcggcagccacgccaggccacagtcacactcaaacgggttcccactcaggtttatttcacttaaattaaataaattagcaaatattccttcttctaacgtagaaatcttgttgttgcttatatccagctctgccagcgccgagaggttcgccaggagcccaacgtccagcgcccggagcaggttgtgggagacgtct

SEQ ID NO: 25384 - protein, 96 aa, Homo sapiens
MPSRGWPAREPGPAHVAASGCTTRTCCSSAHRGSHARPQSHSNGFPLRFISLKLNKLANIPSSNVEILLLLISSSASAERFARSPTSSARSRLWET

SEQ ID NO: 25385 - DNA, 1025 bp, Homo sapiens
ggcagagctggaatcaacttccactctgcctcttgcaagctgtgtgaccctgggcacaatttctccttcctctggaaacctctgttttcttagatttggagcagggtggtcacactgaccttgcagagttctgagaatcagagacagaacataaaaggcctggaaaacattctccaaaaagaagctgcaacatgtgtggacaatgggcttttcatgcctctcttactgtctcttactgtctattgacctggtgcaagaaacatgctctggtgatggctgtgagggaggaatgaggatagacatagacactcctgtgtctcaaacatgcttctttattactctgttatgactctgtcttccctggggcaggaccccagcctgcctacatttgcagacagacacagtggcatgtggagacaacagtgtgtcccaatgacttttctttaccccctagctgtcggcagtactcagtggaagggtgatattatgacactgacactgctattttgaaacctggaggatggaaaggtgcaaaaatctatcaccagcaacagaaggtgcagactgtgttggtggcggtaattttgtccatcaaatgaatatgtgtgaaaacattccctcctttggccctacaggtcagaatggcggcagtggagcatcgtcattcttcaggattgccctactggccctacctcacagctgaaactttaaaaaacaggatgggccaccagccacctcctccaactcaacaacattctataattgataactccctgagcctcaagacaccttccgagtgtgtgctctatccccttccaccctcagcggatgataatctcaagacacctcccgagtgtctgctcactccccttccaccctcagctccaccctcagcggatgataatctcaagacacctcctgagtgtgtctgctcactccccttccaccctcagcggatgataatctcaagaaactaaggaagaataaataaataatataaaaataaaatgaatactgcagtcctt

SEQ ID NO: 25386 - protein, 111 aa, Homo sapiens
MAAVEHRHSSGLPYWPYLTAETLKNRMGHQPPPPTQQHSIIDNSLSLKTPSECVLYPLPPSADDNLKTPPECLLTPLPPSAPPSADDNLKTPPECVCSLPFHPQRMIISRN

SEQ ID NO: 25387 - DNA, 1118 bp, Homo sapiens; identical to SEQ ID NO: 25363

SEQ ID NO: 25388 - protein, 153 aa, Homo sapiens; identical to SEQ ID NO: 25364

SEQ ID NO: 25389 - DNA, 1364 bp, Homo sapiens
tcttcctgccatcctgccatcatttgttttttatgttttgtcgccaaaagtgaccttgaggaaccctgggagctcaggaaggaaggagcacccagaagcagggacagggagctggttggggaggaccagaaatcagtagagactgggtttcaccgtgttcgccaggatagtctccatgtcttgacctcgtgatctgcctgcctcggcctcccagtgctgggattacaggcgtgagccaccgcgcctggccaaaatatataaccttaagtgttatcaatactctggctgaccatcgtcatcgtgggactgactttggtggaagtccttggttacttatcattactgtgtttctgagaagttataaatttgccatctccctctgcacaagttacctttgtgtgtctttcctgaagactatcttcccgtctcaaaatggacatgatggatccacggatgtacagcagagagccaggaggtccaactgccgtagacaggaaggaattaaaattgtcctggaagacatctttactttatggagacaggtggaaaccaaagttcgagctaaaatccgtaagatgaaggtgacaacaaaagtcaaccgtcatgacaaaatcaatggaaagaggaagaccgccaaagaacatctgaggaaactaagcatgaaagaacgtgagcacggagaaaaggagaggcaggtgtcagaggcagaggaaaatgggaaattggatatgaaagaaatacacacctacatggaaatgtttcaacgtgcgcaagcgttgcggcggcgggcagaggactactacagatgcaaaatcaccccttctgcaagaaagcctctttgcaaccgggtcagaatggcggcagtggagcatcgtcattcttcaggattgccctactggccctacctcacagctgaaactttaaaaaacaggatgggccaccagccacctcctccaactcaacaacattctataattgataactccctgagcctcaagacaccttccgagtgtgtgctctatccccttccaccctcagcggatgataatctcaagacacctcccgagtgtctgctcactccccttccaccctcagctctaccctcagcggatgataatctcaagacacctgccgagtgcctgctctatccccttccaccctcagcggatgataatctcaagacacctcccgagtgtctgctcactccccttccaccctcagctccaccctcagcggatgataatctcaagacacctcctgagtgtgtctgctcactccccttccaccctcagcggatgataatctcaagaaactaaggaagaataaataaataatataaaaataaaatgaatactgcagtcctt

SEQ ID NO: 25390 - protein, 246 aa, Homo sapiens
MKVTTKVNRHDKINGKRKTAKEHLRKLSMKEREHGEKERQVSEAEENGKLDMKEIHTYMEMFQRAQALRRRAEDYYRCKITPSARKPLCNRVRMAAVEHRHSSGLPYWPYLTAETLKNRMGHQPPPPTQQHSIIDNSLSLKTPSECVLYPLPPSADDNLKTPPECLLTPLPPSALPSADDNLKTPAECLLYPLPPSADDNLKTPPECLLTPLPPSAPPSADDNLKTPPECVCSLPFHPQRMIISRN

SEQ ID NO: 25391 - DNA, 546 bp, Homo sapiens; identical to SEQ ID NO: 25367

SEQ ID NO: 25392 - protein, 157 aa, Homo sapiens; identical to SEQ ID NO: 25368

SEQ ID NO: 25393 - DNA, 838 bp, Homo sapiens; identical to SEQ ID NO: 25369

SEQ ID NO: 25394 - protein, 63 aa, Homo sapiens; identical to SEQ ID NO: 25370

SEQ ID NO: 25395 - DNA, 240 bp, Homo sapiens
aggtctctggccatcaccctcccagagcccaacggcagcgcaatggggctcacagtctggctgcacgggctcaccgctagtgtgctcccggggctgctgcggcaggccgatccccagcacgtcatcgagtactcgctggccctggtcactgtgctgaacgagtacgagcgggccctggacgtggcggcagagcccaagcacgagcggcagcgccgagcccagatacgcaagaacatcacg

SEQ ID NO: 25396 - protein, 65 aa, Homo sapiens
MGLTVWLHGLTASVLPGLLRQADPQHVIEYSLALVTVLNEYERALDVAAEPKHERQRRAQIRKNI

SEQ ID NO: 25397 - DNA, 521 bp, Homo sapiens
cacagtcacactcaaacgggttcccactcaggtttatttcacttaaattaaataaattagcaaatattccttcttctaacgtagaaatcttgttgttgcttatatccagctctgccagcgccgagaggttcgccaggagcccaacgtccagcgcccggagcaggttgtgggagacgtctagcgctgtggcgtccgcggggatgcgcagcgcgggaccgagcgtccgcagcccgcggcccgcggcccgagcagttgacgcggcaggcggcgccgggcgctaggccgcagaggcaggggggctcgcaaggcccgcagccgcgcccggggccccccgccagcgccccgagccacaggcccaggcccagggccagcgccaggcgggcgggcgcggcgggcggcatcgttagggcagcgcgcgcatggccccgccgtccccaggcccgcccgcgcgcggaggccgcggctcaggcggggccggcggacggcatggcgggcgcggggctggatggggctgcggccgc

SEQ ID NO: 25398 - protein, 33 aa, Homo sapiens
MAPPSPGPPARGGRGSGGAGGRHGGRGAGWGCG

SEQ ID NO: 25399 - DNA, 713 bp, Homo sapiens
aaattagccaggtgtggtggtgcactcctgtagtcccagctactcagcaggctgaggcacgatgatcccttgaccctgggagatcaaggctgcagtgagctgtgatggtgccattgtactccagcctggggaacagaacaagaacccatctcctaatagtggatacaggttgccgtggtttccagcaggatctcagatgcaaagggaagtgaagaaaacagatgaatccctagggtaccccgccatggaaccaaacaccacatcaactggaactcttcttgcaaacgaaggctgaagatcaagaatgacattctcacaccacagcacagcttaaatacttctttgacaaaaataataataaattatatttgactcagaaaataaattctgttcagcagagtgacaggagggtccattcattgcattgcacgaggggctctacggaggggtgaggatgggtgcaggatgccacagtgacaagggacatggggtgcgggcccagcagcacaggctgaagttagctgacgcatgcttttggcttttatcccacgggcgggtagtggccggacccctggctgtggcctgtcccaagtgagactgcaactgtccccttcctcctcacgtccgccttgtcttctgtttcttggcttgtctctttgcatcttctgggccgctattgtcagaggctgcctggccgagcgcgccgactccct

SEQ ID NO: 25400 - protein, 35 aa, Homo sapiens
MVPLYSSLGNRTRTHLLIVDTGCRGFQQDLRCKGK

SEQ ID NO: 25401 - DNA, 1147 bp, Homo sapiens
gtaggttcttgatacatccttgtaggactaagtccctgcatgttgctgggactcaacaaactgagacccagttgcttttcaaccaccaagactctctgatagctgcatctcttcatttcctcagttgggaggagggtccagaggctgaggaatgccttgtcattggaatctctttgtccctgagtttcagaagcaaatagtgaagctttgggcagaagaggattcatgggaaaatacatccaaatcactttggttccttcctttggatagaaggaatttggatcatgagggcccctgggtgtcctcaagtggccactttggaaggctgggtgggtggtggctgtggcattgtggatgatggacaagcttgtggccttggtgaggagtgatggggctctcggtgtttgcagaggaagctgcctgaacaggacatcgcacaaggatcctacattgccctgccattgacgctgctggttctgctggccggttacaaccatgacaagctcattcctttgctgctgcagttgacaagccggctacagggagtcggcgcgctcggccaggcagcctctgacaatagcggcccagaagatgcaaagagacaagccaagaaacagaagacaaggcggacgtgaggaggaaggggacagttgcagtctcacttgggacaggccacagccaggggtccggccactacccgcccgtgggataaaagccaaaagcatgcgtcagctaacttcagcctgtgctgctgggcccgcaccccatgtcccttgtcactgtggcatcctgcacccatcctcacccctccgtagagcccctcgtgcaatgcaatgaatggaccctcctgtcactctgctgaacagaatttattttctgagtcaaatataatttattattatttttgtcaaagaagtatttaagctgtgctgtggtgtgagaatgtcattcttgatcttcagccttcgtttgcaagaagagttccagttgatgtggtgtttggttccatggcggggtaccctagggattcatctgttttcttcacttccctttgcatctgagatcctgctggaaaccacggcaacctgtatccactattaggaggtaaaaatcaataaaatggcccattcatttgtgttgtagctca

SEQ ID NO: 25402 - protein, 81 aa, Homo sapiens
MQRDKPRNRRQGGREEEGDSCSLTWDRPQPGVRPLPARGIKAKSMRQLTSACAAGPAPHVPCHCGILHPSSPLRRAPRAMQ

SEQ ID NO: 25403 - DNA, 2280 bp, Homo sapiens
aaatgggttgggttctaagagatgtccagagatacaggagtaggcagttgttgatggaaatctgttcctgcccttattctttcatttatgaaagggcatcccaggtacagcggcccccacagtcactctctagcccagcagttctcggatgggttggttgcaggacccctttatactgttaaaaattattgaggattttaaagagtttgagtttgcatggattatctctgtgtatatttatcatattagtaattaaaaccgagatgttgaaaacgcaagaactcacaagctacacattccgttagctgtgggcgtgatgacatcagggtgcgtagtctctggaaaagtccactgtgtgcttgcgaatgaaagagggcggaaaaggcacatcacatcttactattggcaaatgctgtctacccagcaaaagggagggcacaccacttccctagggtccagccagggtgtggcacttaccgcttctgttcctgtaccattggccaaaatttagttccagggctgcgcctgctgcagggaaggctggaaaaggtgatctatattgtcggtggcccagataaaagttgggggttctattgggagaaagggagaatggccacagggatgctagtagcagtgcctgctttgcttcctcactagaccgtactggctgggaatagctgcccatcactgtgtgccctgggtctagaactgtaggttcttgatacatccttgtaggactaagtccctgcatgttgctgggactcaacaaactgagacccagttgcttttcaaccaccaagactctctgatagctgcatctcttcatttcctcagttgggaggagggtccagaggctgaggaatgccttgtcattggaatctctttgtccctgagtttcagaagcaaatagtgaagctttgggcagaagaggattcatgggaaaatacatccaaatcactttggttccttcctttggatagaaggaatttggatcatgagggcccctgggtgtcctcaagtggccactttggaaggctgggtgggtggtggctgtggcattgtggatgatggacaagcttgtggccttggtgaggagtgatggggctctcggtgtttgcagaggaagctgcctgaacaggacatcgcacaaggatcctacattgccctgccattgacgctgctggttctgctggccggttacaaccatgacaaggtaggaaatccagaggcctcaggagatggcgggcatgtcagggagagcgagtcctcacagctgcaggagtgatagcagagggatgtccagggtcacagaaatcacatttccgggtcgggagggcccgtgaaggcctcaagtccagacttaggtctcctttcaaggctgtaaacttctgtaacatctcctaatccttaaacctggaacacctctagggacatattaggcccggagagaggccagcccatccctggggactcattagtaagaggcctgcctcgtttgaactgaaacccacccattagcacgtggcagctgctgatcatgtctgaagaaggtgtgttgagaagtgaggctccgctgttcatctggcaaaagcctcctctttgtacccctctctctcacactttctctcttttctagctcattcctttgctgctgcagttgacaagccggctacagggagtcggcgcgctcggccaggcagcctctgacaatagcggcccagaagatgcaaagagacaagccaagaaacagaagacaaggcggacgtgaggaggaaggggacagttgcagtctcacttgggacaggccacagccaggggtccggccactacccgcccgtgggataaaagccaaaagcatgcgtcagctaacttcagcctgtgctgctgggcccgcaccccatgtcccttgtcactgtggcatcctgcacccatcctcacccctccgtagagcccctcgtgcaatgcaatgaatggaccctcctgtcactctgctgaacagaatttattttctgagtcaaatataatttattattatttttgtcaaagaagtatttaagctgtgctgtggtgtgagaatgtcattcttgatcttcagccttcgtttgcaagaagagttccagttgatgtggtgtttggttccatggcggggtaccctagggattcatctgttttcttcacttccctttgcatctgagatcctgctggaaaccacggcaacctgtatccactattaggaggtaaaaatcaataaaatggcccattcatttgtgttgtagctca

SEQ ID NO: 25404 - protein, 64 aa, Homo sapiens
MTSGCVVSGKVHCVLANERGRKRHITSYYWQMLSTQQKGGHTTSLGSSQGVALTASVPVPLAKI

SEQ ID NO: 25405 - DNA, 519 bp, Homo sapiens
agggagcagcagctggctgagatcgaggcccgcaggcaggagagggagaaaaacggcaatgaggaaggtgaagaaagaatgaccaagccaaaagcatgcgtcagctaacttcagcctgtgctgctgggcccgcaccccatgtcccttgtcactgtggcatcctgcacccatcctcacccctccgtagagcccctcgtgcaatgcaatgaatggaccctcctgtcactctgctgaacagaatttattttctgagtcaaatataatttattattatttttgtcaaagaagtatttaagctgtgctgtggtgtgagaatgtcattcttgatcttcagccttcgtttgcaagaagagttccagttgatgtggtgtttggttccatggcggggtaccctagggattcatctgttttcttcacttccctttgcatctgagatcctgctggaaaccacggcaacctgtatccactattaggaggtaaaaatcaataaaatggcccattcatttgtgttgtagctca

SEQ ID NO: 25406 - protein, 52 aa, Homo sapiens
MSFLIFSLRLQEEFQLMWCLVPWRGTLGIHLFSSLPFASEILLETTATCIHY

SEQ ID NO: 25407 - DNA, 4352 bp, Homo sapiens
ctggggctgtgaacgtggcgtcgaagcgcgcgtgcgcggcggctctggcggcggcggtggggcggggcctgggctgtcagccggcctaggaggaggaaggagcctgcggcgtgcagtgtgaggggcgggacccggctgccggcggtgggtctagctgggggaggtcgggccatgctggtgggccagggcgcggggctgctggggcccgcggtggtcaccgccgcggtggtgctgctgctgagcggcgtggggccggcgcacggctcggaggacatcgtggtgggctgcggtggcttcgtcaagtcggacgtggagatcaactactcgctcatcgagataaagctgtacaccaagcatgggactttgaaataccagacagactgtgcccctaataatggttactttatgatccctttgtatgataagggggatttcattctgaagattgagcctcccctagggtggagttttgagccgacgaccgtggagctccatgtggatggagtcagtgacatctgcacaaagggtggggacatcaactttgtcttcactgggttctctgtgaatggcaaggtcctcagcaaagggcagcccctgggtcctgcgggagttcaggtgtctctgagaaacactgggaccgaagcaaagatccagtccacagttacacagcctggcggaaagtttgcattttttaaagttctgcctggagattatgaaatcctcgcaactcatccaacctgggcgttgaaagaggcaagcaccacagtgcgtgtaaccaactccaatgccaatgcggccagtcccctcatagttgctggctacaatgtgtctggctctgtccgaagtgatggggagcccatgaaaggggtgaagtttcttctcttttcttctttagtaactaaagaggatgtcctgggctgcaatgtctcaccagtgcctgggttccagccccaagacgagagtctggtgtatttgtgctacacggtctccagagaagatggctcgttctctttctattccttgccaagtgggggctacactgtgattccgttctatcgaggggagaggattacctttgatgtggcgccttccagacttgacttcacagtggagcatgacagcttgaaaatcgagcccgtgttccacgtcatgggattctccgtcaccgggagggtcttgaacggacccgaaggagatggtgttccagaagcagtagtcaccctgaataaccaaatcaaagttaaaacaaaagctgatggctcattccgccttgagaacataaccacagggacatacaccatccatgctcagaaagagcacctctactttgaaacggtcaccatcaaaattgcaccgaacacacctcagctggctgacattgttgcaacagggttcagtgtctgtggtcggatatcaatcattcgcttcccggacaccgtcaagcagatgaataaatacaaagttgtcctgtcatctcaagacaaggacaagtctttggtcaccgtggagacagatgctcatggatcattttgttttaaagcaaaaccagggacttacaaagtgcaggtgatggttcctgaggcagaaaccagagcagggctgacgttgaaaccccagacatttcctcttactgtgaccgacaggcccgtgatggatgtggcctttgtacagttcttggcatcagtttctgggaaagtctcttgtttggacacctgtggtgacttgctggtgactctacagtccctgagccgccagggtgagaagcggagcctccagctctccggcaaggtcaacgccatgactttcacctttgacaacgtgctccctggaaaatacaaaataagcatcatgcatgaggattggtgctggaagaacaagagcctggaggtggaagtgctggaggatgacgtgtctgcagttgagttcaggcagacgggctacatgctgagatgttccctgtctcacgccatcactctggaattttatcaggatggaaatgggcgtgagaatgtggggatttataacctctccaaaggagtcaaccgattctgcctgtccaagcctggtgtgtacaaagtgacccctcgctcctgccaccggtttgagcaagcgttctacacctatgacacgtcttcacctagtatcttgacattgacagccattcgccaccatgtccttggaactatcaccaccgacaaaatgatggatgtcactgtgactatcaagtcttccatcgacagtgaacccgccttggtcttaggccctctgaagtctgtgcaggagctgcggagggagcagcagctggctgagatcgaggcccgcaggcaggagagggagaaaaacggcaatgaggaaggtgaagaaagaatgaccaagcctcccgtgcaggagatggtagatgagttacaaggccccttctcgtatgatttctcttactgggcgcggtctggagagaaaatcactgttacaccgtcatctaaagagctgctcttttatcccccttcaatggaagccgttgtcagtggagaaagctgcccagggaagctgatcgagatccacgggaaggcaggcctgtttttagaaggccagatccaccccgagttggaaggagtcgagattgtcatcagtgaaaagggggcaagttcaccgctgatcacagtctttactgatgacaaaggtgcctacagtgttggccccctgcacagtgacctggagtacacggtgacctcacagaaggagggctatgttctgactgcagtggaaggaaccatcggagacttcaaggcctatgccctggcaggcgtaagctttgagataaaagctgaggatgaccagcccctcccgggagtcctcttatccctgagtggtggcctgtttcgttccaacctcttgacccaggacaacggcattctgacattctcaaacctgagccctggccagtattacttcaaacccatgatgaaggagttccggtttgagccatcctcacagatgatcgaggtgcaggaaggccagaacctgaagatcaccatcacggggtaccgaaccgcttacagttgctatggcacagtgtcttccttaaacggagagcccgaacaaggggttgccatggaagcggtgggccagaacgactgcagcatttacggagaagacaccgtgacagacgaagagggcaagttcagattacgtggattgctgccgggatgtgtgtaccacgttcagctcaaggcagaaggcaacgaccacattgagcgggcgctcccccaccatagggtgattgaggttgggaataatgacatcgatgatgtaaacatcatagttttccggcagattaatcaatttgatttaagtggaaatgtgatcacttcctctgaataccttcctacgttatgggtcaagctttacaaaagcgaaaacctcgacaatccaatccagacagtttcccttggccagtccctgttcttccatttccccccactgctcagagatggcgagaactatgttgtgcttctggactccacactccccagatcccagtatgactacatcttgcctcaagtttctttcaccgcagtgggctaccataaacacatcaccttgatttttaatcccacgaggaagctgcctgaacaggacatcgcacaaggatcctacattgccctgccattgacgctgctggttctgctggccggttacaaccatgacaagctcattcctttgctgctgcagttgacaagccggctacagggagtcggcgcgctcggccaggcagcctctgacaatagcggcccagaagatgcaaagagacaagccaagaaacagaagacaaggcggacgtgaggaggaaggggacagttgcagtctcacttgggacaggccacagccaggggtccggccactacccgcccgtgggataaaagccaaaagcatgcgtcagctaacttcagcctgtgctgctgggcccgcaccccatgtcccttgtcactgtggcatcctgcacccatcctcacccctccgtagagcccctcgtgcaatgcaatgaatggaccctcctgtcactctgctgaacagaatttattttctgagtcaaatataatttattattatttttgtcaaagaagtatttaagctgtgctgtggtgtgagaatgtcattcttgatcttcagccttcgtttgcaagaagagttccagttgatgtggtgtttggttccatggcggggtaccctagggattcatctgttttcttcacttccctttgcatctgagatcctgctggaaaccacggcaacctgtatccactattaggaggtaaaaatcaataaaatggcccattcatttgtgttgtagctca

SEQ ID NO: 25408 - protein, 1222 aa, Homo sapiens; identical to SEQ ID NO: 3375

SEQ ID NO: 25409 - DNA, 3914 bp, Homo sapiens
ctggggctgtgaacgtggcgtcgaagcgcgcgtgcgcggcggctctggcggcggcggtggggcggggcctgggctgtcagccggcctaggaggaggaaggagcctgcggcgtgcagtgtgaggggcgggacccggctgccggcggtgggtctagctgggggaggtcgggccatgctggtgggccagggcgcggggctgctggggcccgcggtggtcaccgccgcggtggtgctgctgctgagcggcgtggggccggcgcacggctcggaggacatcgtggtgggctgcggtggcttcgtcaagtcggacgtggagatcaactactcgctcatcgagataaagctgtacaccaagcatgggactttgaaataccagacagactgtgcccctaataatggttactttatgatccctttgtatgataagggggatttcattctgaagattgagcctcccctagggtggagttttgagccgacgaccgtggagctccatgtggatggagtcagtgacatctgcacaaagggtggggacatcaactttgtcttcactgggttctctgtgaatggcaaggtttgcattttttaaagttctgcctggagattatgaaatcctcgcaactcatccaacctgggcgttgaaagaggcaagcaccacagtgcgtgtaaccaactccaatgccaatgcggccagtcccctcatagttgctggctacaatgtgtctggctctgtccgaagtgatggggagcccatgaaaggggtgaagtttcttctcttttcttctttagtaactaaagaggatgtcctgggctgcaatgtctcaccagtgcctgggttccagccccaagacgagagtctggtgtatttgtgctacacggtctccagagaagatggctcgttctctttctattccttgccaagtgggggctacactgtgattccgttctatcgaggggagaggattacctttgatgtggcgccttccagacttgacttcacagtggagcatgacagcttgaaaatcgagcccgtgttccacgtcatgggattctccgtcaccgggagggtcttgaacggacccgaaggagatggtgttccagaagcagtagtcaccctgaataaccaaatcaaagttaaaacaaaagctgatggctcattccgccttgagaacataaccacagggacatacaccatccatgctcagaaagagcacctctactttgaaacggtcaccatcaaaattgcaccgaacacacctcagctggctgacattgttgcaacagggttcagtgtctgtggtcggatatcaatcattcgcttcccggacaccgtcaagcagatgaataaatacaaagttgtcctgtcatctcaagacaaggacaagtctttggtcaccgtggagacagatgctcatggatcattttgttttaaagcaaaaccagggacttacaaagtgcaggtgatggttcctgaggcagaaaccagagcagggctgacgttgaaaccccagacatttcctcttactgtgaccgacaggcccgtgatggatgtggcctttgtacagttcttggcatcagtttctgggaaagtctcttgtttggacacctgtggtgacttgctggtgactctacagtccctgagccgccagggtgagaagcggagcctccagctctccggcaaggtcaacgccatgactttcacctttgacaacgtgctccctggaaaatacaaaataagcatcatgcatgaggattggtgctggaagaacaagagcctggaggtggaagtgctggaggatgacgtgtctgcagttgagttcaggcagacgggctacatgctgagatgttccctgtctcacgccatcactctggaattttatcaggatggaaatgggcgtgagaatgtggggatttataacctctccaaaggagtcaaccgattctgcctgtccaagcctggtgtgtacaaagtgacccctcgctcctgccaccggtttgagcaagcgttctacacctatgacacgtcttcacctagtatcttgacattgacagccattcgccaccatgtccttggaactatcaccaccgacaaaatgatggatgtcactgtgactatcaagtcttccatcgacagtgaacccgccttggtcttaggccctctgaagtctgtgcaggagctgcggagggagcagcagctggctgagatcgaggcccgcaggcaggagagggagaaaaacggcaatgaggaaggtgaagaaagaatgaccaagcctcccgtgcaggagatggtagatgagttacaaggccccttctcgtatgatttctcttactgggcgcggtctggagagaaaatcactgttacaccgtcatctaaagagctgctcttttatcccccttcaatggaagccgttgtcagtggagaaagctgcccagggaagctgatcgagatccacgggaaggcaggcctgtttttagaaggccagatccaccccgagttggaaggagtcgagattgtcatcagtgaaaagggggcaagttcaccgctgatcacagtctttactgatgacaaaggtgcctacagtgttggccccctgcacagtgacctggagtacacggtgacctcacagaaggagggctatgttctgactgcagtggaaggaaccatcggagacttcaaggcctatgccctggcaggcgtaagctttgagataaaagctgaggatgaccagcccctcccgggagtcctcttatccctgagtggtggcctgtttcgttccaacctcttgacccaggacaacggcattctgacattctcaaacctgagccctggccagtattacttcaaacccatgatgaaggagttccggtttgagccatcctcacagatgatcgaggtgcaggaaggccagaacctgaagatcaccatcacggggtaccgaaccgcttacagttgctatggcacagtgtcttccttaaacggagagcccgaacaaggggttgccatggaagcggtgggccagaacgactgcagcatttacggagaagacaccgtgacagacgaagagggcaagttcagattacgtggattgctgccgggatgtgtgtaccacgttcagctcaaggcagaaggcaacgaccacattgagcgggcgctcccccaccatagggtgattgaggttgggaataatgacatcgatgatgtaaacatcatagttttccggcagattaatcaatttgatttaagtggaaatgtgatcacttcctctgaataccttcctacgttatgggtcaagctttacaaaagcgaaaacctcgacaatccaatccagacagtttcccttggccagtccctgttcttccatttccccccactgctcagagatggcgagaactatgttgtgcttctggactccacactccccagatcccagtatgactacatcttgcctcaagtttctttcaccgcagtgggctaccataaacacatcaccttgatttttaatcccacgaggaagctgcctgaacaggacatcgcacaaggatcctacattgccctgccattgacgctgctggttctgctggccggttacaaccatgacaagctcattcctttgctgctgcagttgacaagccggctacagggagtcggcgcgctcggccaggcagcctctgacaatagcggcccagaagatgcaaagagacaagccaagaaacagaagacaaggcggacccttcgtttgcaagaagagttccagttgatgtggtgtttggttccatggcggggtaccctagggattcatctgttttcttcacttccctttgcatctgagatcctgctggaaaccacggcaacctgtatccactattaggaggtaaaaatcaataaaatggcccattcatttgtgttgtagctca

SEQ ID NO: 25410 - protein, 1100 aa, Homo sapiens
MARFAFFKVLPGDYEILATHPTWALKEASTTVRVTNSNANAASPLIVAGYNVSGSVRSDGEPMKGVKFLLFSSLVTKEDVLGCNVSPVPGFQPQDESLVYLCYTVSREDGSFSFYSLPSGGYTVIPFYRGERITFDVAPSRLDFTVEHDSLKIEPVFHVMGFSVTGRVLNGPEGDGVPEAVVTLNNQIKVKTKADGSFRLENITTGTYTIHAQKEHLYFETVTIKIAPNTPQLADIVATGFSVCGRISIIRFPDTVKQMNKYKVVLSSQDKDKSLVTVETDAHGSFCFKAKPGTYKVQVMVPEAETRAGLTLKPQTFPLTVTDRPVMDVAFVQFLASVSGKVSCLDTCGDLLVTLQSLSRQGEKRSLQLSGKVNAMTFTFDNVLPGKYKISIMHEDWCWKNKSLEVEVLEDDVSAVEFRQTGYMLRCSLSHAITLEFYQDGNGRENVGIYNLSKGVNRFCLSKPGVYKVTPRSCHRFEQAFYTYDTSSPSILTLTAIRHHVLGTITTDKMMDVTVTIKSSIDSEPALVLGPLKSVQELRREQQLAEIEARRQEREKNGNEEGEERMTKPPVQEMVDELQGPFSYDFSYWARSGEKITVTPSSKELLFYPPSMEAVVSGESCPGKLIEIHGKAGLFLEGQIHPELEGVEIVISEKGASSPLITVFTDDKGAYSVGPLHSDLEYTVTSQKEGYVLTAVEGTIGDFKAYALAGVSFEIKAEDDQPLPGVLLSLSGGLFRSNLLTQDNGILTFSNLSPGQYYFKPMMKEFRFEPSSQMIEVQEGQNLKITITGYRTAYSCYGTVSSLNGEPEQGVAMEAVGQNDCSIYGEDTVTDEEGKFRLRGLLPGCVYHVQLKAEGNDHIERALPHHRVIEVGNNDIDDVNIIVFRQINQFDLSGNVITSSEYLPTLWVKLYKSENLDNPIQTVSLGQSLFFHFPPLLRDGENYVVLLDSTLPRSQYDYILPQVSFTAVGYHKHITLIFNPTRKLPEQDIAQGSYIALPLTLLVLLAGYNHDKLIPLLLQLTSRLQGVGALGQAASDNSGPEDAKRQAKKQKTRRTLRLQEEFQLMWCLVPWRGTLGIHLFSSLPFASEILLETTATCIHY

SEQ ID NO: 25411 - DNA, 4021 bp, Homo sapiens
ctggggctgtgaacgtggcgtcgaagcgcgcgtgcgcggcggctctggcggcggcggtggggcggggcctgggctgtcagccggcctaggaggaggaaggagcctgcggcgtgcagtgtgaggggcgggacccggctgccggcggtgggtctagctgggggaggtcgggccatgctggtgggccagggcgcggggctgctggggcccgcggtggtcaccgccgcggtggtgctgctgctgagcggcgtggggccggcgcacggctcggaggacatcgtggtgggctgcggtggcttcgtcaagtcggacgtggagatcaactactcgctcatcgagataaagctgtacaccaagcatgggactttgaaataccagacagactgtgcccctaataatggttactttatgatccctttgtatgataagggggatttcattctgaagattgagcctcccctagggtggagttttgagccgacgaccgtggagctccatgtggatggagtcagtgacatctgcacaaagggtggggacatcaactttgtcttcactgggttctctgtgaatggcaaggtcctcagcaaagggcagcccctgggtcctgcgggagttcaggtgtctctgagaaacactgggaccgaagcaaagatccagtccacagttacacagcctggcggaaagtttgcattttttaaagttctgcctggagattatgaaatcctcgcaactcatccaacctgggcgttgaaagaggcaagcaccacagtgcgtgtaaccaactccaatgccaatgcggccagtcccctcatagttgctggctacaatgtgtctggctctgtccgaagtgatggggagcccatgaaaggggtgaagtttcttctcttttcttctttagtaactaaagaggatgtcctgggctgcaatgtctcaccagtgcctgggttccagccccaagacgagagtctggtgtatttgtgctacacggtctccagagaagatggctcgttctctttctattccttgccaagtgggggctacactgtgattccgttctatcgaggggagaggattacctttgatgtggcgccttccagacttgacttcacagtggagcatgacagcttgaaaatcgagcccgtgttccacgtcatgggattctccgtcaccgggagggtcttgaacggacccgaaggagatggtgttccagaagcagtagtcaccctgaataaccaaatcaaagttaaaacaaaagctgatggctcattccgccttgagaacataaccacagggacatacaccatccatgctcagaaagagcacctctactttgaaacggtcaccatcaaaattgcaccgaacacacctcagctggctgacattgttgcaacagggttcagtgtctgtggtcggatatcaatcattcgcttcccggacaccgtcaagcagatgaataaatacaaagttgtcctgtcatctcaagacaaggacaagtctttggtcaccgtggagacagatgctcatggatcattttgttttaaagcaaaaccagggacttacaaagtgcaggtgatggttcctgaggcagaaaccagagcagggctgacgttgaaaccccagacatttcctcttactgtgaccgacaggcccgtgatggatgtggcctttgtacagttcttggcatcagtttctgggaaagtctcttgtttggacacctgtggtgacttgctggtgactctacagtccctgagccgccagggtgagaagcggagcctccagctctccggcaaggtcaacgccatgactttcacctttgacaacgtgctccctggaaaatacaaaataagcatcatgcatgaggattggtgctggaagaacaagagcctggaggtggaagtgctggaggatgacgtgtctgcagttgagttcaggcagacgggctacatgctgagatgttccctgtctcacgccatcactctggaattttatcaggatggaaatgggcgtgagaatgtggggatttataacctctccaaaggagtcaaccgattctgcctgtccaagcctggtgtgtacaaagtgacccctcgctcctgccaccggtttgagcaagcgttctacacctatgacacgtcttcacctagtatcttgacattgacagccattcgccaccatgtccttggaactatcaccaccgacaaaatgatggatgtcactgtgactatcaagtcttccatcgacagtgaacccgccttggtcttaggccctctgaagtctgtgcaggagctgcggagggagcagcagctggctgagatcgaggcccgcaggcaggagagggagaaaaacggcaatgaggaaggtgaagaaagaatgaccaagcctcccgtgcaggagatggtagatgagttacaaggccccttctcgtatgatttctcttactgggcgcggtctggagagaaaatcactgttacaccgtcatctaaagagctgctcttttatcccccttcaatggaagccgttgtcagtggagaaagctgcccagggaagctgatcgagatccacgggaaggcaggcctgtttttagaaggccagatccaccccgagttggaaggagtcgagattgtcatcagtgaaaagggggcaagttcaccgctgatcacagtctttactgatgacaaaggtgcctacagtgttggccccctgcacagtgacctggagtacacggtgacctcacagaaggagggctatgttctgactgcagtggaaggaaccatcggagacttcaaggcctatgccctggcaggcgtaagctttgagataaaagctgaggatgaccagcccctcccgggagtcctcttatccctgagtggtggcctgtttcgttccaacctcttgacccaggacaacggcattctgacattctcaaacctgagccctggccagtattacttcaaacccatgatgaaggagttccggtttgagccatcctcacagatgatcgaggtgcaggaaggccagaacctgaagatcaccatcacggggtaccgaaccgcttacagttgctatggcacagtgtcttccttaaacggagagcccgaacaaggggttgccatggaagcggtgggccagaacgactgcagcatttacggagaagacaccgtgacagacgaagagggcaagttcagattacgtggattgctgccgggatgtgtgtaccacgttcagctcaaggcagaaggcaacgaccacattgagcgggcgctcccccaccatagggtgattgaggttgggaataatgacatcgatgatgtaaacatcatagttttccggcagattaatcaatttgatttaagtggaaatgtgatcacttcctctgaataccttcctacgttatgggtcaagctttacaaaagcgaaaacctcgacaatccaatccagacagtttcccttggccagtccctgttcttccatttccccccactgctcagagatggcgagaactatgttgtgcttctggactccacactccccagatcccagtatgactacatcttgcctcaagtttctttcaccgcagtgggctaccataaacacatcaccttgatttttaatcccacgaggaagctgcctgaacaggacatcgcacaaggatcctacattgccctgccattgacgctgctggttctgctggccggttacaaccatgacaagctcattcctttgctgctgcagttgacaagccggctacagggagtcggcgcgctcggccaggcagcctctgacaatagcggcccagaagatgcaaagagacaagccaagaaacagaagacaaggcggacccttcgtttgcaagaagagttccagttgatgtggtgtttggttccatggcggggtaccctagggattcatctgttttcttcacttccctttgcatctgagatcctgctggaaaccacggcaacctgtatccactattaggaggtaaaaatcaataaaatggcccattcatttgtgttgtagctca

SEQ ID NO: 25412 - protein, 1267 aa, Homo sapiens; identical to SEQ ID NO: 3373

SEQ ID NO: 25413 - DNA, 918 bp, Homo sapiens
gtaggttcttgatacatccttgtaggactaagtccctgcatgttgctgggactcaacaaactgagacccagttgcttttcaaccaccaagactctctgatagctgcatctcttcatttcctcagttgggaggagggtccagaggctgaggaatgccttgtcattggaatctctttgtccctgagtttcagaagcaaatagtgaagctttgggcagaagaggattcatgggaaaatacatccaaatcactttggttccttcctttggatagaaggaatttggatcatgagggcccctgggtgtcctcaagtggccactttggaaggctgggtgggtggtggctgtggcattgtggatgatggacaagcttgtggccttggtgaggagtgatggggctctcggtgtttgcagaggaagctgcctgaacaggacatcgcacaaggatcctacattgccctgccattgacgctgctggttctgctggccggttacaaccatgacaagctcattcctttgctgctgcagttgacaagccggctacagggagtcggcgcgctcggccaggcagcctctgacaatagcggcccagaagatgcaaagagacaagccaagaaacagaagacaaggcggacgtgaggaggaaggggacagttgcagtctcacttgggacaggccacagccaggggtccggccactacccgcccgtgggataaaagccaaaagcatgcgtcagctaacttcagcctgtgctgctgggcccgcaccccatgtcccttgtcactgtggcatcctgcacccatcctcacccctccgtagagcccctcgtgcaatgcaatgaatggaccctcctgtcactctgctgaacagaatttattttctgagtcaaatataatttattattatttttgtcaaagaagta

SEQ ID NO: 25414 - protein, 81 aa, Homo sapiens; identical to SEQ ID NO: 25402

SEQ ID NO: 25415 - DNA, 795 bp, Homo sapiens
gcctagcccgaccagcccagccccgcctcttctccggcaggatcgcggccgagcagtctgcccagagacttagcgacagacagacgctgggacccacgacgacagaaggcgccgatggccgcgcctgctgagccctgcgcggggcagggggtctggaaccagacagagcctgaacctgccgccaccagcctgctgagcctgtgcttcctgagaacagcaggggtctgggtaccccccatgtacctctgggtccttggtcccatctacctcctcttcatccaccaccatggccggggctacctccggatgttccccactcttcaaagccaagatggtagctgccatccctgggagcctggaaccaggcaatggtggggggaggcaggggacaggctggaacctggtgaagtcttaaagtagactcctcctatcggggtgtagaagggaatctgttaatcaaacagagcaatattagaaaggctacagaggtcaattcagtggaacacggttctcccaaacagattttgtaattccgaaaatccacgcatgcgcaaacatacgcatacactcccatgttcctggacagtttatagctaccataacctggcattttccaaaacataccatgtagactcttggatacacaaggtaattttagggccacattaggatgaaccttttaaaaagttatgcatttatttttatgttcccccactggctgtattataggacaatttttatatgtgatatgtatttaccttagtgtgttaaataaacactggcattccaagtgtg

SEQ ID NO: 25416 - protein, 101 aa, Homo sapiens
MAAPAEPCAGQGVWNQTEPEPAATSLLSLCFLRTAGVWVPPMYLWVLGPIYLLFIHHHGRGYLRMFPTLQSQDGSCHPWEPGTRQWWGEAGDRLEPGEVLK

SEQ ID NO: 25417 - DNA, 1354 bp, Homo sapiens
ctttccgcgccggtgagtagcactctctgagagctccaatttcatccgtctgccatcggcgccatcctgcaatctaaggttcggtctcggtgtcctgcgaggaggctggtccccaccttggccgaggatcctggccttgccggttcctggacaggcatagaggagagccatggctgggcgccccagactgtgcactcaggggatcccggtccgtggggtgcaggccgcagcgcgggcgggagccggagccttcgactgcccagctaggcggtagctccggttcgggccgcagcgtctggatctccctttagtgctgaggcagcgccttggccccgggcggcgggcaacatcggggctggtgggccgtgcagcttctcactgctgcggccgcgctgggagcttgggaggctgaggccacccagcagccacaatggtgcgcatgaatgtcctggcagatgctctcaagagtatcaacaatgccgaaaagagaggcaaacgccaggtgcttattaggccgtgctccaaagtcatcgtccggtttctcactgtgatgatgaagcatggttacattggcgaatttgaaatcattgatgaccacagagctgggaaaattgttgtgaacctcacaggcaggctaaacaagtgtggggtgatcagccccagatttgacgtgcaactcaaagacctggaaaaatggcagaataatctgcttccatcccgccagtttggtttcattgtactgacaacctcagctggcatcatggaccatgaagaagcaagacgaaaacacacaggagggaaaatcctgggattctttttctagggatgtaatacatatatttacaaataaaatgcctcatggactctggtgcttccacttggtcgttttgagcctttacagcagtgtagccacagcttctgcggcagcatgcagttgcttcgtttatcggtgaatgcgattccctgaagtgactaatacagccaagggaaaaagttcttatgaaaccagtatgcctaagaaacagtcacccctgctgtctgccaaaaccaggtatttgacactaaatattttagttgtatttcagtttttttttttttttttcttttttggagacagagtctgactctattgctcaggctggagtgcagtggcgcgatcttggcccactgcaacctccacctcccgggttcaagtgattgtcctgtctcagccgcctgagtaactgggattacaagtgtgtgtcgccacatccggctaatttttatattttagtagagacagggtttcgccatgttgcccaggctggtcttgagttctgggcctcaagtgatcagcctacctcggcctcccgaa

SEQ ID NO: 25418 - protein, 130 aa, Homo sapiens [sequence omitted]

SEQ ID NO: 25419 - DNA, 1020 bp, Homo sapiens
ctctttccgccatctttccgcgccggtgagtagcactctctgagagctccaatttcatccgtctgccatcggcgccatcctgcaatctaagccacaatggtgcgcatgaatgtcctggcagatgctctcaagagtatcaacaatgccgaaaagagaggcaaacgccaggtgcttattaggccgtgctccaaagtcatcgtccggtttctcactgtgatgatgaagcatggttacattggcgaatttgaaatcattgatgaccacagagctgggaaaattgttgtgaacctcacaggcaggctaaacaagtgtggggtgatcagccccagatttgacgtgcaactcaaagacctggaaaaatggcagaataatctgcttccatcccgccagtttggtttcattgtactgacaacctcagctggcatcatggaccatgaagaagcaagacgaaaacacacaggagggaaaatcctgggattctttttctagggatgtaatacatatatttacaaataaaatgcctcatggactctggtgcttccacttggtcgttttgagcctttacagcagtgtagccacagcttctgcggcagcatgcagttgcttcgtttatcggtgaatgcgattccctgaagtgactaatacagccaagggaaaaagttcttatgaaaccagtatgcctaagaaacagtcacccctgctgtctgccaaaaccaggtatttgacactaaatattttagttgtatttcagtttttttttttttttttcttttttggagacagagtctgactctattgctcaggctggagtgcagtggcgcgatcttggcccactgcaacctccacctcccgggttcaagtgattgtcctgtctcagccgcctgagtaactgggattacaagtgtgtgtcgccacatccggctaatttttatattttagtagagacagggtttcgccatgttgcccaggctggtcttgagttctgggcctcaagtgatcagcctacctcggcctcccgaa

SEQ ID NO: 25420 - protein, 130 aa, Homo sapiens [sequence omitted]

SEQ ID NO: 25421 - DNA, 985 bp, Homo sapiens
cccataactccgtgcgctctcccctcccgtcctctttccgccatctttccgcgccgccacaatggtgcgcatgaatgtcctggcagatgctctcaagagtatcaacaatgccgaaaagagaggcaaacgccaggtgcttattaggccgtgctccaaagtcatcgtccggtttctcactgtgatgatgaagcatggttacattggcgaatttgaaatcattgatgaccacagagctgggaaaattgttgtgaacctcacaggcaggctaaacaagtgtggggtgatcagccccagatttgacgtgcaactcaaagacctggaaaaatggcagaataatctgcttccatcccgccagtttggtttcattgtactgacaacctcagctggcatcatggaccatgaagaagcaagacgaaaacacacaggagggaaaatcctgggattctttttctagggatgtaatacatatatttacaaataaaatgcctcatggactctggtgcttccacttggtcgttttgagcctttacagcagtgtagccacagcttctgcggcagcatgcagttgcttcgtttatcggtgaatgcgattccctgaagtgactaatacagccaagggaaaaagttcttatgaaaccagtatgcctaagaaacagtcacccctgctgtctgccaaaaccaggtatttgacactaaatattttagttgtatttcagtttttttttttttttttcttttttggagacagagtctgactctattgctcaggctggagtgcagtggcgcgatcttggcccactgcaacctccacctcccgggttcaagtgattgtcctgtctcagccgcctgagtaactgggattacaagtgtgtgtcgccacatccggctaatttttatattttagtagagacagggtttcgccatgttgcccaggctggtcttgagttctgggcctcaagtgatcagcctacctcggcctcccgaa

SEQ ID NO: 25422 - protein, 130 aa, Homo sapiens [sequence omitted]

SEQ ID NO: 25423 - DNA, 602 bp, Homo sapiens
ataactccgtgcgctctcccctcccgtcctctttccgccatctttccgcgccgccacaatggtgcgcatgaatgtcctggcagatgctctcaagagtatcaacaatgccgaaaagagaggcaaacgccaggtgcttattaggccgtgctccaaagtcatcgtccggtttctcactgtgatgatgaagcatggttacattggcgaatttgaaatcattgatgaccacagagctgggaaaattgttgtgaacctcacaggcaggctaaacaaggttggagtgcagtggcacgatcttggctactgcaacctctgtctcccaggttcaagcgattctcctgcctcagcctccctagtagctgagattacagtgtggggtgatcagccccagatttgacgtgcaactcaaagacctggaaaaatggcagaataatctgcttccatcccgccagtttggtttcattgtactgacaacctcagctggcatcatggaccatgaagaagcaagacgaaaacacacaggagggaaaatcctgggattctttttctagggatgtaatacatatatttacaaataaaatgcctcatggactctggtgcttcca

SEQ ID NO: 25424 - protein, 111 aa, Homo sapiens
MVRMNVLADALKSINNAEKRGKRQVLIRPCSKVIVRFLTVMMKHGYIGEFEIIDDHRAGKIVVNLTGRLNKVGVQWHDLGYCNLCLPGSSDSPASASLVAEITVWGDQPQI

SEQ ID NO: 25425 - DNA, 425 bp, Homo sapiens
ataactccgtgcgctctcccctcccgtcctctttccgccatctttccgcgccgccacaatggtgcgcatgaatgtcctggcagatgctctcaagagtatcaacaatgccgaaaagagaggcaaacgccaggtgcttattaggccgtgctccaaagtcatcgtccggtttctcactgtgatgatgaagcatgtgtggggtgatcagccccagatttgacgtgcaactcaaagacctggaaaaatggcagaataatctgcttccatcccgccagtttggtttcattgtactgacaacctcagctggcatcatggaccatgaagaagcaagacgaaaacacacaggagggaaaatcctgggattctttttctagggatgtaatacatatatttacaaataaaatgcctcatggactctggtgcttcca

SEQ ID NO: 25426 - protein, 60 aa, Homo sapiens
MCGVISPRFDVQLKDLEKWQNNLLPSRQFGFIVLTTSAGIMDHEEARRKHTGGKILGFFF

SEQ ID NO: 25427 - DNA, 876 bp, Homo sapiens
ctttccgcgccggtgagtagcactctctgagagctccaatttcatccgtctgccatcggcgccatcctgcaatctaaggttcggtctcggtgtcctgcgaggaggctggtccccaccttggccgaggatcctggccttgccggttcctggacaggcatagaggagagccatggctgggcgccccagactgtgcactcaggggatcccggtccgtggggtgcaggccgcagcgcgggcgggagccggagccttcgactgcccagctaggcggtagctccggttcgggccgcagcgtctggatctccctttagtgctgaggcagcgccttggccccgggcggcgggcaacatcggggctggtgggccgtgcagcttctcactgctgcggccgcgctgggagcttgggaggctgaggccacccagcagccacaatggtgcgcatgaatgtcctggcagatgctctcaagagtatcaacaatgccgaaaagagaggcaaacgccaggtgcttattaggccgtgctccaaagtcatcgtccggtttctcactgtgatgatgaagcatggttacattggcgaatttgaaatcattgatgaccacagagctgggaaaattgttgtgaacctcacaggcaggctaaacaagtgtggggtgatcagccccagatttgacgtgcaactcaaagacctggaaaaatggcagaataatctgcttccatcccgccagtttggtttcattgtactgacaacctcagctggcatcatggaccatgaagaagcaagacgaaaacacacaggagggaaaatcctgggattctttttctagggatgtaatacatatatttacaaataaaatgcctcatggactctggtgcttcc

SEQ ID NO: 25428 - protein, 130 aa, Homo sapiens [sequence omitted]

SEQ ID NO: 25429 - DNA, 542 bp, Homo sapiens
ctctttccgccatctttccgcgccggtgagtagcactctctgagagctccaatttcatccgtctgccatcggcgccatcctgcaatctaagccacaatggtgcgcatgaatgtcctggcagatgctctcaagagtatcaacaatgccgaaaagagaggcaaacgccaggtgcttattaggccgtgctccaaagtcatcgtccggtttctcactgtgatgatgaagcatggttacattggcgaatttgaaatcattgatgaccacagagctgggaaaattgttgtgaacctcacaggcaggctaaacaagtgtggggtgatcagccccagatttgacgtgcaactcaaagacctggaaaaatggcagaataatctgcttccatcccgccagtttggtttcattgtactgacaacctcagctggcatcatggaccatgaagaagcaagacgaaaacacacaggagggaaaatcctgggattctttttctagggatgtaatacatatatttacaaataaaatgcctcatggactctggtgcttcc

SEQ ID NO: 25430 - protein, 130 aa, Homo sapiens [sequence omitted]

SEQ ID NO: 25431 - DNA, 507 bp, Homo sapiens
cccataactccgtgcgctctcccctcccgtcctctttccgccatctttccgcgccgccacaatggtgcgcatgaatgtcctggcagatgctctcaagagtatcaacaatgccgaaaagagaggcaaacgccaggtgcttattaggccgtgctccaaagtcatcgtccggtttctcactgtgatgatgaagcatggttacattggcgaatttgaaatcattgatgaccacagagctgggaaaattgttgtgaacctcacaggcaggctaaacaagtgtggggtgatcagccccagatttgacgtgcaactcaaagacctggaaaaatggcagaataatctgcttccatcccgccagtttggtttcattgtactgacaacctcagctggcatcatggaccatgaagaagcaagacgaaaacacacaggagggaaaatcctgggattctttttctagggatgtaatacatatatttacaaataaaatgcctcatggactctggtgcttcc

SEQ ID NO: 25432 - protein, 130 aa, Homo sapiens [sequence omitted]

SEQ ID NO: 25433 - DNA, 2333 bp, Homo sapiens
cgggaagggcggccgacccatataagcagcctgcggggcgttccctcgggttgtggttggtgtgcgggtttcggttggaggactcgttggggaggtggcctgcgcttgtagagactgcatccccgagacgatggcggagggagataatcgcagcaccaacctgctggctgcagagactgcaagtctggaagaacagctgcaaggatggggagaagtgatgctgatggctgataaagtcctccgatgggaaagagcctggtttccacctgccatcatgggtgtggtttctttggtgtttctgattatctactatctagatccatctgttctgtccggcgtttcctgttttgttatgtttttgtgcttggctgactaccttgttcccattctagcgcctagaatttttggctccaataaatggaccactgaacaacagcaaagattccatgaaatttgcagcaatctagtaaaaactcgacgcagagctgtgggttggtggaaacgcctcttcacactaaaggaagaaaaacctaagatgtacttcatgaccatgatcgtttcccttgctgcggttgcttgggtgggacaacaagtccacaacctgcttctcacctacctgatagtgacttccttactattgcttcctggactaaaccaacatggaatcattttgaagtacattggaatggccaagagggagataaacaaacttctcaaacaaaaagaaaagaaaaacgaatgattcatctgctttaatcagtgtgattaatgcagcacccattgccccgggaaccgtttctgctgtactatctggatactaaaatgttacggaagtagctctttgttctccctcactctgcccttagttaatagaaattcagactcgccaagtaaggcttcgtgcatagtgtcttcatgtcgcgtatagttgagcgcgttcttagcagttggcttcatggacaactcattagtgttttgacttttcttacccagcgttaattgaattcttgcttttagacaacttcctttttgtagtggtgaaccttgccctttagtacagttcaagtgaatctggataattgttcatctttgctttagcttagataccatgtagtggtctgtggctacaggaagctggttctgtctgcttccacagtctgcttaaaaaactgtctgacttcgtgaatatagagaccaagtttaccacttctgatgaagagaccaattaagattcattcctcattctgtttctttccagtgggagaagagtccccatgaaataagatgaaactgattccatgcactagtacatgtaggcttctcccttgtgcaaagcttagcaatttgtaggaaactttgatctttttgtccaagaaaaggaatgtctgacaggcttaagctttcgtccccttgcacttagactcgaagttagtaaatccttaaaggctttttaatagcagacttccaaaagattgcatttaggatttctagcatgcttttaatttcagattttcagctgacattagctatagtatacagtaggttaagactcatgtctatgactttcactctaagactggcaaaaggacagcagtcttctatgtttagtcaatattcatttcagtagaagataatcttatctaatttttgagaccagaataagccttttaaggtaaacctcaaaattatcattttatggtaatactgaccattttagtcccctaggtttgacatgggagatagtgactacactggtgtctgacttttttcctagagatttctccctgaaaaatacaagggctgttggtgagagcagacttgaggtgatgatagttggcctctggtctacaaagatttcataactccttggaaagcttcttataatcattcttaacttcttggtagctagaaatttagagtagttgaaatctttaggaatgaacttctgagggccaaaaaatgtgactgacgggaacaattcttaaactgattaactagctgtaatatagttttgtgaatttattgcactgatgttgtaccttgtggtatatctgtccctattaaataagtgttgttttctcctctttaatattgctgtgaacagtggtgcccattgtagcatatgtttgatttttttttattatttcataagaaaactacgttaattttaccttactttcattgtaaataagcctgtcttcctatctggattttttgtgtgcatacatattctactgattaactacttttgcagttttaatcctgtattatttcttctactttgttttgtgtaaaaggggaaaaaataaaaaaagctggaatcttcatgtctc

SEQ ID NO: 25434 - protein, 203 aa, Homo sapiens; identical to SEQ ID NO: 3381

SEQ ID NO: 25435 - DNA, 2040 bp, Homo sapiens
ttgtggttggtgtgcgggtttcggttggaggactcgttggggaggtggcctgcgcttgtagagactgcatccccgagacgatggcggagggagataatcgcagcaccaacctgctggctgcagagactgcaagtctggaagaacagctcaaagattccatgaaatttgcagcaatctagtaaaaactcgacgcagagctgtgggttggtggaaacgcctcttcacactaaaggaagaaaaacctaagatgtacttcatgaccatgatcgtttcccttgctgcggttgcttgggtgggacaacaagtccacaacctgcttctcacctacctgatagtgacttccttactattgcttcctggactaaaccaacatggaatcattttgaagtacattggaatggccaagagggagataaacaaacttctcaaacaaaaagaaaagaaaaacgaatgattcatctgctttaatcagtgtgattaatgcagcacccattgccccgggaaccgtttctgctgtactatctggatactaaaatgttacggaagtagctctttgttctccctcactctgcccttagttaatagaaattcagactcgccaagtaaggcttcgtgcatagtgtcttcatgtcgcgtatagttgagcgcgttcttagcagttggcttcatggacaactcattagtgttttgacttttcttacccagcgttaattgaattcttgcttttagacaacttcctttttgtagtggtgaaccttgccctttagtacagttcaagtgaatctggataattgttcatctttgctttagcttagataccatgtagtggtctgtggctacaggaagctggttctgtctgcttccacagtctgcttaaaaaactgtctgacttcgtgaatatagagaccaagtttaccacttctgatgaagagaccaattaagattcattcctcattctgtttctttccagtgggagaagagtccccatgaaataagatgaaactgattccatgcactagtacatgtaggcttctcccttgtgcaaagcttagcaatttgtaggaaactttgatctttttgtccaagaaaaggaatgtctgacaggcttaagctttcgtccccttgcacttagactcgaagttagtaaatccttaaaggctttttaatagcagacttccaaaagattgcatttaggatttctagcatgcttttaatttcagattttcagctgacattagctatagtatacagtaggttaagactcatgtctatgactttcactctaagactggcaaaaggacagcagtcttctatgtttagtcaatattcatttcagtagaagataatcttatctaatttttgagaccagaataagccttttaaggtaaacctcaaaattatcattttatggtaatactgaccattttagtcccctaggtttgacatgggagatagtgactacactggtgtctgacttttttcctagagatttctccctgaaaaatacaagggctgttggtgagagcagacttgaggtgatgatagttggcctctggtctacaaagatttcataactccttggaaagcttcttataatcattcttaacttcttggtagctagaaatttagagtagttgaaatctttaggaatgaacttctgagggccaaaaaatgtgactgacgggaacaattcttaaactgattaactagctgtaatatagttttgtgaatttattgcactgatgttgtaccttgtggtatatctgtccctattaaataagtgttgttttctcctctttaatattgctgtgaacagtggtgcccattgtagcatatgtttgatttttttttattatttcataagaaaactacgttaattttaccttactttcattgtaaataagcctgtcttcctatctggattttttgtgtgcatacatattctactgattaactacttttgcagttttaatcctgtattatttcttctactttgttttgtgtaaaaggggaaaaaataaaaaaagctggaatcttcat

SEQ ID NO: 25436 - protein, 68 aa, Homo sapiens [sequence omitted]

SEQ ID NO: 25437 - DNA, 2198 bp, Homo sapiens
ggttgtggttggtgtgcgggtttcggttggaggactcgttggggaggtggcctgcgcttgtagagactgcatccccgagacgatggcggagggagataatcgcagcaccaacctgctggctgcagagactgcaagtctggaagaacagctgcaaggatggggagaagtgatgctgatggctgataaagtcctccgatgggaaagagcctggtttccacctgccatcatgggtgtggtttctttggtgtttctgattatctactatctagaatttttggctccaataaatggaccactgaacaacagcaaagattccatgaaatttgcagcaatctagtaaaaactcgacgcagagctgtgggttggtggaaacgcctcttcacactaaaggaagaaaaacctaagatgtacttcatgaccatgatcgtttcccttgctgcggttgcttgggtgggacaacaagtccacaacctgcttctcacctacctgatagtgacttccttactattgcttcctggactaaaccaacatggaatcattttgaagtacattggaatggccaagagggagataaacaaacttctcaaacaaaaagaaaagaaaaacgaatgattcatctgctttaatcagtgtgattaatgcagcacccattgccccgggaaccgtttctgctgtactatctggatactaaaatgttacggaagtagctctttgttctccctcactctgcccttagttaatagaaattcagactcgccaagtaaggcttcgtgcatagtgtcttcatgtcgcgtatagttgagcgcgttcttagcagttggcttcatggacaactcattagtgttttgacttttcttacccagcgttaattgaattcttgcttttagacaacttcctttttgtagtggtgaaccttgccctttagtacagttcaagtgaatctggataattgttcatctttgctttagcttagataccatgtagtggtctgtggctacaggaagctggttctgtctgcttccacagtctgcttaaaaaactgtctgacttcgtgaatatagagaccaagtttaccacttctgatgaagagaccaattaagattcattcctcattctgtttctttccagtgggagaagagtccccatgaaataagatgaaactgattccatgcactagtacatgtaggcttctcccttgtgcaaagcttagcaatttgtaggaaactttgatctttttgtccaagaaaaggaatgtctgacaggcttaagctttcgtccccttgcacttagactcgaagttagtaaatccttaaaggctttttaatagcagacttccaaaagattgcatttaggatttctagcatgcttttaatttcagattttcagctgacattagctatagtatacagtaggttaagactcatgtctatgactttcactctaagactggcaaaaggacagcagtcttctatgtttagtcaatattcatttcagtagaagataatcttatctaatttttgagaccagaataagccttttaaggtaaacctcaaaattatcattttatggtaatactgaccattttagtcccctaggtttgacatgggagatagtgactacactggtgtctgacttttttcctagagatttctccctgaaaaatacaagggctgttggtgagagcagacttgaggtgatgatagttggcctctggtctacaaagatttcataactccttggaaagcttcttataatcattcttaacttcttggtagctagaaatttagagtagttgaaatctttaggaatgaacttctgagggccaaaaaatgtgactgacgggaacaattcttaaactgattaactagctgtaatatagttttgtgaatttattgcactgatgttgtaccttgtggtatatctgtccctattaaataagtgttgttttctcctctttaatattgctgtgaacagtggtgcccattgtagcatatgtttgatttttttttattatttcataagaaaactacgttaattttaccttactttcattgtaaataagcctgtcttcctatctggattttttgtgtgcatacatattctactgattaactacttttgcagttttaatcctgtattatttcttctactttgttttgtgtaaaaggggaaaaaataaaaaaagctggaatcttcat

SEQ ID NO: 25438 - protein, 138 aa, Homo sapiens
MGKSLVSTCHHGCGFFGVSDYLLSRIFGSNKWTTEQQQRFHEICSNLVKTRRRAVGWWKRLFTLKEEKPKMYFMTMIVSLAAVAWVGQQVHNLLLTYLIVTSLLLLPGLNQHGIILKYIGMAKREINKLLKQKEKKNE

SEQ ID NO: 25439 - DNA, 2227 bp, Homo sapiens
gggttgtggttggtgtgcgggtttcggttggaggactcgttggggaggtggcctgcgcttgtagagactgcatccccgagacgatggcggagggagataatcgcagcaccaacctgctggctgcagagactgcaagtctggaagaacagctgcaaggatggggagaagtgatgctgatggctgataaagtcctccgatgggaaagagcctggtttccacctgccatcatgggtgtggtttctttggtgtttctgattatctactatctagatccatctgttctgtccggcgtttcctgttttgttatgtttttgtgcttggctgactaccttgttcccattctagcgcctagaatttttggctccaataaatggaccactgaacaacagcaaagattccatgaaatttgcagcaatctagtaaaaactcgacgcagagctgtgggttggtggaaacgcctcttcacactaaaggaagaggtgggacaacaagtccacaacctgcttctcacctacctgatagtgacttccttactattgcttcctggactaaaccaacatggaatcattttgaagtacattggaatggccaagagggagataaacaaacttctcaaacaaaaagaaaagaaaaacgaatgattcatctgctttaatcagtgtgattaatgcagcacccattgccccgggaaccgtttctgctgtactatctggatactaaaatgttacggaagtagctctttgttctccctcactctgcccttagttaatagaaattcagactcgccaagtaaggcttcgtgcatagtgtcttcatgtcgcgtatagttgagcgcgttcttagcagttggcttcatggacaactcattagtgttttgacttttcttacccagcgttaattgaattcttgcttttagacaacttcctttttgtagtggtgaaccttgccctttagtacagttcaagtgaatctggataattgttcatctttgctttagcttagataccatgtagtggtctgtggctacaggaagctggttctgtctgcttccacagtctgcttaaaaaactgtctgacttcgtgaatatagagaccaagtttaccacttctgatgaagagaccaattaagattcattcctcattctgtttctttccagtgggagaagagtccccatgaaataagatgaaactgattccatgcactagtacatgtaggcttctcccttgtgcaaagcttagcaatttgtaggaaactttgatctttttgtccaagaaaaggaatgtctgacaggcttaagctttcgtccccttgcacttagactcgaagttagtaaatccttaaaggctttttaatagcagacttccaaaagattgcatttaggatttctagcatgcttttaatttcagattttcagctgacattagctatagtatacagtaggttaagactcatgtctatgactttcactctaagactggcaaaaggacagcagtcttctatgtttagtcaatattcatttcagtagaagataatcttatctaatttttgagaccagaataagccttttaaggtaaacctcaaaattatcattttatggtaatactgaccattttagtcccctaggtttgacatgggagatagtgactacactggtgtctgacttttttcctagagatttctccctgaaaaatacaagggctgttggtgagagcagacttgaggtgatgatagttggcctctggtctacaaagatttcataactccttggaaagcttcttataatcattcttaacttcttggtagctagaaatttagagtagttgaaatctttaggaatgaacttctgagggccaaaaaatgtgactgacgggaacaattcttaaactgattaactagctgtaatatagttttgtgaatttattgcactgatgttgtaccttgtggtatatctgtccctattaaataagtgttgttttctcctctttaatattgctgtgaacagtggtgcccattgtagcatatgtttgatttttttttattatttcataagaaaactacgttaattttaccttactttcattgtaaataagcctgtcttcctatctggattttttgtgtgcatacatattctactgattaactacttttgcagttttaatcctgtattatttcttctactttgttttgtgtaaaaggggaaaaaataaaaaaagctggaatcttcat

SEQ ID NO: 25440 - protein, 185 aa, Homo sapiens
MAEGDNRSTNLLAAETASLEEQLQGWGEVMLMADKVLRWERAWFPPAIMGVVSLVFLIIYYLDPSVLSGVSCFVMFLCLADYLVPILAPRIFGSNKWTTEQQQRFHEICSNLVKTRRRAVGWWKRLFTLKEEVGQQVHNLLLTYLIVTSLLLLPGLNQHGIILKYIGMAKREINKLLKQKEKKNE

SEQ ID NO: 25441 - DNA, 1195 bp, Homo sapiens
gggttgtggttggtgtgcgggtttcggttggaggactcgttggggaggtggcctgcgcttgtagagactgcatccccgagacgatggcggagggagataatcgcagcaccaacctgctggctgcagagactgcaagtctggaagaacagctgcaaggatggggagaagtgatgctgatggctgataaagtcctccgatgggaaagagcctggtttccacctgccatcatgggtgtggtttctttggtgtttctgattatctactatctagatccatctgttctgtccggcgtttcctgttttgttatgtttttgtgcttggctgactaccttgttcccattctagcgcctagaatttttggctccaataaatggaccactgaacaacagcaaagattccatgaaatttgcagcaatctagtaaaaactcgacgcagagctgtgggttggtggaaacgcctcttcacactaaaggaagaaaaacctaagatggtactttttttgctttgacttaagtacagtaaaattttaagatttgagtcaattcgcctttttgtcttaatagctataatttgaaaattattcattggttaattcctaagtacattcataaatgtttacctgtattaattagactgaatcattttaaagttaaaaattacatttttgcatttaattttttattctaataaaacaaaattcttctgtttcatttttcttactgaaataatagtaaaagacatatacttagaaagcatctgtttaggccgggcacagtggctaatgcctataatcccagctacatggaaggctgaggatcacttgagccctggaggtcgaggctgcagtgagctgtgtttgcgcagtgagctgtttgcaccactgcactccagcctttgtgacagaatgagactctgtctcaaaaaaaaaaaaaaaaaaggaaagcatctgttcatctgttctcttatctgtaagcttcacgtcgtgaggctgttccgtgaagttattaactgaaaagatcgtataatttatatcataaaatatttacatacagaattgcagtaattctaggaagaaatgtatccaaattctataaagtagatccaatggaataggtttttaaatctaagaatttttaaagaaaagtgataataaaagctaaattatttcccgaactttgaaacacattcttcttt

SEQ ID NO: 25442 - protein, 141 aa, Homo sapiens
MAEGDNRSTNLLAAETASLEEQLQGWGEVMLMADKVLRWERAWFPPAIMGVVSLVFLIIYYLDPSVLSGVSCFVMFLCLADYLVPILAPRIFGSNKWTTEQQQRFHEICSNLVKTRRRAVGWWKRLFTLKEEKPKMVLFLL

SEQ ID NO: 25443 - DNA, 605 bp, Homo sapiens
gggttgtggttggtgtgcgggtttcggttggaggactcgttggggaggtggcctgcgcttgtagagactgcatccccgagacgatggcggagggagataatcgcagcaccaacctgctggctgcagagactgcaagtctggaagaacagctgcaaggatggggagaagtgatgctgatggctgataaagtcctccgatgggaaagagcctggtttccacctgccatcatgggtgtggtttctttggtgtttctgtaagtgagctattagattactatgggttgtgcttcttattaataaagactttttaatatatagcttctgtttgtgggagtgccttaagtcttctgtaatatataacccataaagaacccataaagaatgtttctcataagcacttctagtttccagaatttgtagtacttctgtaaacttggtaacctaaagcacttgagtaaatcagtgactcgcaaactttttgtcctccagacacttaaactctttttttgttattatactttaagttctgggaaacatgtgtagaatgtacaggtttgttacataggtatatatacatgtgccatggtggtttgctgcacccatcaa

SEQ ID NO: 25444 - protein, 57 aa, Homo sapiens
MAEGDNRSTNLLAAETASLEEQLQGWGEVMLMADKVLRWERAWFPPAIMGVVSLVFL

SEQ ID NO: 25445 - DNA, 345 bp, Homo sapiens
cctccatgttctgtttacatgtaaattgagccaccaactctttctctgtagcagtccggagtaacactggccagaagactcagcctgatgtcatgtcacagaatgctagaaagctgatccaaaaaaatcttgctacatcagctgatactccaccaagcaccgttccaggaactggcaagagtgttgcttgtagtcctaaaaaggcagtcagagaccctaaaactgaaacaaacatctgatccggacatttggcatgattctgtttgtatcaaacgatgaaaaatcggccgggcgcggtggctactgcactacagcctgggcaacagagccaggctgtgtctcaag

SEQ ID NO: 25446 - protein, 48 aa, Homo sapiens
MSQNARKLIQKNLATSADTPPSTVPGTGKSVACSPKKAVRDPKTETNI

SEQ ID NO: 25447 - DNA, 8192 bp, Homo sapiens
agagtttcactctgttgcccaggctggagtgcagtggcgcaatctcggctcactgcagcctctgccctctgagttcaagtgattctcctgcctcagcctcctgagtagctgggattacaggtgtctgccaccgtgcccagacatgaaaaaactgcttcctaacatgttaagtccggatccgagggaacttcagaaatccattgaagttcaattgttaagaagttctgtttgtttggcaactgctttaaacccgatagaacaagatcagaagtggcagtctataactgaaaatgtggtaaagtacttgaagcaaacatcccgcatcgctattggacctctgagactttctactttaacagtttcacagtctttgccagttctaagtaccttgcagctgtattgctcatctgctttggagaacacagtttctaacagactttcaacagaggactgtcttattccactcttcagtgaagctttacgttcatgtaaacagcatgacgtgaggccatggatgcaggcattaaggtatactatgtaccagaatcagttgttggagaaaattaaagaacaaacagtcccaattagaagccatctcatggaattaggtctaacagcagcaaaatttgctagaaaacgagggaatgtgtcccttgcaacaagactgctggcacagtgcagtgaagttcagctgggaaagaccaccactgcacaggatttagtccaacattttaaaaaactatcaacccaaggtcaagtggatgaaaaatgggggcccgaacttgatattgaaaaaaccaaattgctttatacagcaggccagtcaacacatgcaatggaaatgttgagttcttgtgccatatctttctgcaagtctgtgaaagctgaatatgcagttgctaaatcaattctgacactggctaaatggatccaggcagaatggaaagagatttcaggacagctgaaacaggtttacagagctcagcaccaacagaacttcacaggtctttctactttgtctaaaaacatactcactctaatagaactgccatctgttaatacgatggaagaagagtatcctcggatcgagagtgaatctacagtgcatattggagttggagaacctgacttcattttgggacagttgtatcacctgtcttcagtacaggcacctgaagtagccaaatcttgggcagcgttggccagctgggcttataggtggggcagaaaggtggttgacaatgccagtcagggagaaggtgttcgtctgctgcctagagaaaaatctgaagttcagaatctacttccagacactataactgaggaagagaaagagagaatatatggtattcttggacaggctgtgtgtcggccggcggggattcaggatgaagatataacacttcagataactgagagtgaagacaacgaagaagatgacatggttgatgttatctggcgtcagttgatatcaagctgcccatggctttcagaacttgatgaaagtgcaactgaaggagttattaaagtgtggaggaaagttgtagatagaatattcagcctgtacaaactctcttgcagtgcatactttactttccttaaactcaacgctggtcaaattcctttagatgaggatgaccctaggctgcatttaagtcacagagtggaacagagcactgatgacatgattgtgatggccacattgcgcctgctgcggttgctcgtgaagcatgctggtgagcttcggcagtatctggagcacggcttggagacaacacccactgcaccatggagaggaattattccgcaacttttctcacgcttaaaccaccctgaagtgtatgtgcgccaaagtatttgtaaccttctctgccgtgtggctcaagattccccacatctcatattgtatcctgcaatagtgggtaccatatcgcttagtagtgaatcccaggcttcaggaaataaattttccactgcaattccaactttacttggcaatattcaaggagaagaattgctggtttctgaatgtgagggaggaagtcctcctgcatctcaggatagcaataaggatgaacctaaaagtggattaaatgaagaccaagccatgatgcaggattgttacagcaaaattgtagataagctgtcctctgcaaaccccaccatggtattacaggttcagatgctcgtggctgaactgcgcagggtcactgtgctctgggatgagctctggctgggagttttgctgcaacaacacatgtatgtcctgagacgaattcagcagcttgaagatgaggtgaagagagtccagaacaacaacaccttacgcaaagaagagaaaattgcaatcatgagggagaagcacacagctttgatgaagcccatcgtatttgctttggagcatgtgaggagtatcacagcggctcctgcagaaacacctcatgaaaaatggtttcaggataactatggtgatgccattgaaaatgccctagaaaaactgaagactccattgaaccctgcaaagcctgggagcagctggattccatttaaagagataatgctaagtttgcaacagagagcacagaaacgtgcaagttacatcttgcgtcttgaagaaatcagtccatggttggctgccatgactaacactgaaattgctcttcctggggaagtctcagccagagacactgtcacaatccatagtgtgggcggaaccatcacaatcttaccgactaaaaccaagccaaagaaacttctctttcttggatcagatgggaagagctatccttatcttttcaaaggactggaggatttacatctggatgagagaataatgcagttcctatctattgtgaataccatgtttgctacaattaatcgccaagaaacaccccggttccatgctcgacactattctgtaacaccactaggaacaagatcaggactaatccagtgggtagatggagccacacccttatttggtctttacaaacgatggcaacaacgggaagctgccttacaagcacaaaaggcccaagattcctaccaaactcctcagaatcctggaattgtaccccgtcctagtgaactttattacagtaaaattggccctgctttgaaaacagttgggcttagcctggatgtgtcccgtcgggattggcctcttcatgtaatgaaggcagtattggaagagttaatggaggccacacccccgaatctccttgccaaagagctctggtcatcttgcacaacacctgatgaatggtggagagttacgcagtcttatgcaagatctactgcagtcatgtctatggttggatacataattggccttggagacagacatctggataatgttcttatagatatgacgactggagaagttgttcacatagattacaatgtttgctttgaaaaaggtaaaagccttagagttcctgagaaagtaccttttcgaatgacacaaaacattgaaacagcactgggtgtaactggagtagaaggtgtatttaggctttcatgtgagcaggttttacacattatgcggcgtggcagagagaccctgctgacgctgctggaggcctttgtgtacgaccctctggtggactggacagcaggaggcgaggctgggtttgctggtgctgtctatggtggaggtggccagcaggccgagagcaagcagagcaagagagagatggagcgagagatcacccgcagcctgttttcttctagagtagctgagattaaggtgaactggtttaagaatagagatgagatgctggttgtgcttcccaagttggacggtagcttagatgaatacctaagcttgcaagagcaactgacagatgtggaaaaactgcagggcaaactactggaggaaatagagtttctagaaggagctgaaggggtggatcatccttctcatactctgcaacacaggtattctgagcacacccaactacagactcagcaaagagctgttcaggaagcaatccaggtgaagctgaatgaatttgaacaatggataacacattatcaggctgcattcaataatttagaagcaacacagcttgcaagcttgcttcaagagataagcacacaaatggaccttggtcctccaagttacgtgccagcaacagcctttctgcagaatgctggtcaggcccacttgattagccagtgcgagcagctggagggggaggttggtgctctcctgcagcagaggcgctccgtgctccgtggctgtctggagcaactgcatcactatgcaaccgtggccctgcagtatccgaaggccatatttcagaaacatcgaattgaacagtggaagacctggatggaagagctcatctgtaacaccacagtagagcgttgtcaagagctctataggaaatatgaaatgcaatatgctccccagccacccccaacagtgtgtcagttcatcactgccactgaaatgaccctgcagcgatacgcagcagacatcaacagcagacttattagacaagtggaacgcttgaaacaggaagctgtcactgtgccagtttgtgaagatcagttgaaagaaattgaacgttgcattaaagttttccttcatgagaatggagaagaaggatctttgagtctagcaagtgttattatttctgccctttgtacccttacaaggcgtaacctgatgatggaaggtgcagcgtcaagtgctggagaacagctggttgatctgacttctcgggatggagcctggttcttggaggaactctgcagtatgagcggaaacgtcacctgcttggttcagttactgaagcagtgccacctggtgccacaggacttagatatcccgaaccccatggaagcgtctgagacagttcacttagccaatggagtgtatacctcacttcaggaattgaattcgaatttccggcaaatcatatttccagaagcacttcgatgtttaatgaaaggggaatacacgttagaaagtatgctgcatgaactggacggtcttattgagcagaccaccgatggcgttcccctgcagactctagtggaatctcttcaggcctacttaagaaacgcagctatgggactggaagaagaaacacatgctcattacatcgatgttgccagactactacatgctcagtacggtgaattaatccaaccgagaaatggttcagttgatgaaacacccaaaatgtcagctggccagatgcttttggtagcattcgatggcatgtttgctcaagttgaaactgctttcagcttattagttgaaaagttgaacaagatggaaattcccatagcttggcgaaagattgacatcataagggaagccaggagtactcaagttaatttttttgatgatgataatcaccggcaggtgctagaagagattttctttctaaaaagactacagactattaaggagttcttcaggctctgtggtaccttttctaaaacattgtcaggatcaagttcacttgaagatcagaatactgtgaatgggcctgtacagattgtcaatgtgaaaaccctttttagaaactcttgtttcagtgaagaccaaatggccaaacctatcaaggcattcacagctgactttgtgaggcagctcttgatagggctacccaaccaagccctcggactcacactgtgcagttttatcagtgctctgggtgtagacatcattgctcaagtagaggcaaaggactttggtgccgaaagcaaagtttctgttgatgatctctgtaagaaagcggtggaacataacatccagatagggaagttctctcagctggttatgaacagggcaactgtgttagcaagttcttacgacactgcctggaagaagcatgacttggtgcgaaggctagaaaccagtatttcttcttgtaagacaagcctgcagcgggttcagctgcatattgccatgtttcagtggcaacatgaagatctacttatcaatagaccacaagccatgtcagtcacacctcccccacggtctgctatcctaaccagcatgaaaaagaagctgcataccctgagccagattgaaacttctattgcaacagttcaggagaagctagctgcacttgaatcaagtattgaacagcgactcaagtgggcaggtggtgccaaccctgcattggcccctgtactacaagattttgaagcaacgatagctgaaagaagaaatcttgtccttaaagagagccaaagagcaagtcaggtcacatttctctgcagcaatatcattcattttgaaagtttacgaacaagaactgcagaagccttaaacctggatgcggcgttatttgaactaatcaagcgatgtcagcagatgtgttcgtttgcatcacagtttaacagttcagtgtctgagttagagcttcgtttattacagagagtggacactggtcttgaacatcctattggcagctctgaatggcttttgtcagcacacaaacagttgacccaggatatgtctactcagagggcaattcagacagagaaagagcagcagatagaaacggtctgtgaaacaattcagaatctggttgataatataaagactgtgctcactggtcataaccgacagcttggagatgtcaaacatctcttgaaagctatggctaaggatgaagaagctgctctggcagatggtgaagatgttccctatgagaacagtgttaggcagtttttgggtgaatataaatcatggcaagacaacattcaaacagttctatttacattagtccaggctatgggtcaggttcgaagtcaagaacacgttgaaatgctccaggaaatcactcccaccttgaaagaactgaaaacacaaagtcagagtatctataataatttagtgagttttgcatcacccttagtcaccgatgcaacaaatgaatgttcgagtccaacgtcatctgctacttatcagccatccttcgctgcagcagtccggagtaacactggccagaagactcagcctgatgtcatgtcacagaatgctagaaagctgatccaaaaaaatcttgctacatcagctgatactccaccaagcaccgttccaggaactggcaagagtgttgcttgtagtcctaaaaaggcagtcagagaccctaaaactgggaaagcggtgcaagagagaaactcctatgcagtgagtgtgtggaagagagtgaaagccaagttagagggccgagatgttgatccgaataggaggatgtcagttgctgaacaggttgactatgtcattaaggaagcaactaatctagataacttggctcagctgtatgaaggttggacagcctgggtgtgaatggcaagacagtagatgagtctggttaagcgaggtcagacatccaccagaatcaactcagcctcaggcatccaaagccacaccacagtcggtggtgatgcaactgggggcttactctgaggaaacctaggaaatctcggtgcactaggaagtgaatcccgcaggacagctgcactcagggatacgcccaacaccatggcctgcaaccccagggtcaagggtgaaggaaagcaagctcaccgcctgaacacggagattgtctttctgccacagaacagcagcagacgtgtcgggaggttagctgcggaaagaaatcgggatgccgcggagcacagagtgatttggaactccattccacctgaccctgtgtgtacaatccaggaaaaaaacaaaccccactcagaaacagagaaaactggggtcgcgaagaaatcacagccaaggaagatttgatgcattcagattctcgtgtaacacttgttgcttggcaacagtactggttgggttgaccagtaagtagaaaaaggctaaaggctatgcgatatgaatttcagaaatggactgaaaatggagagctatgtaacagatacactacagtagaagaacttacttctgaaatgaagggaaaaaaaccaccccatcgttccctactcctccccaccacttacccgttccccctttacctaatctagtagattagccatctttcaaattcacttttatttcagtccttatatttcatatacttccgtctcgatgctgttaacaacttctgataacatggaaaattcaaggattgtttaaaggtctgatgatcacacacaaaatgtaattccggttatttaagtcatttctgtgattctatcatgta

SEQ ID NO: 25448 - protein, 2392 aa, Homo sapiens
MKKLLPNMLSPDPRELQKSIEVQLLRSSVCLATALNPIEQDQKWQSITENVVKYLKQTSRIAIGPLRLSTLTVSQSLPVLSTLQLYCSSALENTVSNRLSTEDCLIPLFSEALRSCKQHDVRPWMQALRYTMYQNQLLEKIKEQTVPIRSHLMELGLTAAKFARKRGNVSLATRLLAQCSEVQLGKTTTAQDLVQHFKKLSTQGQVDEKWGPELDIEKTKLLYTAGQSTHAMEMLSSCAISFCKSVKAEYAVAKSILTLAKWIQAEWKEISGQLKQVYRAQHQQNFTGLSTLSKNILTLIELPSVNTMEEEYPRIESESTVHIGVGEPDFILGQLYHLSSVQAPEVAKSWAALASWAYRWGRKVVDNASQGEGVRLLPREKSEVQNLLPDTITEEEKERIYGILGQAVCRPAGIQDEDITLQITESEDNEEDDMVDVIWRQLISSCPWLSELDESATEGVIKVWRKVVDRIFSLYKLSCSAYFTFLKLNAGQIPLDEDDPRLHLSHRVEQSTDDMIVMATLRLLRLLVKHAGELRQYLEHGLETTPTAPWRGIIPQLFSRLNHPEVYVRQSICNLLCRVAQDSPHLILYPAIVGTISLSSESQASGNKFSTAIPTLLGNIQGEELLVSECEGGSPPASQDSNKDEPKSGLNEDQAMMQDCYSKIVDKLSSANPTMVLQVQMLVAELRRVTVLWDELWLGVLLQQHMYVLRRIQQLEDEVKRVQNNNTLRKEEKIAIMREKHTALMKPIVFALEHVRSITAAPAETPHEKWFQDNYGDAIENALEKLKTPLNPAKPGSSWIPFKEIMLSLQQRAQKRASYILRLEEISPWLAAMTNTEIALPGEVSARDTVTIHSVGGTITILPTKTKPKKLLFLGSDGKSYPYLFKGLEDLHLDERIMQFLSIVNTMFATINRQETPRFHARHYSVTPLGTRSGLIQWVDGATPLFGLYKRWQQREAALQAQKAQDSYQTPQNPGIVPRPSELYYSKIGPALKTVGLSLDVSRRDWPLHVMKAVLEELMEATPPNLLAKELWSSCTTPDEWWRVTQSYARSTAVMSMVGYIIGLGDRHLDNVLIDMTTGEVVHIDYNVCFEKGKSLRVPEKVPFRMTQNIETALGVTGVEGVFRLSCEQVLHIMRRGRETLLTLLEAFVYDPLVDWTAGGEAGFAGAVYGGGGQQAESKQSKREMEREITRSLFSSRVAEIKVNWFKNRDEMLVVLPKLDGSLDEYLSLQEQLTDVEKLQGKLLEEIEFLEGAEGVDHPSHTLQHRYSEHTQLQTQQRAVQEAIQVKLNEFEQWITHYQAAFNNLEATQLASLLQEISTQMDLGPPSYVPATAFLQNAGQAHLISQCEQLEGEVGALLQQRRSVLRGCLEQLHHYATVALQYPKAIFQKHRIEQWKTWMEELICNTTVERCQELYRKYEMQYAPQPPPTVCQFITATEMTLQRYAADINSRLIRQVERLKQEAVTVPVCEDQLKEIERCIKVFLHENGEEGSLSLASVIISALCTLTRRNLMMEGAASSAGEQLVDLTSRDGAWFLEELCSMSGNVTCLVQLLKQCHLVPQDLDIPNPMEASETVHLANGVYTSLQELNSNFRQIIFPEALRCLMKGEYTLESMLHELDGLIEQTTDGVPLQTLVESLQAYLRNAAMGLEEETHAHYIDVARLLHAQYGELIQPRNGSVDETPKMSAGQMLLVAFDGMFAQVETAFSLLVEKLNKMEIPIAWRKIDIIREARSTQVNFFDDDNHRQVLEEIFFLKRLQTIKEFFRLCGTFSKTLSGSSSLEDQNTVNGPVQIVNVKTLFRNSCFSEDQMAKPIKAFTADFVRQLLIGLPNQALGLTLCSFISALGVDIIAQVEAKDFGAESKVSVDDLCKKAVEHNIQIGKFSQLVMNRATVLASSYDTAWKKHDLVRRLETSISSCKTSLQRVQLHIAMFQWQHEDLLINRPQAMSVTPPPRSAILTSMKKKLHTLSQIETSIATVQEKLAALESSIEQRLKWAGGANPALAPVLQDFEATIAERRNLVLKESQRASQVTFLCSNIIHFESLRTRTAEALNLDAALFELIKRCQQMCSFASQFNSSVSELELRLLQRVDTGLEHPIGSSEWLLSAHKQLTQDMSTQRAIQTEKEQQIETVCETIQNLVDNIKTVLTGHNRQLGDVKHLLKAMAKDEEAALADGEDVPYENSVRQFLGEYKSWQDNIQTVLFTLVQAMGQVRSQEHVEMLQEITPTLKELKTQSQSIYNNLVSFASPLVTDATNECSSPTSSATYQPSFAAAVRSNTGQKTQPDVMSQNARKLIQKNLATSADTPPSTVPGTGKSVACSPKKAVRDPKTGKAVQERNSYAVSVWKRVKAKLEGRDVDPNRRMSVAEQVDYVIKEATNLDNLAQLYEGWTAWV

SEQ ID NO: 25449 - DNA, 8192 bp, Homo sapiens
ggttcttcctcttatggactgcaaccttcaaattcagctgtggtgtctcggcaaaggcacgatgataccagagtccacgctgacatacagaatgacgaaaaggagagatcgatgtcttattctgatgagtctcgactgtcgaatcttcttcggaggatcacccgggaagacgacagagaccgaagattggctactgtaaagcagttgaaagaatttattcagcaaccagaaaataagctggtactagttaaacaattggataatatcttggctgctgtacatgacgtgcttaatgaaagtagcaaattgcttcaggagttgagacaggagggagcttgctgtcttggccttctttgtgcttctctgagctatgaggctgagaagatcttcaagtggatttttagcaaatttagctcatctgcaaaagatgaagttaaactcctctacttatgtgccacctacaaagcactagagactgtaggagaaaagaaagccttttcatctgtaatgcagcttgtaatgaccagcctgcagtctattcttgaaaatgtggatacaccagaattgctttgtaaatgtgttaagtgcattcttttggtggctcgatgttaccctcatattttcagcactaattttagggatacagttgatatattagttggatggcatatagatcatactcagaaaccttcgctcacgcagcaggtatctgggtggttgcagagtttggagccattttgggtagctgatcttgcattttctactactcttcttggtcagtttctggaagacatggaagcatatgctgaggacctcagccatgtggcctctggggaatcagtggatgaagatgtccctcctccatcagtgtcattaccaaagctggctgcacttctccgggtatttagtactgtggtgaggagcattggggaacgcttcagcccaattcggggtcctccaattactgaggcatatgtaacagatgttctgtacagagtaatgagatgtgtgacggctgcaaaccaggtgtttttttctgaggctgtgttgacagctgctaatgagtgtgttggtgttttgctcggcagcttggatcctagcatgactatacattgtgacatggtcattacatatggattagaccaactggagaattgccagacttgtggtaccgattatatcatctcagtcttgaatttactcacgctgattgttgaacagataaatacgaaactgccatcatcatttgtagaaaaactgtttataccatcatctaaactactattcttgcgttatcataaagaaaaagaggttgttgctgtagcccatgctgtttatcaagcagtgctcagcttgaagaatattcctgttttggagactgcctataagttaatattgggagaaatgacttgtgccctaaacaacctcctacacagtctacaacttcctgaggcctgttctgaaataaaacatgaggcttttaagaatcatgtgttcaatgtagacaatgcaaaatttgtagttatatttgacctcagtgccctgactacaattggaaatgccaaaaactcactaatagggatgtgggcgctatctccaactgtctttgcacttctgagtaagaatctgatgattgtgcacagtgacctggctgttcacttccctgccattcagtatgctgtgctctacacattgtattctcattgtaccaggcatgatcactttatctctagtagcctcagttcttcctctccttctttgtttgatggagctgtgattagcactgtaactacggctacaaagaaacatttctcaattatattaaatcttctgggaatattacttaagaaagataaccttaaccaggacacgaggaaactgttaatgacttgggctttggaagcagctgttttaatgaagaagtctgaaacatacgcacctttattctctcttccgtctttccataaattttgcaaaggccttttagccaacactctcgttgaagatgtgaatatctgtctgcaggcatgcagcagtctacatgctctgtcctcttccttgccagatgatcttttacagagatgtgtcgatgtttgccgtgttcaactagtgcacagtggaactcgtattcgacaagcatttggaaaactgttgaaatcaattcctttagatgttgtcctaagcaataacaatcacacagaaattcaagaaatttctttagcattaagaagtcacatgagtaaagcaccaagtaatacattccacccccaagatttctctgatgttattagttttattttgtatgggaactctcatagaacagggaaggacaattggttggaaagactgttctatagctgccagagactggataagcgtgaccagtcaacaattccacgcaatctcctgaagacagatgctgtcctttggcagtgggccatatgggaagctgcacaattcactgttctttctaagctgagaaccccactgggcagagctcaagacaccttccagacaattgaaggtatcattcgaagtctcgcagctcacacattaaaccctgatcaggatgttagtcagtggacaactgcagacaatgatgaaggccatggtaacaaccaacttagacttgttcttcttctgcagtatctggaaaatctggagaaattaatgtataatgcatacgagggatgtgctaatgcattaacttcacctcccaaggtcattagaacttttttctataccaatcgccaaacttgtcaggactggctaacgcggattcgactctccatcatgagggtaggattgttggcaggccagcctgcagtgacagtgagacatggctttgacttgcttacagagatgaaaacaaccagcctatctcaggggaatgaattggaagtaaccattatgatggtggtagaagcattatgtgaacttcattgtcctgaagctatacagggaattgctgtctggtcatcatctattgttggaaaaaatcttctgtggattaactcagtggctcaacaggctgaagggaggtttgaaaaggcctctgtggagtaccaggaacacctgtgtgccatgacaggtgttgattgctgcatctccagctttgacaaatcggtgctcaccttagccaatgctgggcgtaacagtgccagcccgaaacattctctgaatggtgaatccagaaaaactgtgctgtccaaaccgactgactcttcccctgaggttataaattatttaggaaataaagcatgtgagtgctacatctcaattgccgattgggctgctgtgcaggaatggcagaacgctatccatgacttgaaaaagagtaccagtagcacttccctcaacctgaaagctgacttcaactatataaaatcattaagcagctttgagtctggaaaatttgttgaatgtaccgagcagttagaattgttaccaggagaaaatatcaatctacttgctggaggatcaaaagaaaaaatagacatgaaaaaactgcttcctaacatgttaagtccggatccgagggaacttcagaaatccattgaagttcaattgttaagaagttctgtttgtttggcaactgctttaaacccgatagaacaagatcagaagtggcagtctataactgaaaatgtggtaaagtacttgaagcaaacatcccgcatcgctattggacctctgagactttctactttaacagtttcacagtctttgccagttctaagtaccttgcagctgtattgctcatctgctttggagaacacagtttctaacagactttcaacagaggactgtcttattccactcttcagtgaagctttacgttcatgtaaacagcatgacgtgaggccatggatgcaggcattaaggtatactatgtaccagaatcagttgttggagaaaattaaagaacaaacagtcccaattagaagccatctcatggaattaggtctaacagcagcaaaatttgctagaaaacgagggaatgtgtcccttgcaacaagactgctggcacagtgcagtgaagttcagctgggaaagaccaccactgcacaggatttagtccaacattttaaaaaactatcaacccaaggtcaagtggatgaaaaatgggggcccgaacttgatattgaaaaaaccaaattgctttatacagcaggccagtcaacacatgcaatggaaatgttgagttcttgtgccatatctttctgcaagtctgtgaaagctgaatatgcagttgctaaatcaattctgacactggctaaatggatccaggcagaatggaaagagatttcaggacagctgaaacaggtttacagagctcagcaccaacagaacttcacaggtctttctactttgtctaaaaacatactcactctaatagaactgccatctgttaatacgatggaagaagagtatcctcggatcgagagtgaatctacagtgcatattggagttggagaacctgacttcattttgggacagttgtatcacctgtcttcagtacaggcacctgaagtagccaaatcttgggcagcgttggccagctgggcttataggtggggcagaaaggtggttgacaatgccagtcagggagaaggtgttcgtctgctgcctagagaaaaatctgaagttcagaatctacttccagacactataactgaggaagagaaagagagaatatatggtattcttggacaggctgtgtgtcggccggcggggattcaggatgaagatataacacttcagataactgagagtgaagacaacgaagaagatgacatggttgatgttatctggcgtcagttgatatcaagctgcccatggctttcagaacttgatgaaagtgcaactgaaggagttattaaagtgtggaggaaagttgtagatagaatattcagcctgtacaaactctcttgcagtgcatactttactttccttaaactcaacgctggtcaaattcctttagatgaggatgaccctaggctgcatttaagtcacagagtggaacagagcactgatgacatgattgtgatggccacattgcgcctgctgcggttgctcgtgaagcatgctggtgagcttcggcagtatctggagcacggcttggagacaacacccactgcaccatggagaggaattattccgcaacttttctcacgcttaaaccaccctgaagtgtatgtgcgccaaagtatttgtaaccttctctgccgtgtggctcaagattccccacatctcatattgtatcctgcaatagtgggtaccatatcgcttagtagtgaatcccaggcttcaggaaataaattttccactgcaattccaactttacttggcaatattcaaggagaagaattgctggtttctgaatgtgagggaggaagtcctcctgcatctcaggatagcaataaggatgaacctaaaagtggattaaatgaagaccaagccatgatgcaggattgttacagcaaaattgtagataagctgtcctctgcaaaccccaccatggtattacaggttcagatgctcgtggctgaactgcgcagggtcactgtgctctgggatgagctctggctgggagttttgctgcaacaacacatgtatgtcctgagacgaattcagcagcttgaagatgaggtgaagagagtccagaacaacaacaccttacgcaaagaagagaaaattgcaatcatgagggagaagcacacagctttgatgaagcccatcgtatttgctttggagcatgtgaggagtatcacagcggctcctgcagaaacacctcatgaaaaatggtttcaggataactatggtgatgccattgaaaatgccctagaaaaactgaagactccattgaaccctgcaaagcctgggagcagctggattccatttaaagagataatgctaagtttgcaacagagagcacagaaacgtgcaagttacatcttgcgtcttgaagaaatcagtccatggttggctgccatgactaacactgaaattgctcttcctggggaagtctcagccagagacactgtcacaatccatagtgtgggcggaaccatcacaatcttaccgactaaaaccaagccaaagaaacttctctttcttggatcagatgggaagagctatccttatcttttcaaaggactggaggatttacatctggatgagagaataatgcagttcctatctattgtgaataccatgtttgctacaattaatcgccaagaaacaccccggttccatgctcgacactattctgtaacaccactaggaacaagatcaggactaatccagtgggtagatggagccacacccttatttggtctttacaaacgatggcaacaacgggaagctgccttacaagcacaaaaggcccaagattcctaccaaactcctcagaatcctggaattgtaccccgtcctagtgaactttattacagtaaaattggccctgctttgaaaacagttgggcttagcctggatgtgtcccgtcgggattggcctcttcatgtaatgaaggcagtattggaagagttaatggaggccacacccccgaatctccttgccaaagagctctggtcatcttgcacaacacctgatgaatggtggagagttacgcagtcttatgcaagatctactgcagtcatgtctatggttggatacataattggccttggagacagacatctggataatgttcttatagatatgacgactggagaagttgttcacatagattacaatgtttgctttgaaaaaggtaaaagccttagagttcctgagaaagtaccttttcgaatgacacaaaacattgaaacagcactgggtgtaactggagtagaaggtgtatttaggctttcatgtgagcaggttttacacattatgcggcgtggcagagagaccctgctgacgctgctggaggcctttgtgtacgaccctctggtggactggacagcaggaggcgaggctgggtttgctggtgctgtctatggtggaggtggccagcaggccgagagcaagcagagcaagagagagatggagcgagagatcacccgcagcctgttttcttctagagtagctgagattaaggtgaactggtttaagaatagagatgagatgctggttgtgcttcccaagttggacggtagcttagatgaatacctaagcttgcaagagcaactgacagatgtggaaaaactgcagggcaaactactggaggaaatagagtttctagaaggagctgaaggggtggatcatccttctcatactctgcaacacaggtattctgagcacacccaactacagactcagcaaagagctgttcaggaagcaatccaggtgaagctgaatgaatttgaacaatggataacacattatcaggctgcattcaataatttagaagcaacacagcttgcaagcttgcttcaagagataagcacacaaatggaccttggtcctccaagttacgtgccagcaacagcctttctgcagaatgctggtcaggcccacttgattagccagtgcgagcagctggagggggaggttggtgctctcctgcagcagaggcgctccgtgctccgtggctgtctggagcaactgcatcactatgcaaccgtggccctgcagtatccgaaggccatatttcagaaacatcgaattgaacagtggaagacctggatggaagagctcatctgtaacaccacagtagagcgttgtcaagagctctataggaaatatgaaatgcaatatgctccccagccacccccaacagtgtgtcagttcatcactgccactgaaatgaccctgcagcgatacgcagcagacatcaacagcagacttattagacaagtggaacgcttgaaacaggaagctgtcactgtgccagtttgtgaagatcagttgaaagaaattgaacgttgcattaaagttttccttcatgagaatggagaagaaggatctttgagtctagcaagtgttattatttctgccctttgtacccttacaaggcgtaacctgatgatggaaggtgcagcgtcaagtgctggagaacagctggttgatctgacttctcgggatggagcctggttcttggaggaactctgcagtatgagcggaaacgtcacctgcttggttcagttactgaagcagtgccacctggtgccacaggacttagatat

SEQ ID NO: 25450 - protein, 3521 aa, Homo sapiens
MSYSDESRLSNLLRRITREDDRDRRLATVKQLKEFIQQPENKLVLVKQLDNILAAVHDVLNESSKLLQELRQEGACCLGLLCASLSYEAEKIFKWIFSKFSSSAKDEVKLLYLCATYKALETVGEKKAFSSVMQLVMTSLQSILENVDTPELLCKCVKCILLVARCYPHIFSTNFRDTVDILVGWHIDHTQKPSLTQQVSGWLQSLEPFWVADLAFSTTLLGQFLEDMEAYAEDLSHVASGESVDEDVPPPSVSLPKLAALLRVFSTVVRSIGERFSPIRGPPITEAYVTDVLYRVMRCVTAANQVFFSEAVLTAANECVGVLLGSLDPSMTIHCDMVITYGLDQLENCQTCGTDYIISVLNLLTLIVEQINTKLPSSFVEKLFIPSSKLLFLRYHKEKEVVAVAHAVYQAVLSLKNIPVLETAYKLILGEMTCALNNLLHSLQLPEACSEIKHEAFKNHVFNVDNAKFVVIFDLSALTTIGNAKNSLIGMWALSPTVFALLSKNLMIVHSDLAVHFPAIQYAVLYTLYSHCTRHDHFISSSLSSSSPSLFDGAVISTVTTATKKHFSIILNLLGILLKKDNLNQDTRKLLMTWALEAAVLMKKSETYAPLFSLPSFHKFCKGLLANTLVEDVNICLQACSSLHALSSSLPDDLLQRCVDVCRVQLVHSGTRIRQAFGKLLKSIPLDVVLSNNNHTEIQEISLALRSHMSKAPSNTFHPQDFSDVISFILYGNSHRTGKDNWLERLFYSCQRLDKRDQSTIPRNLLKTDAVLWQWAIWEAAQFTVLSKLRTPLGRAQDTFQTIEGIIRSLAAHTLNPDQDVSQWTTADNDEGHGNNQLRLVLLLQYLENLEKLMYNAYEGCANALTSPPKVIRTFFYTNRQTCQDWLTRIRLSIMRVGLLAGQPAVTVRHGFDLLTEMKTTSLSQGNELEVTIMMVVEALCELHCPEAIQGIAVWSSSIVGKNLLWINSVAQQAEGRFEKASVEYQEHLCAMTGVDCCISSFDKSVLTLANAGRNSASPKHSLNGESRKTVLSKPTDSSPEVINYLGNKACECYISIADWAAVQEWQNAIHDLKKSTSSTSLNLKADFNYIKSLSSFESGKFVECTEQLELLPGENINLLAGGSKEKIDMKKLLPNMLSPDPRELQKSIEVQLLRSSVCLATALNPIEQDQKWQSITENVVKYLKQTSRIAIGPLRLSTLTVSQSLPVLSTLQLYCSSALENTVSNRLSTEDCLIPLFSEALRSCKQHDVRPWMQALRYTMYQNQLLEKIKEQTVPIRSHLMELGLTAAKFARKRGNVSLATRLLAQCSEVQLGKTTTAQDLVQHFKKLSTQGQVDEKWGPELDIEKTKLLYTAGQSTHAMEMLSSCAISFCKSVKAEYAVAKSILTLAKWIQAEWKEISGQLKQVYRAQHQQNFTGLSTLSKNILTLIELPSVNTMEEEYPRIESESTVHIGVGEPDFILGQLYHLSSVQAPEVAKSWAALASWAYRWGRKVVDNASQGEGVRLLPREKSEVQNLLPDTITEEEKERIYGILGQAVCRPAGIQDEDITLQITESEDNEEDDMVDVIWRQLISSCPWLSELDESATEGVIKVWRKVVDRIFSLYKLSCSAYFTFLKLNAGQIPLDEDDPRLHLSHRVEQSTDDMIVMATLRLLRLLVKHAGELRQYLEHGLETTPTAPWRGIIPQLFSRLNHPEVYVRQSICNLLCRVAQDSPHLILYPAIVGTISLSSESQASGNKFSTAIPTLLGNIQGEELLVSECEGGSPPASQDSNKDEPKSGLNEDQAMMQDCYSKIVDKLSSANPTMVLQVQMLVAELRRVTVLWDELWLGVLLQQHMYVLRRIQQLEDEVKRVQNNNTLRKEEKIAIMREKHTALMKPIVFALEHVRSITAAPAETPHEKWFQDNYGDAIENALEKLKTPLNPAKPGSSWIPFKEIMLSLQQRAQKRASYILRLEEISPWLAAMTNTEIALPGEVSARDTVTIHSVGGTITILPTKTKPKKLLFLGSDGKSYPYLFKGLEDLHLDERIMQFLSIVNTMFATINRQETPRFHARHYSVTPLGTRSGLIQWVDGATPLFGLYKRWQQREAALQAQKAQDSYQTPQNPGIVPRPSELYYSKIGPALKTVGLSLDVSRRDWPLHVMKAVLEELMEATPPNLLAKELWSSCTTPDEWWRVTQSYARSTAVMSMVGYIIGLGDRHLDNVLIDMTTGEVVHIDYNVCFEKGKSLRVPEKVPFRMTQNIETALGVTGVEGVFRLSCEQVLHIMRRGRETLLTLLEAFVYDPLVDWTAGGEAGFAGAVYGGGGQQAESKQSKREMEREITRSLFSSRVAEIKVNWFKNRDEMLVVLPKLDGSLDEYLSLQEQLTDVEKLQGKLLEEIEFLEGAEGVDHPSHTLQHRYSEHTQLQTQQRAVQEAIQVKLNEFEQWITHYQAAFNNLEATQLASLLQEISTQMDLGPPSYVPATAFLQNAGQAHLISQCEQLEGEVGALLQQRRSVLRGCLEQLHHYATVALQYPKAIFQKHRIEQWKTWMEELICNTTVERCQELYRKYEMQYAPQPPPTVCQFITATEMTLQRYAADINSRLIRQVERLKQEAVTVPVCEDQLKEIERCIKVFLHENGEEGSLSLASVIISALCTLTRRNLMMEGAASSAGEQLVDLTSRDGAWFLEELCSMSGNVTCLVQLLKQCHLVPQDLDIPNPMEASETVHLANGVYTSLQELNSNFRQIIFPEALRCLMKGEYTLESMLHELDGLIEQTTDGVPLQTLVESLQAYLRNAAMGLEEETHAHYIDVARLLHAQYGELIQPRNGSVDETPKMSAGQMLLVAFDGMFAQVETAFSLLVEKLNKMEIPIAWRKIDIIREARSTQVNFFDDDNHRQVLEEIFFLKRLQTIKEFFRLCGTFSKTLSGSSSLEDQNTVNGPVQIVNVKTLFRNSCFSEDQMAKPIKAFTADFVRQLLIGLPNQALGLTLCSFISALGVDIIAQVEAKDFGAESKVSVDDLCKKAVEHNIQIGKFSQLVMNRATVLASSYDTAWKKHDLVRRLETSISSCKTSLQRVQLHIAMFQWQHEDLLINRPQAMSVTPPPRSAILTSMKKKLHTLSQIETSIATVQEKLAALESSIEQRLKWAGGANPALAPVLQDFEATIAERRNLVLKESQRASQVTFLCSNIIHFESLRTRTAEALNLDAALFELIKRCQQMCSFASQFNSSVSELELRLLQRVDTGLEHPIGSSEWLLSAHKQLTQDMSTQRAIQTEKEQQIETVCETIQNLVDNIKTVLTGHNRQLGDVKHLLKAMAKDEEAALADGEDVPYENSVRQFLGEYKSWQDNIQTVLFTLVQAMGQVRSQEHVEMLQEITPTLKELKTQSQSIYNNLVSFASPLVTDATNECSSPTSSATYQPSFAAAVRSNTGQKTQPDVMSQNARKLIQKNLATSADTPPSTVPGTGKSVACSPKKAVRDPKTGKAVQERNSYAVSVWKRVKAKLEGRDVDPNRRMSVAEQVDYVIKEATNLDNLAQLYEGWTAWV

SEQ ID NO: 25451 - DNA, 8192 bp, Homo sapiens
gaactgatagtgcatcagccgacccagataatttaaaatattcttcatccagagatagaggtggttcttcctcttatggactgcaaccttcaaattcagctgtggtgtctcggcaaaggcacgatgataccagagtccacgctgacatacagaatgacgaaaagggtggctacagtgtcaatggaggatctggggaaaatacttatggtcggaagtcgttggggcaagagctgagggttaacaatgtgaccagccctgagttcaccagtgttcagcatggcagtcgtgctttagccaccaaagacatgaggaaatcacaggagagatcgatgtcttattctgatgagtctcgactgtcgaatcttcttcggaggatcacccgggaagacgacagagaccgaagattggctactgtaaagcagttgaaagaatttattcagcaaccagaaaataagctggtactagttaaacaattggataatatcttggctgctgtacatgacgtgcttaatgaaagtagcaaattgcttcaggagttgagacaggagggagcttgctgtcttggccttctttgtgcttctctgagctatgaggctgagaagatcttcaagtggatttttagcaaatttagctcatctgcaaaagatgaagttaaactcctctacttatgtgccacctacaaagcactagagactgtaggagaaaagaaagccttttcatctgtaatgcagcttgtaatgaccagcctgcagtctattcttgaaaatgtggatacaccagaattgctttgtaaatgtgttaagtgcattcttttggtggctcgatgttaccctcatattttcagcactaattttagggatacagttgatatattagttggatggcatatagatcatactcagaaaccttcgctcacgcagcaggtatctgggtggttgcagagtttggagccattttgggtagctgatcttgcattttctactactcttcttggtcagtttctggaagacatggaagcatatgctgaggacctcagccatgtggcctctggggaatcagtggatgaagatgtccctcctccatcagtgtcattaccaaagctggctgcacttctccgggtatttagtactgtggtgaggagcattggggaacgcttcagcccaattcggggtcctccaattactgaggcatatgtaacagatgttctgtacagagtaatgagatgtgtgacggctgcaaaccaggtgtttttttctgaggctgtgttgacagctgctaatgagtgtgttggtgttttgctcggcagcttggatcctagcatgactatacattgtgacatggtcattacatatggattagaccaactggagaattgccagacttgtggtaccgattatatcatctcagtcttgaatttactcacgctgattgttgaacagataaatacgaaactgccatcatcatttgtagaaaaactgtttataccatcatctaaactactattcttgcgttatcataaagaaaaagaggttgttgctgtagcccatgctgtttatcaagcagtgctcagcttgaagaatattcctgttttggagactgcctataagttaatattgggagaaatgacttgtgccctaaacaacctcctacacagtctacaacttcctgaggcctgttctgaaataaaacatgaggcttttaagaatcatgtgttcaatgtagacaatgcaaaatttgtagttatatttgacctcagtgccctgactacaattggaaatgccaaaaactcactaatagggatgtgggcgctatctccaactgtctttgcacttctgagtaagaatctgatgattgtgcacagtgacctggctgttcacttccctgccattcagtatgctgtgctctacacattgtattctcattgtaccaggcatgatcactttatctctagtagcctcagttcttcctctccttctttgtttgatggagctgtgattagcactgtaactacggctacaaagaaacatttctcaattatattaaatcttctgggaatattacttaagaaagataaccttaaccaggacacgaggaaactgttaatgacttgggctttggaagcagctgttttaatgaagaagtctgaaacatacgcacctttattctctcttccgtctttccataaattttgcaaaggccttttagccaacactctcgttgaagatgtgaatatctgtctgcaggcatgcagcagtctacatgctctgtcctcttccttgccagatgatcttttacagagatgtgtcgatgtttgccgtgttcaactagtgcacagtggaactcgtattcgacaagcatttggaaaactgttgaaatcaattcctttagatgttgtcctaagcaataacaatcacacagaaattcaagaaatttctttagcattaagaagtcacatgagtaaagcaccaagtaatacattccacccccaagatttctctgatgttattagttttattttgtatgggaactctcatagaacagggaaggacaattggttggaaagactgttctatagctgccagagactggataagcgtgaccagtcaacaattccacgcaatctcctgaagacagatgctgtcctttggcagtgggccatatgggaagctgcacaattcactgttctttctaagctgagaaccccactgggcagagctcaagacaccttccagacaattgaaggtatcattcgaagtctcgcagctcacacattaaaccctgatcaggatgttagtcagtggacaactgcagacaatgatgaaggccatggtaacaaccaacttagacttgttcttcttctgcagtatctggaaaatctggagaaattaatgtataatgcatacgagggatgtgctaatgcattaacttcacctcccaaggtcattagaacttttttctataccaatcgccaaacttgtcaggactggctaacgcggattcgactctccatcatgagggtaggattgttggcaggccagcctgcagtgacagtgagacatggctttgacttgcttacagagatgaaaacaaccagcctatctcaggggaatgaattggaagtaaccattatgatggtggtagaagcattatgtgaacttcattgtcctgaagctatacagggaattgctgtctggtcatcatctattgttggaaaaaatcttctgtggattaactcagtggctcaacaggctgaagggaggtttgaaaaggcctctgtggagtaccaggaacacctgtgtgccatgacaggtgttgattgctgcatctccagctttgacaaatcggtgctcaccttagccaatgctgggcgtaacagtgccagcccgaaacattctctgaatggtgaatccagaaaaactgtgctgtccaaaccgactgactcttcccctgaggttataaattatttaggaaataaagcatgtgagtgctacatctcaattgccgattgggctgctgtgcaggaatggcagaacgctatccatgacttgaaaaagagtaccagtagcacttccctcaacctgaaagctgacttcaactatataaaatcattaagcagctttgagtctggaaaatttgttgaatgtaccgagcagttagaattgttaccaggagaaaatatcaatctacttgctggaggatcaaaagaaaaaatagacatgaaaaaactgcttcctaacatgttaagtccggatccgagggaacttcagaaatccattgaagttcaattgttaagaagttctgtttgtttggcaactgctttaaacccgatagaacaagatcagaagtggcagtctataactgaaaatgtggtaaagtacttgaagcaaacatcccgcatcgctattggacctctgagactttctactttaacagtttcacagtctttgccagttctaagtaccttgcagctgtattgctcatctgctttggagaacacagtttctaacagactttcaacagaggactgtcttattccactcttcagtgaagctttacgttcatgtaaacagcatgacgtgaggccatggatgcaggcattaaggtatactatgtaccagaatcagttgttggagaaaattaaagaacaaacagtcccaattagaagccatctcatggaattaggtctaacagcagcaaaatttgctagaaaacgagggaatgtgtcccttgcaacaagactgctggcacagtgcagtgaagttcagctgggaaagaccaccactgcacaggatttagtccaacattttaaaaaactatcaacccaaggtcaagtggatgaaaaatgggggcccgaacttgatattgaaaaaaccaaattgctttatacagcaggccagtcaacacatgcaatggaaatgttgagttcttgtgccatatctttctgcaagtctgtgaaagctgaatatgcagttgctaaatcaattctgacactggctaaatggatccaggcagaatggaaagagatttcaggacagctgaaacaggtttacagagctcagcaccaacagaacttcacaggtctttctactttgtctaaaaacatactcactctaatagaactgccatctgttaatacgatggaagaagagtatcctcggatcgagagtgaatctacagtgcatattggagttggagaacctgacttcattttgggacagttgtatcacctgtcttcagtacaggcacctgaagtagccaaatcttgggcagcgttggccagctgggcttataggtggggcagaaaggtggttgacaatgccagtcagggagaaggtgttcgtctgctgcctagagaaaaatctgaagttcagaatctacttccagacactataactgaggaagagaaagagagaatatatggtattcttggacaggctgtgtgtcggccggcggggattcaggatgaagatataacacttcagataactgagagtgaagacaacgaagaagatgacatggttgatgttatctggcgtcagttgatatcaagctgcccatggctttcagaacttgatgaaagtgcaactgaaggagttattaaagtgtggaggaaagttgtagatagaatattcagcctgtacaaactctcttgcagtgcatactttactttccttaaactcaacgctggtcaaattcctttagatgaggatgaccctaggctgcatttaagtcacagagtggaacagagcactgatgacatgattgtgatggccacattgcgcctgctgcggttgctcgtgaagcatgctggtgagcttcggcagtatctggagcacggcttggagacaacacccactgcaccatggagaggaattattccgcaacttttctcacgcttaaaccaccctgaagtgtatgtgcgccaaagtatttgtaaccttctctgccgtgtggctcaagattccccacatctcatattgtatcctgcaatagtgggtaccatatcgcttagtagtgaatcccaggcttcaggaaataaattttccactgcaattccaactttacttggcaatattcaaggagaagaattgctggtttctgaatgtgagggaggaagtcctcctgcatctcaggatagcaataaggatgaacctaaaagtggattaaatgaagaccaagccatgatgcaggattgttacagcaaaattgtagataagctgtcctctgcaaaccccaccatggtattacaggttcagatgctcgtggctgaactgcgcagggtcactgtgctctgggatgagctctggctgggagttttgctgcaacaacacatgtatgtcctgagacgaattcagcagcttgaagatgaggtgaagagagtccagaacaacaacaccttacgcaaagaagagaaaattgcaatcatgagggagaagcacacagctttgatgaagcccatcgtatttgctttggagcatgtgaggagtatcacagcggctcctgcagaaacacctcatgaaaaatggtttcaggataactatggtgatgccattgaaaatgccctagaaaaactgaagactccattgaaccctgcaaagcctgggagcagctggattccatttaaagagataatgctaagtttgcaacagagagcacagaaacgtgcaagttacatcttgcgtcttgaagaaatcagtccatggttggctgccatgactaacactgaaattgctcttcctggggaagtctcagccagagacactgtcacaatccatagtgtgggcggaaccatcacaatcttaccgactaaaaccaagccaaagaaacttctctttcttggatcagatgggaagagctatccttatcttttcaaaggactggaggatttacatctggatgagagaataatgcagttcctatctattgtgaataccatgtttgctacaattaatcgccaagaaacaccccggttccatgctcgacactattctgtaacaccactaggaacaagatcaggactaatccagtgggtagatggagccacacccttatttggtctttacaaacgatggcaacaacgggaagctgccttacaagcacaaaaggcccaagattcctaccaaactcctcagaatcctggaattgtaccccgtcctagtgaactttattacagtaaaattggccctgctttgaaaacagttgggcttagcctggatgtgtcccgtcgggattggcctcttcatgtaatgaaggcagtattggaagagttaatggaggccacacccccgaatctccttgccaaagagctctggtcatcttgcacaacacctgatgaatggtggagagttacgcagtcttatgcaagatctactgcagtcatgtctatggttggatacataattggccttggagacagacatctggataatgttcttatagatatgacgactggagaagttgttcacatagattacaatgtttgctttgaaaaaggtaaaagccttagagttcctgagaaagtaccttttcgaatgacacaaaacattgaaacagcactgggtgtaactggagtagaaggtgtatttaggctttcatgtgagcaggttttacacattatgcggcgtggcagagagaccctgctgacgctgctggaggcctttgtgtacgaccctctggtggactggacagcaggaggcgaggctgggtttgctggtgctgtctatggtggaggtggccagcaggccgagagcaagcagagcaagagagagatggagcgagagatcacccgcagcctgttttcttctagagtagctgagattaaggtgaactggtttaagaatagagatgagatgctggttgtgcttcccaagttggacggtagcttagatgaatacctaagcttgcaagagcaactgacagatgtggaaaaactgcagggcaaactactggaggaaatagagtttctagaaggagctgaaggggtggatcatccttctcatactctgcaacacaggtattctgagcacacccaactacagactcagcaaagagctgttcaggaagcaatccaggtgaagctgaatgaatttgaacaatggataacacattatcaggctgcattcaataatttagaagcaacacagcttgcaagcttgcttcaagagataagcacacaaatggaccttggtcctccaagttacgtgccagcaacagcctttctgcagaatgctggtcaggcccacttgattagccagtgcgagcagctggagggggaggttggtgctctcctgcagcagaggcgctccgtgctccgtggctgtctggagcaactgcatcactatgcaaccgtggccctgcagtatccgaaggccatatttcagaaacatcgaattgaacagtggaagacctggatggaagagctcatctgtaacaccacagtagagcgttgtcaagagctctataggaaatatgaaatgcaatatgctccccagccacccccaacagtgtgtcagttcatcactgccactgaaatgaccctgcagcgatacgcagcagacatcaacagcagacttattagacaagtggaacgcttgaaacaggaagctgtcactgtgccagtttgtgaagatcagttgaaagaaattgaacgttgcattaaagttttccttcatgagaatggagaagaaggatct

SEQ ID NO: 25452 - protein, 3529 aa, Homo sapiens
MRKSQERSMSYSDESRLSNLLRRITREDDRDRRLATVKQLKEFIQQPENKLVLVKQLDNILAAVHDVLNESSKLLQELRQEGACCLGLLCASLSYEAEKIFKWIFSKFSSSAKDEVKLLYLCATYKALETVGEKKAFSSVMQLVMTSLQSILENVDTPELLCKCVKCILLVARCYPHIFSTNFRDTVDILVGWHIDHTQKPSLTQQVSGWLQSLEPFWVADLAFSTTLLGQFLEDMEAYAEDLSHVASGESVDEDVPPPSVSLPKLAALLRVFSTVVRSIGERFSPIRGPPITEAYVTDVLYRVMRCVTAANQVFFSEAVLTAANECVGVLLGSLDPSMTIHCDMVITYGLDQLENCQTCGTDYIISVLNLLTLIVEQINTKLPSSFVEKLFIPSSKLLFLRYHKEKEVVAVAHAVYQAVLSLKNIPVLETAYKLILGEMTCALNNLLHSLQLPEACSEIKHEAFKNHVFNVDNAKFVVIFDLSALTTIGNAKNSLIGMWALSPTVFALLSKNLMIVHSDLAVHFPAIQYAVLYTLYSHCTRHDHFISSSLSSSSPSLFDGAVISTVTTATKKHFSIILNLLGILLKKDNLNQDTRKLLMTWALEAAVLMKKSETYAPLFSLPSFHKFCKGLLANTLVEDVNICLQACSSLHALSSSLPDDLLQRCVDVCRVQLVHSGTRIRQAFGKLLKSIPLDVVLSNNNHTEIQEISLALRSHMSKAPSNTFHPQDFSDVISFILYGNSHRTGKDNWLERLFYSCQRLDKRDQSTIPRNLLKTDAVLWQWAIWEAAQFTVLSKLRTPLGRAQDTFQTIEGIIRSLAAHTLNPDQDVSQWTTADNDEGHGNNQLRLVLLLQYLENLEKLMYNAYEGCANALTSPPKVIRTFFYTNRQTCQDWLTRIRLSIMRVGLLAGQPAVTVRHGFDLLTEMKTTSLSQGNELEVTIMMVVEALCELHCPEAIQGIAVWSSSIVGKNLLWINSVAQQAEGRFEKASVEYQEHLCAMTGVDCCISSFDKSVLTLANAGRNSASPKHSLNGESRKTVLSKPTDSSPEVINYLGNKACECYISIADWAAVQEWQNAIHDLKKSTSSTSLNLKADFNYIKSLSSFESGKFVECTEQLELLPGENINLLAGGSKEKIDMKKLLPNMLSPDPRELQKSIEVQLLRSSVCLATALNPIEQDQKWQSITENVVKYLKQTSRIAIGPLRLSTLTVSQSLPVLSTLQLYCSSALENTVSNRLSTEDCLIPLFSEALRSCKQHDVRPWMQALRYTMYQNQLLEKIKEQTVPIRSHLMELGLTAAKFARKRGNVSLATRLLAQCSEVQLGKTTTAQDLVQHFKKLSTQGQVDEKWGPELDIEKTKLLYTAGQSTHAMEMLSSCAISFCKSVKAEYAVAKSILTLAKWIQAEWKEISGQLKQVYRAQHQQNFTGLSTLSKNILTLIELPSVNTMEEEYPRIESESTVHIGVGEPDFILGQLYHLSSVQAPEVAKSWAALASWAYRWGRKVVDNASQGEGVRLLPREKSEVQNLLPDTITEEEKERIYGILGQAVCRPAGIQDEDITLQITESEDNEEDDMVDVIWRQLISSCPWLSELDESATEGVIKVWRKVVDRIFSLYKLSCSAYFTFLKLNAGQIPLDEDDPRLHLSHRVEQSTDDMIVMATLRLLRLLVKHAGELRQYLEHGLETTPTAPWRGIIPQLFSRLNHPEVYVRQSICNLLCRVAQDSPHLILYPAIVGTISLSSESQASGNKFSTAIPTLLGNIQGEELLVSECEGGSPPASQDSNKDEPKSGLNEDQAMMQDCYSKIVDKLSSANPTMVLQVQMLVAELRRVTVLWDELWLGVLLQQHMYVLRRIQQLEDEVKRVQNNNTLRKEEKIAIMREKHTALMKPIVFALEHVRSITAAPAETPHEKWFQDNYGDAIENALEKLKTPLNPAKPGSSWIPFKEIMLSLQQRAQKRASYILRLEEISPWLAAMTNTEIALPGEVSARDTVTIHSVGGTITILPTKTKPKKLLFLGSDGKSYPYLFKGLEDLHLDERIMQFLSIVNTMFATINRQETPRFHARHYSVTPLGTRSGLIQWVDGATPLFGLYKRWQQREAALQAQKAQDSYQTPQNPGIVPRPSELYYSKIGPALKTVGLSLDVSRRDWPLHVMKAVLEELMEATPPNLLAKELWSSCTTPDEWWRVTQSYARSTAVMSMVGYIIGLGDRHLDNVLIDMTTGEVVHIDYNVCFEKGKSLRVPEKVPFRMTQNIETALGVTGVEGVFRLSCEQVLHIMRRGRETLLTLLEAFVYDPLVDWTAGGEAGFAGAVYGGGGQQAESKQSKREMEREITRSLFSSRVAEIKVNWFKNRDEMLVVLPKLDGSLDEYLSLQEQLTDVEKLQGKLLEEIEFLEGAEGVDHPSHTLQHRYSEHTQLQTQQRAVQEAIQVKLNEFEQWITHYQAAFNNLEATQLASLLQEISTQMDLGPPSYVPATAFLQNAGQAHLISQCEQLEGEVGALLQQRRSVLRGCLEQLHHYATVALQYPKAIFQKHRIEQWKTWMEELICNTTVERCQELYRKYEMQYAPQPPPTVCQFITATEMTLQRYAADINSRLIRQVERLKQEAVTVPVCEDQLKEIERCIKVFLHENGEEGSLSLASVIISALCTLTRRNLMMEGAASSAGEQLVDLTSRDGAWFLEELCSMSGNVTCLVQLLKQCHLVPQDLDIPNPMEASETVHLANGVYTSLQELNSNFRQIIFPEALRCLMKGEYTLESMLHELDGLIEQTTDGVPLQTLVESLQAYLRNAAMGLEEETHAHYIDVARLLHAQYGELIQPRNGSVDETPKMSAGQMLLVAFDGMFAQVETAFSLLVEKLNKMEIPIAWRKIDIIREARSTQVNFFDDDNHRQVLEEIFFLKRLQTIKEFFRLCGTFSKTLSGSSSLEDQNTVNGPVQIVNVKTLFRNSCFSEDQMAKPIKAFTADFVRQLLIGLPNQALGLTLCSFISALGVDIIAQVEAKDFGAESKVSVDDLCKKAVEHNIQIGKFSQLVMNRATVLASSYDTAWKKHDLVRRLETSISSCKTSLQRVQLHIAMFQWQHEDLLINRPQAMSVTPPPRSAILTSMKKKLHTLSQIETSIATVQEKLAALESSIEQRLKWAGGANPALAPVLQDFEATIAERRNLVLKESQRASQVTFLCSNIIHFESLRTRTAEALNLDAALFELIKRCQQMCSFASQFNSSVSELELRLLQRVDTGLEHPIGSSEWLLSAHKQLTQDMSTQRAIQTEKEQQIETVCETIQNLVDNIKTVLTGHNRQLGDVKHLLKAMAKDEEAALADGEDVPYENSVRQFLGEYKSWQDNIQTVLFTLVQAMGQVRSQEHVEMLQEITPTLKELKTQSQSIYNNLVSFASPLVTDATNECSSPTSSATYQPSFAAAVRSNTGQKTQPDVMSQNARKLIQKNLATSADTPPSTVPGTGKSVACSPKKAVRDPKTGKAVQERNSYAVSVWKRVKAKLEGRDVDPNRRMSVAEQVDYVIKEATNLDNLAQLYEGWTAWV

SEQ ID NO: 25453 - DNA, 8192 bp, Homo sapiens; identical to SEQ ID NO: 25447

SEQ ID NO: 25454 - protein, 2392 aa, Homo sapiens; identical to SEQ ID NO: 25448

SEQ ID NO: 25455 - DNA, 8192 bp, Homo sapiens; identical to SEQ ID NO: 25449

SEQ ID NO: 25456 - protein, 3521 aa, Homo sapiens; identical to SEQ ID NO: 25450

SEQ ID NO: 25457 - DNA, 8192 bp, Homo sapiens; identical to SEQ ID NO: 25451

SEQ ID NO: 25458 - protein, 3529 aa, Homo sapiens; identical to SEQ ID NO: 25452

SEQ ID NO: 25459 - DNA, 445 bp, Homo sapiens
tttcgaatgacacaaaacattgaaacagcactgggtgtaactggagtagaaggtgtatttaggctttcatgtgagcaggttttacacattatgcggcgtggcagagagaccctgctgacgctgctggaggcctttgtgtacgaccctctggtggactggacagcaggaggcgaggctgggtttgctggtgctgtctatggtggaggtggccagcaggccgagagcaagcagagcaagagagagatggagcgagagatcacccgcagcctgttttcttctagagtagctgagattaaggtgaagcccagtgacggaataagtcattgtcttctttttattaatagagtaaacatgctcatcaaaatgttgaggcaaattgtttctctaatttttttggcaaaactaatgtataatattgaaatggcagttaaatatggcagtttga

SEQ ID NO: 25460 - protein, 145 aa, Homo sapiens
MTQNIETALGVTGVEGVFRLSCEQVLHIMRRGRETLLTLLEAFVYDPLVDWTAGGEAGFAGAVYGGGGQQAESKQSKREMEREITRSLFSSRVAEIKVKPSDGISHCLLFINRVNMLIKMLRQIVSLIFLAKLMYNIEMAVKYGS

SEQ ID NO: 25461 - DNA, 449 bp, Homo sapiens
ccgcaacttttctcacgcttaaaccaccctgaagtgtatgtgcgccaaagtatttgtaaccttctctgccgtgtggctcaagattccccacatctcatattgtatcctgcaatagtgggtaccatatcgcttagtagtgaatcccaggcttcaggaaataaattttccactgcaattccaactttacttggcaatattcaaggagaagaattgctggtttctgaatgtgagggaggaagtcctcctgcatctcaggatagcaataaggatgaacctaaaagtggattaaatgaagaccaagccatgatgcaggattgttacagcaaaattgtagataagctgtcctctgcaaaccccaccatggtattacaggtacaaagaaactcacatgttgtagaagaattttttatagaataataaaaattgcttttgccaatctgtattgacaa

SEQ ID NO: 25462 - protein, 37 aa, Homo sapiens
MMQDCYSKIVDKLSSANPTMVLQVQRNSHVVEEFFIE

SEQ ID NO: 25463 - DNA, 825 bp, Homo sapiens
atcagtgtgcatttaaggtttctccatgtctttttgtaattggagaagctcattttttaaaaattttattcttttagattgttgaacagataaatacgaaactgccatcatcatttgtagaaaaactgtttataccatcatctaaactactattcttgcgttatcataaagaaaaagaggttgttgctgtagcccatgctgtttatcaagcagtgctcagcttgaagaatattcctgttttggagactgcctataagttaatattgggagaaatgacttgtgccctaaacaacctcctacacagtctacaacttcctgaggcctgttctgaaataaaacatgaggcttttaagaatcatgtgttcaatgtagacaatgcaaaatttgtagttatatttgacctcagtgccctgactacaattggaaatgccaaaaactcactaataggggtgagtctttaattgtaatgactttgttttatccacagttaagccttttctcattacatatttatgtatttcactgtcatgtcaagatgtctgcagaatcactgtgtgtaacaaacagccatatttaagacatgcctggataaataaaattggtaggaatgttttcttggcattatatttaacttttcttcttctttttccttgacaaatcttgataagtttttttatattagttttattttctagaaaatgtcttatgaatttctcctatttgctctagcatgcttatagaaaatgtcagtgtttcttacagctcaaatttgtgtagttgttttaaaatgcggtctctttcttcttcccctggtacttttttctt

SEQ ID NO: 25464 - protein, 62 aa, Homo sapiens [sequence omitted]

SEQ ID NO: 25465 - DNA, 608 bp, Homo sapiens
cgtgtgagcgtgaggagctgccgccaccgcctgctcctcgtcgtcctcgtcctccggggccccggcgacgtgggccgcgcacggccctggaaaagacgtcgcctccccttcatccgcctctctctcaccgcgccgctcccgcctcctcgtcctgcgctgcgggctcaggcggaacccggaacggccgtcctcttcccccgccctccgccgcctcctccttctcctcctcctcctcctcctcctccttctcggcttcctcctcagccccgggccggagcggggtgtcggcggcggccggttcgggcggcgactcgcgcttctttgggcggcggcgcttggccatgtcgtgtcggggaaggtaatgagccgcagagccccggggtctcggctgagcagcggcggcggcggcggcggcaccaagtatccgcggagctggaatgactggcaacccagaactgatagtgcatcagccgacccagataatttaaaatattcttcatccagagatagaggtggttcttcctcttatggactgcaaccttcaaattcagctgtggtgtctcggcaaaggcacgatgataccagagtccacgctgacatacagaatg

SEQ ID NO: 25466 - protein, 81 aa, Homo sapiens
MSRRAPGSRLSSGGGGGGTKYPRSWNDWQPRTDSASADPDNLKYSSSRDRGGSSSYGLQPSNSAVVSRQRHDDTRVHADIQ

SEQ ID NO: 25467 - DNA, 2718 bp, Homo sapiens
actccggcttctgtgatgtcagcgccggaacctggaatcccggctccgcgagggaaggccggggaggcggcggcggcggcggcggctggagagggtcctcggcagcctctgaggagcgcggggcgcggccatgagcgagtccagcggcagtgcgctccagcccggcaggcccagccggcagccggcggtccatccagagaacctctctctagactccagttgcttctcttctccacctgtgaacttcctccaagaattgccaagctaccggtccattgcacgtaggagaacgactgtccattcccgggacaagcaaagcggaactttgctaaagccaaccgactcttacagctcccagctggaggacagaatcgctgaaaacctcagcagccattctcttcgaaattatgcactgaacatctctgagaagcggagactaagggacattcaagagacacaaatgaagtatctctccgaatgggaccagtggaagcggtatagcagcaagtcttggaagaggttcctagagaaggctcgagagatgacgacccacctggagctgtggcgggaggacatccgcagcatagaagggaaatttggcactgggattcagtcctatttctccttcttgagattcctggtgttgctgaatttggtgatatttctgatcatctttatgctggttttgctcccagtcttactcacgaaatacaagatcaccaacagcagcttcgtgctcattcctttcaaagacatggataaacaatgtacagtctatccagtaagcagttctggactcatttacttttacagttatatcatagacttgctttctggcactggtttcctggaggaaactagcctcttttacggacattacaccattgatggggtgaaatttcagaacttcacctatgatctgcccctggcgtatttgttaagcacaatcgcctccctggccctgagccttctttggatagtgaaaaggtcggtggaaggattcaaaatcaacctgattcggagtgaggagcactttcagagttactgcaacaagatatttgccggctgggacttctgcatcactaaccgcagcatggcggatctgaagcacagcagcttgcggtacgagctccgagcagatctggaggaagaaagaatgcggcagaaaatagcagaaaggacctcagaagaaacaatacgcatttactctttgagactgtttttgaactgtattgttctggctgttttaggggcatgcttttatgcaatatacgtagcaactgtcttctcgcaagagcacatgaaaaaggaaatcgacaagatggtttttggagagaacctcttcatattgtatctaccgtctattgtgatcacgctggccaattttatcaccccaatgatctttgccaagatcatccgctatgaggattattctccaggctttgagatccgtctgacaatccttaggtgtgtctttatgcggctggccaccatatgtgtcctggtgttcacgctgggctccaagatcacatcctgtgatgatgacacatgtgacctttgcggctacaaccagaaactctacccgtgctgggagacccaagttgggcaggaaatgtacaagctgatgatcttcgacttcatcatcatcttggctgtgacactcttcgtggattttcctagaaagctcctggtgacctactgttcctcttgcaagctgattcagtgctgggggcagcaggagtttgccattcctgataacgtcctggggatagtttacgggcaaaccatctgctggatcggagcctttttctcaccccttctccctgcaattgcaaccctgaaattcattatcatcttctatgtgaaagagtggagtctgctttacacctgcagaccctcccccaggccgttcagagcatccaattctaatttcttcttcctgttggtgttgttgatcgggctgtgtttggcaataatacctctgacaatcagcatatcacgcatcccttcctcgaaagcctgtgggccgttcaccaacttcaacaccacctgggaggtcatccccaagacggtgagcaccttccccagctcgctgcagtccttcatccatggtgtcacatccgaagcctttgcagttcctttcttcatgattatttgcctcatcatgttttacttcattgccttagctggagcacacaaacgggtggtcatccagctccgagagcagctatccctggtaaggaagcatagctccagagggtcatggctggggacatttacccaggacactgcaaggaaagtgctgttttcctgggagggagtgaaattactgcagccttctctcaccaccacctccccaaaactctgccttgaggcccagccgcgtccagcttcattaattcactgattcatccattccttcaagatgtgtattaagggggatgtggtggctcatgcctgtaatcccagcacttttgggaggccgaggcaggcagattacttgagctcaggagttcaagaccagcctggccaacatggtgaaaccccgtctctactaaaaatacaaaaagtagttgggcgtggtggtgggcacctgtaatcccagctacttgggaggctgaggcaggagaatcccttgaactcaggaggtggaggtcgcagtgagctgagattgcgctattgcactccagcctgggtgacagagtgagactccatctt

SEQ ID NO: 25468 - protein, 758 aa, Homo sapiens
MSESSGSALQPGRPSRQPAVHPENLSLDSSCFSSPPVNFLQELPSYRSIARRRTTVHSRDKQSGTLLKPTDSYSSQLEDRIAENLSSHSLRNYALNISEKRRLRDIQETQMKYLSEWDQWKRYSSKSWKRFLEKAREMTTHLELWREDIRSIEGKFGTGIQSYFSFLRFLVLLNLVIFLIIFMLVLLPVLLTKYKITNSSFVLIPFKDMDKQCTVYPVSSSGLIYFYSYIIDLLSGTGFLEETSLFYGHYTIDGVKFQNFTYDLPLAYLLSTIASLALSLLWIVKRSVEGFKINLIRSEEHFQSYCNKIFAGWDFCITNRSMADLKHSSLRYELRADLEEERMRQKIAERTSEETIRIYSLRLFLNCIVLAVLGACFYAIYVATVFSQEHMKKEIDKMVFGENLFILYLPSIVITLANFITPMIFAKIIRYEDYSPGFEIRLTILRCVFMRLATICVLVFTLGSKITSCDDDTCDLCGYNQKLYPCWETQVGQEMYKLMIFDFIIILAVTLFVDFPRKLLVTYCSSCKLIQCWGQQEFAIPDNVLGIVYGQTICWIGAFFSPLLPAIATLKFIIIFYVKEWSLLYTCRPSPRPFRASNSNFFFLLVLLIGLCLAIIPLTISISRIPSSKACGPFTNFNTTWEVIPKTVSTFPSSLQSFIHGVTSEAFAVPFFMIICLIMFYFIALAGAHKRVVIQLREQLSLVRKHSSRGSWLGTFTQDTARKVLFSWEGVKLLQPSLTTTSPKLCLEAQPRPASLIH

SEQ ID NO: 25469 - DNA, 2405 bp, Homo sapiens
tcagcgccggaacctggaatcccggctccgcgagggaaggccggggaggcggcggcggcggcggcggctggagagggtcctcggcagcctctgaggagcgcggggcgcggccatgagcgagtccagcggcagtgcgctccagcccggcaggcccagccggcagccggcggtccatccagagaacctctctctagactccagttgcttctcttctccacctgtgaacttcctccaagaattgccaagctaccggtccattgcacgtaggagaacgactgtccattcccgggacaagcaaagcggaactttgctaaagccaaccgactcttacagctcccagctggaggacagaatcgctgaaaacctcagcagccattctcttcgaaattatgcactgaacatctctgagaagcggagactaagggacattcaagagacacaaatgaagtatctctccgaatgggaccagtggaagcggtatagcagcaagtcttggaagaggttcctagagaaggctcgagagatgacgacccacctggagctgtggcgggaggacatccgcagcatagaagggaaatttggcactgggattcagtcctatttctccttcttgagattcctggtgttgctgaatttggtgatatttctgatcatctttatgctggttttgctcccagtcttactcacgaaatacaagatcaccaacagcagcttcgtgctcattcctttcaaagacatggataaacaatgtacagtctatccagtaagcagttctggactcatttacttttacagttatatcatagacttgctttctggcactggtttcctggaggaaactagcctcttttacggacattacaccattgatggggtgaaatttcagaacttcacctatgatctgcccctggcgtatttgttaagcacaatcgcctccctggccctgagccttctttggatagtgaaaaggtcggtggaaggattcaaaatcaacctgattcggagtgaggagcactttcagagttactgcaacaagatatttgccggctgggacttctgcatcactaaccgcagcatggcggatctgaagcacagcagcttgcggtacgagctccgagcagatctggaggaagaaagaatgcggcagaaaatagcagaaaggacctcagaagaaacaatacgcatttactctttgagactgtttttgaactgtattgttctggctgttttaggggcatgcttttatgcaatatacgtagcaactgtcttctcgcaagagcacatgaaaaaggaaatcgacaagatggtttttggagagaacctcttcatattgtatctaccgtctattgtgatcacgctggccaattttatcaccccaatgatctttgccaagatcatccgctatgaggattattctccaggctttgagatccgtctgacaatccttaggtgtgtctttatgcggctggccaccatatgtgtcctggtgttcacgctgggctccaagatcacatcctgtgatgatgacacatgtgacctttgcggctacaaccagaaactctacccgtgctgggagacccaagttgggcaggaaatgtacaagctgatgatcttcgacttcatcatcatcttggctgtgacactcttcgtggattttcctagaaagctcctggtgacctactgttcctcttgcaagctgattcagtgctgggggcagcaggagtttgccattcctgataacgtcctggggatagtttacgggcaaaccatctgctggatcggagcctttttctcaccccttctccctgcaattgcaaccctgaaattcattatcatcttctatgtgaaagagtggagtctgctttacacctgcagaccctcccccaggccgttcagagcatccaattctaatttcttcttcctgttggtgttgttgatcgggctgtgtttggcaataatacctctgacaatcagcatatcacgcatcccttcctcgaaagcctgtgggccgttcaccaacttcaacaccacctgggaggtcatccccaagacggtgagcaccttccccagctcgctgcagtccttcatccatggtgtcacatccgaagcctttgcagttcctttcttcatgattatttgcctcatcatgttttacttcattgccttagctggagcacacaaacgggtggtcatccagctccgagagcagctatccctggaaagtcgtgacaagtgctacctaatccagaaactaacagaagcccaaagggacatgaggaactaactagactgagcgtgaagatggtgctgcctgttgcttctaagctgacctagtgattctgctgagcctacagagtctacctgggttttgagtggacatttaaaaatatatttttcttgagttt

SEQ ID NO: 25470 - protein, 723 aa, Homo sapiens
MSESSGSALQPGRPSRQPAVHPENLSLDSSCFSSPPVNFLQELPSYRSIARRRTTVHSRDKQSGTLLKPTDSYSSQLEDRIAENLSSHSLRNYALNISEKRRLRDIQETQMKYLSEWDQWKRYSSKSWKRFLEKAREMTTHLELWREDIRSIEGKFGTGIQSYFSFLRFLVLLNLVIFLIIFMLVLLPVLLTKYKITNSSFVLIPFKDMDKQCTVYPVSSSGLIYFYSYIIDLLSGTGFLEETSLFYGHYTIDGVKFQNFTYDLPLAYLLSTIASLALSLLWIVKRSVEGFKINLIRSEEHFQSYCNKIFAGWDFCITNRSMADLKHSSLRYELRADLEEERMRQKIAERTSEETIRIYSLRLFLNCIVLAVLGACFYAIYVATVFSQEHMKKEIDKMVFGENLFILYLPSIVITLANFITPMIFAKIIRYEDYSPGFEIRLTILRCVFMRLATICVLVFTLGSKITSCDDDTCDLCGYNQKLYPCWETQVGQEMYKLMIFDFIIILAVTLFVDFPRKLLVTYCSSCKLIQCWGQQEFAIPDNVLGIVYGQTICWIGAFFSPLLPAIATLKFIIIFYVKEWSLLYTCRPSPRPFRASNSNFFFLLVLLIGLCLAIIPLTISISRIPSSKACGPFTNFNTTWEVIPKTVSTFPSSLQSFIHGVTSEAFAVPFFMIICLIMFYFIALAGAHKRVVIQLREQLSLESRDKCYLIQKLTEAQRDMRN

SEQ ID NO: 25471 - DNA, 3535 bp, Homo sapiens
tcagcgccggaacctggaatcccggctccgcgagggaaggccggggaggcggcggcggcggcggcggctggagagggtcctcggcagcctctgaggagcgcggggcgcggccatgagcgagtccagcggcagtgcgctccagcccggcaggcccagccggcagccggcggtccatccagagaacctctctctagactccagttgcttctcttctccacctgtgaacttcctccaagaattgccaagctaccggtccattgcacgtaggagaacgactgtccattcccgggacaagcaaagcggaactttgctaaagccaaccgactcttacagctcccagctggaggacagaatcgctgaaaacctcagcagccattctcttcgaaattatgcactgaacatctctgagaagcggagactaagggacattcaagagacacaaatgaagtatctctccgaatgggaccagtggaagcggtatagcagcaagtcttggaagaggttcctagagaaggctcgagagatgacgacccacctggagctgtggcgggaggacatccgcagcatagaagggaaatttggcactgggattcagtcctatttctccttcttgagattcctggtgttgctgaatttggtgatatttctgatcatctttatgctggttttgctcccagtcttactcacgaaatacaagatcaccaacagcagcttcgtgctcattcctttcaaagacatggataaacaatgtacagtctatccagtaagcagttctggactcatttacttttacagttatatcatagacttgctttctggcactggtttcctggaggaaactagcctcttttacggacattacaccattgatggggtgaaatttcagaacttcacctatgatctgcccctggcgtatttgttaagcacaatcgcctccctggccctgagccttctttggatagtgaaaaggtcggtggaaggattcaaaatcaacctgattcggagtgaggagcactttcagagttactgcaacaagatatttgccggctgggacttctgcatcactaaccgcagcatggcggatctgaagcacagcagcttgcggtacgagctccgagcagatctggaggaagaaagaatgcggcagaaaatagcagaaaggacctcagaagaaacaatacgcatttactctttgagactgtttttgaactgtattgttctggctgttttaggggcatgcttttatgcaatatacgtagcaactgtcttctcgcaagagcacatgaaaaaggaaatcgacaagatggtttttggagagaacctcttcatattgtatctaccgtctattgtgatcacgctggccaattttatcaccccaatgatctttgccaagatcatccgctatgaggattattctccaggctttgagatccgtctgacaatccttaggtgtgtctttatgcggctggccaccatatgtgtcctggtgttcacgctgggctccaagatcacatcctgtgatgatgacacatgtgacctttgcggctacaaccagaaactctacccgtgctgggagacccaagttgggcaggaaatgtacaagctgatgatcttcgacttcatcatcatcttggctgtgacactcttcgtggattttcctagaaagctcctggtgacctactgttcctcttgcaagctgattcagtgctgggggcagcaggagtttgccattcctgataacgtcctggggatagtttacgggcaaaccatctgctggatcggagcctttttctcaccccttctccctgcaattgcaaccctgaaattcattatcatcttctatgtgaaagagtggagtctgctttacacctgcagaccctcccccaggccgttcagagcatccaattctaatttcttcttcctgttggtgttgttgatcgggctgtgtttggcaataatacctctgacaatcagcatatcacgcatcccttcctcgaaagcctgtgggccgttcaccaacttcaacaccacctgggaggtcatccccaagacggtgagcaccttccccagctcgctgcagtccttcatccatggtgtcacatccgaagcctttgcagttcctttcttcatgattatttgcctcatcatgttttacttcattgccttagctggagcacacaaacgggtggtcatccagctccgagagcagctatccctggaaagtcgtgacaagtgctacctaatccagaaactaacagaagcccaaagggacatgaggaactaactagactgagcgtgaagatggtgctgcctgttgcttctaagctgacctagtgattctgctgagcctacagagtctacctgggttttgagtggacatttaaaaatatatttttcttgagtttaggcttttccatatgtgcagctgtgtttacctaacccagcccttaattagggcttcagtgacttagaaaagcaggggaaacccaaggctttgcctgcagaccggccactctgtgacaactctaccaaaaaccaacaagccattcaagcttttacaagaatgaaagagcggagacggtagtttagtatttgagccacgagtttatgtgcacaagtgttttgggttgtggactgaagctcagcctgttaatcagaccagcccatgagtgtataacaaacagaattggaggctggtttcttaaacacacacgtccacattttttagggttgttttcctgtgcttacaatttttaatgcatgtgcctttatttcacaaaacatgtggctgggcgcagcggctcacgcctgttatcccaacactttgggaggccgaggcaggcggagcacctaagttggggagttcaagaccagcctgaccaacgtggagaaactccgtctccactaaaatacaaaattagctgggtgtggtggcacatgcctgtaatatcagctactcaggaggctgaggcaggagaattgcttgaacccaggaggtggagtttgcagtgagctgagatcacaccattgcactccagcctgggcaaaaagagcaaaactctccctaaaaaaaaaatgtagaatatctcttaagatttccgttatggtaaaaaccatatgcaataaatacctcattgtaagcttacccaaaattgatagatgtcaaccttttaacagaagaacagaagtttaagttattgtttaatgtaatcagttttcattttaatatctttgaaatctttttcaaaggactgtagttttgtaatggacttttcaagccttccttccattgtttttcttccgttcactggctccacacgtttcctggggagtagcctggaatttaaagttgggtgcaggttttagaaagctgttgctgttaacaataattctcccggccatctccactccactactcaaaaatgcctgaatccttgctcagaggagcaaaggtatcttctcgtccctttcttacagccattttcttgcttttccacaaagatattatttaaagtggaatatttttgtaactggg

SEQ ID NO: 25472 - protein, 723 aa, Homo sapiens; identical to SEQ ID NO: 25470

SEQ ID NO: 25473 - DNA, 3619 bp, Homo sapiens
tcagcgccggaacctggaatcccggctccgcgagggaaggccggggaggcggcggcggcggcggcggctggagagggtcctcggcagcctctgaggagcgcggggcgcggccatgagcgagtccagcggcagtgcgctccagcccggcaggcccagccggcagccggcggtccatccagagaacctctctctagactccagttgcttctcttctccacctgtgaacttcctccaagaattgccaagctaccggtccattgcacgtaggagaacgactgtccattcccgggacaagcaaagcggaactttgctaaagccaaccgactcttacagctcccagctggaggacagaatcgctgaaaacctcagcagccattctcttcgaaattatgcactgaacatctctgagaagcggagactaagggacattcaagagacacaaatgaagtatctctccgaatgggaccagtggaagcggtatagcagcaagtcttggaagaggttcctagagaaggctcgagagatgacgacccacctggagctgtggcgggaggacatccgcagcatagaagggaaatttggcactgggattcagtcctatttctccttcttgagattcctggtgttgctgaatttggtgatatttctgatcatctttatgctggttttgctcccagtcttactcacgaaatacaagatcaccaacagcagcttcgtgctcattcctttcaaagacatggataaacaatgtacagtctatccagtaagcagttctggactcatttacttttacagttatatcatagacttgctttctggcactggtttcctggaggaaactagcctcttttacggacattacaccattgatggggtgaaatttcagaacttcacctatgatctgcccctggcgtatttgttaagcacaatcgcctccctggccctgagccttctttggatagtgaaaaggtcggtggaaggattcaaaatcaacctgattcggagtgaggagcactttcagagttactgcaacaagatatttgccggctgggacttctgcatcactaaccgcagcatggcggatctgaagcacagcagcttgcggtacgagctccgagcagatctggaggaagaaagaatgcggcagaaaatagcagaaaggacctcagaagaaacaatacgcatttactctttgagactgtttttgaactgtattgttctggctgttttaggggcatgcttttatgcaatatacgtagcaactgtcttctcgcaagagcacatgaaaaaggaaatcgacaagatggtttttggagagaacctcttcatattgtatctaccgtctattgtgatcacgctggccaattttatcaccccaatgatctttgccaagatcatccgctatgaggattattctccaggctttgagatccgtctgacaatccttaggtgtgtctttatgcggctggccaccatatgtgtcctggtgttcacgctgggctccaagatcacatcctgtgatgatgacacatgtgacctttgcggctacaaccagaaactctacccgtgctgggagacccaagttgggcaggaaatgtacaagctgatgatcttcgacttcatcatcatcttggctgtgacactcttcgtggattttcctagaaagctcctggtgacctactgttcctcttgcaagctgattcagtgctgggggcagcaggagtttgccattcctgataacgtcctggggatagtttacgggcaaaccatctgctggatcggagcctttttctcaccccttctccctgcaattgcaaccctgaaattcattatcatcttctatgtgaaagagtggagtctgctttacacctgcagaccctcccccaggccgttcagagcatccaattctaatttcttcttcctgttggtgttgttgatcgggctgtgtttggcaataatacctctgacaatcagcatatcacgcatcccttcctcgaaagcctgtgggccgttcaccaacttcaacaccacctgggaggtcatccccaagacggtgagcaccttccccagctcgctgcagtccttcatccatggtgtcacatccgaagcctttgcagttcctttcttcatgattatttgcctcatcatgttttacttcattgccttagctggagcacacaaacgggtggtcatccagctccgagagcagctatccctggaaagtcgtgacaagtgctacctaatccagaaactaacagaagcccaaagggacatgaggaactaactagactgagcgtgaagatggtgctgcctgttgcttctaagctgacctagtgattctgctgagcctacagagtctacctgggttttgagtggacatttaaaaatatatttttcttgagtttaggcttttccatatgtgcagctgtgtttacctaacccagcccttaattagggcttcagtgacttagaaaagcaggggaaacccaaggctttgcctgcagaccggccactctgtgacaactctaccaaaaaccaacaagccattcaagcttttacaagaatgaaagagcggagacggtagtttagtatttgagccacgagtttatgtgcacaagtgttttgggttgtggactgaagctcagcctgttaatcagaccagcccatgagtgtataacaaacagaattggaggctggtttcttaaacacacacgtccacattttttagggttgttttcctgtgcttacaatttttaatgcatgtgcctttatttcacaaaacatgtggctgggcgcagcggctcacgcctgttatcccaacactttgggaggccgaggcaggcggagcacctaagttggggagttcaagaccagcctgaccaacgtggagaaactccgtctccactaaaatacaaaattagctgggtgtggtggcacatgcctgtaatatcagctactcaggaggctgaggcaggagaattgcttgaacccaggaggtggagtttgcagtgagctgagatcacaccattgcactccagcctgggcaaaaagagcaaaactctccctaaaaaaaaaatgtagaatatctcttaagatttccgttatggtaaaaaccatatgcaataaatacctcattgtaagcttacccaaaattgatagatgtcaaccttttaacagaagaacagaagtttaagttattgtttaatgtaatcagttttcattttaatatctttgaaatctttttcaaaggactgtagttttgtaatggacttttcaagccttccttccattgtttttcttccgttcactggctccacacgtttcctggggagtagcctggaatttaaagttgggtgcaggttttagaaagctgttgctgttaacaataattctcccggccatctccactccactactcaaaaatgcctgaatccttgctcagaggagcaaaggtatcttctcgtccctttcttacagccattttcttgcttttccacaaagatattatttaaagtggaatatttttgtaactgggataccaatgagcttttcggtcttttcctgacttggtaaggtttatgggtttctaaatctaataactacagtcataccaccctga

SEQ ID NO: 25474 - protein, 723 aa, Homo sapiens; identical to SEQ ID NO: 25470

SEQ ID NO: 25475 - DNA, 810 bp, Homo sapiens
agaagaaacaatacgcatttactctttgagactgtttttgaactgtattgttctggctgttttaggggcatgcttttatgcaatatacgtagcaactgtcttctcgcaagagcacatgaaaaaggaaatcgacaagatggtttttggagagaacctcttcatattgtatctaccgtctattgtgatcacgctggccaattttatcaccccaatgatctttgccaagatcatccgctatgaggattattctccaggctttgagatccgtctgacaatccttaggtgtgtctttatgcggctggccaccatatgtgtcctggtgttcacgctgggctccaagatcacatcctgtgatgatgacacatgtgacctttgcggctacaaccagaaactctacccggtgagttgcggggcgggggcgttcggctgggtgggtccttctggaatacagtgtcatggtcaagagaacagcggttgaagccatgggtttgaactgcatttgcttcgctttcttgttctagtgatgagacagagtctggccccatggagtctaaccccaggcacttctgagggcttggaaaccaaggtctgtgctgaggctcagagtttgcatcagctgatgccctcactggagccacaggatctggagttggaaagggaattagaaggtgtcttgggagcctggttttctctgcctcagctagggtctttcagtttccctcactctctttgatttcagtgctgggagacccaagttgggcaggaaatgtacaagctgatgatcttcgacttcatcatcatcttggctgt

SEQ ID NO: 25476 - protein, 120 aa, Homo sapiens
MKKEIDKMVFGENLFILYLPSIVITLANFITPMIFAKIIRYEDYSPGFEIRLTILRCVFMRLATICVLVFTLGSKITSCDDDTCDLCGYNQKLYPVSCGAGAFGWVGPSGIQCHGQENSG

SEQ ID NO: 25477 - DNA, 453 bp, Homo sapiens
gaaagatcaggacaaggttatgatttctcacccaagttcctggggaaaaggatcatgagggaattacttattaacaaggaaaaagcaaagaggaactttacaaactattacagttttccatcatcacttgactgctgacaagaagcctctttgaattccagtatacacgatcacattttaaaaccttcaagacgccgtttaatcaggagttgtaaggcacatttgttagagagagctgcactttaaaagttatacagacatcacctgaagttattaaagttatcaaaacatattaaaaaccttcaagtaagaggctactccccaggaaacgtgtggagccagtgaacggaagaaaaacaatggaaggaaggcttgaaaagtccattacaaaactacagtcctttgaaaaagatttcaaagatattaaaatgaaaactgattacattaaacaat

SEQ ID NO: 25478 - protein, 30 aa, Homo sapiens
MEGRLEKSITKLQSFEKDFKDIKMKTDYIK

SEQ ID NO: 25479 - DNA, 474 bp, Homo sapiens
agccgccgccgccccggcgcaactcattgccggaactaaaaaaagcaaccacttcgttgaacggaactggccaatagtgcccttggctcggactgatgacgcacagcagacgaaaaagcaaagaggaactttacaaactattacagttttccatcatcacttgactgctgacaagaagcctctttgaattccagtatacacgatcacattttaaaaccttcaagacgccgtttaatcaggagttgtaaggcacatttgttagagagagctgcactttaaaagttatacagacatcacctgaagttattaaagttatcaaaacatattaaaaaccttcaagtaagaggctactccccaggaaacgtgtggagccagtgaacggaagaaaaacaatggaaggaaggcttgaaaagtccattacaaaactacagtcctttgaaaaagatttcaaagatattaaaatgaaaactgatt

SEQ ID NO: 25480 - protein, 61 aa, Homo sapiens
AAAAPAQLIAGTKKSNHFVERNWPIVPLARTDDAQQTKKQRGTLQTITVFHHHLTADKKPL

SEQ ID NO: 25481 - DNA, 857 bp, Homo sapiens
gccaagggcactattggccagttccgttcaacgaagtggttgctttttttagttccggcaatgagttgcgccggggcggcggcggctccccgcctttggcggctgcgcccgggggcccggcggtccctctcagcttatggaagaagaaccagtgtcagatttcgcagttcaggaatgactttagacaatatcagtcgggcagctgtggatcgaataatccgggtggatcatgcaggcgaatatggagcaaaccgcatctatgccgggcagatggctgtcctgggtcggaccagcgtcgggccagtcattcagaaaatgtgggatcaagaaaaggaccatttgaaaaagttcaatgagttgatggttacgttcagggtccggccaacagttctgatgcccttgtggaacgtgctggggtttgcactgggggcggggaccgccttgctcgggaaggaaggtgccatggcctgcaccgtggcggtggaagagagcatagcacatcactacaacaaccagatcaggacgctgatggaggaggaccctgaaaaatacgaggaacttcttcagctgataaagaaatttcgggatgaagagcttgagcaccatgacataggcctcgaccatgatgcagaattggctccagcctatgccgtcctgaagagcattatccaggccggatgcagagtggcgatatatttatcagaaagattataaagtgtgtccagttttgcctgtctataaaagatgatagtaatttaccaagtgacatttgcagagaaacaggtgtacagttatcgttgtacttttgtacaatgtgaattttgttaataaattataaggtttgttttttttttttt

SEQ ID NO: 25482 - protein, 217 aa, Homo sapiens; identical to SEQ ID NO: 3387

SEQ ID NO: 25483 - DNA, 2584 bp, Homo sapiens
gccaagggcactattggccagttccgttcaacgaagtggttgctttttttagttccggcaatgagttgcgccggggcggcggcggctccccgcctttggcggctgcgcccgggggcccggcggtccctctcagcttatggaagaagaaccagtgtcagatttcgcagttcaggaatgactttagacaatatcagtcgggcagctgtggatcgaataatccgggtggatcatgcaggcgaatatggagcaaaccgcatctatgccgggcagatggctgtcctgggtcggaccagcgtcgggccagtcattcagaaaatgtgggatcaagaaaaggaccatttgaaaaagttcaatgagttgatggttacgttcagggtccggccaacagttctgatgcccttgtggaacgtgctggggtttgcactgggggcggggaccgccttgctcgggaaggaaggtgccatggcctgcaccgtggcggtggaagagagcatagcacatcactacaacaaccagatcaggacgctgatggaggaggaccctgaaaaatacgaggaacttcttcagctgataaagaaatttcgggatgaagagcttgagcaccatgacataggcctcgaccatgatgcagaattggctccagcctatgccgtcctgaagagcattatccaggccggatgcagagtggcgatatatttatcagaaagattataaagtgtgtccagttttgcctgtctataaaagatgatagtaatttaccaagtgacatttgcagagaaacaggtgtacagttatcgttgtacttttgtacaatgtgaattttgttaataaattataaggtttgtttttttttttttaaactctgcagtgttgatttttctctgggttgttttttctgccatgagaccaacaggtcaccagccttgttcaagttacagcaaacgaagctgggccttgtttggtctcatacttaattttcttttatatacatgtttttcttttacatgcatatatatatattttattttattttatgttttttggagacagggcctcgctcttttgtccaggccgggtcacaactcactgcagcctggacctcctagcctcaagcaatccacccacctcagccttccaagtagctgggactacaggtgtgcaccaccacagctggctaattctatttttttatagaggcgaagtctcactatgtcgccaggctggtctctaactcctgggctcagtgatcctcccgtttcgacttcccaaagtgctgggattacaggtgtgagccacttcaccaggcccattttctcctaaaacttcaaggacaaatcattaataatgtaacaggaatctttaggagaaaaaacaatttggtttactgataacaaaagataattggaaacatgagagtatttgagattggccaagcagaactatgaagtccatcaagtaagtcaaagatcatcgtttctgttttgaattgtgggtgataatgggtgggagagtgctacagtctgtatgtctgtgtctccctagaattcatacgatgaaatcttcactctcaagttgatagaaggtggggcccttgggaagtgtgaggtcatgagagtggagccctcatgaatgggatcagtgccttatgaaaggccctagagagatacctcatcctctccacagtgtgagacttcaaggggaagtatgagacttctctgaggaagcagacccttcacaagcaaaatcagccagcactttgatcacggacttcccagcctctaggactgtgagcaataaatgtttgatgtttataagccacccagactgtggtattttgttatagcagcctgaacagactaagacgggggtgttgcttccatcaaaggatgtactaagttgtggattatttgtgaaattgaattacaaccttttccttaaggtcttttaccacctcccccccaaaaaaatcccccaaaactgattcagattttcatactttaatgaaatattttataatttgcaaatttttaagtaatttatgaaaaacctagatcagtggatctcctctctggctgcccattagaatgtcctgtggagattaaacttttttttttcagtttatggaccaagagttttgatttatttagggtggagttcaggatcagaatggtttcagaagctcccaggtgattccggagtgagttggagctgcaagcccctgagctagattataagatgcttctgggaaagaaccacattttaggaatttgcttcccacccagtgccctgcatttaatcagcacctgatgacttggcaggacttgccccaccagggtctggctttgaagggtagtggacaccaggatcctttggattaatcctctgccacctctctcttttcctcaaccgagagtgaatttatgtaattgagtgaaagtctacgaatcataattgtaataaattaaggctgggcatttgtttgaaattagataggataaagccaaaggtttgaacaagttgtggatggtttgtaaaaattaatcttacaaaataaatgctgtgtgtgaacacgttgattaaattc

SEQ ID NO: 25484 - protein, 217 aa, Homo sapiens; identical to SEQ ID NO: 3387

SEQ ID NO: 25485 - DNA, 2996 bp, Homo sapiens
gccaagggcactattggccagttccgttcaacgaagtggttgctttttttagttccggcaatgagttgcgccggggcggcggcggctccccgcctttggcggctgcgcccgggggcccggcggtccctctcagcttatggaagaagaaccagtgtcagatttcgcagttcaggaatgactttagacaatatcagtcgggcagctgtggatcgaataatccgggtggatcatgcaggcgaatatggagcaaaccgcatctatgccgggcagatggctgtcctgggtcggaccagcgtcgggccagtcattcagaaaatgtgggatcaagaaaaggaccatttgaaaaagttcaatgagttgatggttacgttcagggtccggccaacagttctgatgcccttgtggaacgtgctggggtttgcactgggggcggggaccgccttgctcgggaaggaaggtgccatggcctgcaccgtggcggtggaagagagcatagcacatcactacaacaaccagatcaggacgctgatggaggaggaccctgaaaaatacgaggaacttcttcagctgataaagaaatttcgggatgaagagcttgagcaccatgacataggcctcgaccatgatgcagaattggctccagcctatgccgtcctgaagagcattatccaggccggatgcagagtggcgatatatttatcagaaagattataaagtgtgtccagttttgcctgtctataaaagatgatagtaatttaccaagtgacatttgcagagaaacaggtgtacagttatcgttgtacttttgtacaatgtgaattttgttaataaattataaggtttgtttttttttttttaaactctgcagtgttgatttttctctgggttgttttttctgccatgagaccaacaggtcaccagccttgttcaagttacagcaaacgaagctgggccttgtttggtctcatacttaattttcttttatatacatgtttttcttttacatgcatatatatatattttattttattttatgttttttggagacagggcctcgctcttttgtccaggccgggtcacaactcactgcagcctggacctcctagcctcaagcaatccacccacctcagccttccaagtagctgggactacaggtgtgcaccaccacagctggctaattctatttttttatagaggcgaagtctcactatgtcgccaggctggtctctaactcctgggctcagtgatcctcccgtttcgacttcccaaagtgctgggattacaggtgtgagccacttcaccaggcccattttctcctaaaacttcaaggacaaatcattaataatgtaacaggaatctttaggagaaaaaacaatttggtttactgataacaaaagataattggaaacatgagagtatttgagattggccaagcagaactatgaagtccatcaagtaagtcaaagatcatcgtttctgttttgaattgtgggtgataatgggtgggagagtgctacagtctgtatgtctgtgtctccctagaattcatacgatgaaatcttcactctcaagttgatagaaggtggggcccttgggaagtgtgaggtcatgagagtggagccctcatgaatgggatcagtgccttatgaaaggccctagagagatacctcatcctctccacagtgtgagacttcaaggggaagtatgagacttctctgaggaagcagacccttcacaagcaaaatcagccagcactttgatcacggacttcccagcctctaggactgtgagcaataaatgtttgatgtttataagccacccagactgtggtattttgttatagcagcctgaacagactaagacgggggtgttgcttccatcaaaggatgtactaagttgtggattatttgtgaaattgaattacaaccttttccttaaggtcttttaccacctcccccccaaaaaaatcccccaaaactgattcagattttcatactttaatgaaatattttataatttgcaaatttttaagtaatttatgaaaaacctagatcagtggatctcctctctggctgcccattagaatgtcctgtggagattaaacttttttttttcagtttatggaccaagagttttgatttatttagggtggagttcaggatcagaatggtttcagaagctcccaggtgattccggagtgagttggagctgcaagcccctgagctagattataagatgcttctgggaaagaaccacattttaggaatttgcttcccacccagtgccctgcatttaatcagcacctgatgacttggcaggacttgccccaccagggtctggctttgaagggtagtggacaccaggatcctttggattaatcctctgccacctctctcttttcctcaaccgagagtgaatttatgtaattgagtgaaagtctacgaatcataattgtaataaattaaggctgggcatttgtttgaaattagataggataaagccaaaggtttgaacaagttgtggatggtttgtaaaaattaatcttacaaaataaatgctgtgtgtgaacacgttgattaaattcaaaagggtattatttggtttttctgtaaattgaaccttgaaataaaagcacaacaaggttttcttaaggtactgatctgctctttaacaagaatttgtaaagggttataaaaggtttacaagaatctcacctcatggtcaaactagttaagattggatagatttatctataaggtattattaaaaattggggatgacattaatagtagactgatgcaaggatgacatttgactctgtcttgaacaagatttttatgtaatagtaaaggataatgaaagatttttgtttgccttgcaaataaactaccaaaaaaagaagggaaaggcaagagacaaattgtttggaaagttgtcttcccttttaatgggtaaaggttttgtgctttttaaaaaagtttttgagtcatcatttt

SEQ ID NO: 25486 - protein, 217 aa, Homo sapiens; identical to SEQ ID NO: 3387

SEQ ID NO: 25487 - DNA, 1816 bp, Homo sapiens
ccaagggcactattggccagttccgttcaacgaagtggttgctttttttagttccggcaatgagttgcgccggggcggcggcggctccccgcctttggcggctgcgcccgggggcccggcggtccctctcagcttatggaagaagaaccagtgtcagatttcgcagttcaggaatgactttagacaatatcagtcgggcagctgtggatcgaataatccgggtggatcatgcaggcgaatatggagcaaaccgcatctatgccgggcagatggctgtcctgggtcggaccagcgtcgggccagtcattcagaaaatgtgggatcaagaaaaggaccatttgaaaaagttcaatgagttgatggttacgttcagggtccggccaacagttctgatgcccttgtggaacgtgctggggtttgcactgggggcggggaccgccttgctcgggaaggaaggtgccatggcctgcaccgtggcggtggaagagagcatagcacatcactacaacaaccagatcaggacgctgatggaggaggaccctgaaaaatacgaggaacttcttcagctgataaagaaatttcgggatgaagagcttgagcaccatgacataggcctcgaccatgatgcagaattggctccagcctatgccgtcctgaagagcattatccaggccggatgcagagtggcgatatatttatcagaaagattataaagtgtgtccagttttgcctgtctataaaagatgatagtaatttaccaagtgacatttgcagagaaacaggtgtacagttatcgttgtacttttgtacaatgtgaattttgttaataaattataaggtttgtttttttttttttaaactctgcagtgttgatttttctctgggttgttttttctgccatgagaccaacaggtcaccagccttgttcaagttacagcaaacgaagctgggccttgtttggtctcatacttaattttcttttatatacatgtttttcttttacatgcatatatatatattttattttattttatgttttttggagacagggcctcgctcttttgtccaggccgggtcacaactcactgcagcctggacctcctagcctcaagcaatccacccacctcagccttccaagtagctgggactacaggtgtgcaccaccacagctggctaattctatttttttatagaggcgaagtctcactatgtcgccaggctggtctctaactcctgggctcagtgatcctcccgtttcgacttcccaaagtgctgggattacaggtgtgagccacttcaccaggcccattttctcctaaaacttcaaggacaaatcattaataatgtaacaggaatctttaggagaaaaaacaatttggtttactgataacaaaagataattggaaacatgagagtatttgagattggccaagcagaactatgaagtccatcaagtaagtcaaagatcatcgtttctgttttgaattgtgggtgataatgggtgggagagtgctacagtctgtatgtctgtgtctccctagaattcatacgatgaaatcttcactctcaagttgatagaaggtggggcccttgggaagtgtgaggtcatgagagtggagccctcatgaatgggatcagtgccttatgaaaggccctagagagatacctcatcctctccacagtgtgagacttcaaggggaagtatgagacttctctgaggaagcagacccttcacaagcaaaatcagccagcactttgatcacggacttcccagcctctaggactgtgagcaataaatgtttgatgtttataagcc

SEQ ID NO: 25488 - protein, 217 aa, Homo sapiens; identical to SEQ ID NO: 3387

SEQ ID NO: 25489 - DNA, 741 bp, Homo sapiens
actattggccagttccgttcaacgaagtggttgctttttttagttccggcaatgagttgcgccggggcggcggcggctccccgcctttggcggctgcgcccgggggcccggcggtccctctcagcttatggaagaagaaccagtgtcagatttcgcagttcaggaatgactttagacaatatcagtcgggcagctgtggatcgaataatccgggtggatcatgcaggcgaatatggagcaaaccgcatctatgccgggcagatggctgtcctgggtcggaccagcgtcgggccagtcattcagaaaatgtgggatcaagaaaaggaccatttgaaaaagttcaatgagttgatggttacgttcagggtccggccaacagttctgatgcccttgtggaacgtgctggggtttgcactgggggcggggaccgccttgctcgggaaggaaggtgccatggcctgcaccgtggcggtggaagagagcatagcacatcactacaacaaccagatcaggacgctgatggaggaggaccctgaaaaatacgaggaacttcttcagctgataaagaaatttcgggatgaagagcttgagcaccatgacataggcctcgaccatgatgcagaattggctccagcctatgccgtcctgaagagcattatccaggccggatgcagagtggcgatatatttatcagaaagattataaatgtgagacttcaaggggaagtatgagacttctctg

SEQ ID NO: 25490 - protein, 217 aa, Homo sapiens; identical to SEQ ID NO: 3387

SEQ ID NO: 25491 - DNA, 908 bp, Homo sapiens
tattggccagttccgttcaacgaagtggttgctttttttagttccggcaatgagttgcgccggggcggcggcggctccccgcctttggcggctgcgcccgggggcccggcggtccctctcagcttatggaagaagaaccagtgtcagatttcgcagttcaggaatgactttagacaatatcagtcgggcagctgtggatcgaataatccgggtggatcatgcaggcgaatatggagcaaaccgcatctatgccgggcagatggctgtcctgggtcggaccagcgtcgggccagtcattcagaaaatgtgggatcaagaaaaggaccatttgaaaaagttcaatgagttgatggttacgttcagggtccggccaacagttctgatgcccttgtggaacgtgctggggtttgcactgggtacgtgtctctctagaagagcttatgcaagcttggggatctaggatgattaaatccttcaggggcggggaccgccttgctcgggaaggaaggtgccatggcctgcaccgtggcggtggaagagagcatagcacatcactacaacaaccagatcaggacgctgatggaggaggaccctgaaaaatacgaggaacttcttcagctgataaagaaatttcgggatgaagagcttgagcaccatgacataggcctcgaccatgatgcagaattggctccagcctatgccgtcctgaagagcattatccaggccggatgcagagtggcgatatatttatcagaaagattataaagtgtgtccagttttgcctgtctataaaagatgatagtaatttaccaagtgacatttgcagagaaacaggtgtacagttatcgttgtacttttgtacaatgtgaattttgttaataaattataaggtttgttttttttttttt

SEQ ID NO: 25492 - protein, 136 aa, Homo sapiens
MSCAGAAAAPRLWRLRPGARRSLSAYGRRTSVRFRSSGMTLDNISRAAVDRIIRVDHAGEYGANRIYAGQMAVLGRTSVGPVIQKMWDQEKDHLKKFNELMVTFRVRPTVLMPLWNVLGFALGTCLSRRAYASLGI

SEQ ID NO: 25493 - DNA, 1868 bp, Homo sapiens
tattggccagttccgttcaacgaagtggttgctttttttagttccggcaatgagttgcgccggggcggcggcggctccccgcctttggcggctgcgcccgggggcccggcggtccctctcagcttatggaagaagaaccagtgtcagatttcgcagttcaggaatgactttagacaatatcagtcgggcagctgtggatcgaataatccgggtggatcatgcaggcgaatatggagcaaaccgcatctatgccgggcagatggctgtcctgggtcggaccagcgtcgggccagtcattcagaaaatgtgggatcaagaaaaggaccatttgaaaaagttcaatgagttgatggttacgttcagggtccggccaacagttctgatgcccttgtggaacgtgctggggtttgcactgggtacgtgtctctctagaagagcttatgcaagcttggggatctaggatgattaaatccttcaggggcggggaccgccttgctcgggaaggaaggtgccatggcctgcaccgtggcggtggaagagagcatagcacatcactacaacaaccagatcaggacgctgatggaggaggaccctgaaaaatacgaggaacttcttcagctgataaagaaatttcgggatgaagagcttgagcaccatgacataggcctcgaccatgatgcagaattggctccagcctatgccgtcctgaagagcattatccaggccggatgcagagtggcgatatatttatcagaaagattataaagtgtgtccagttttgcctgtctataaaagatgatagtaatttaccaagtgacatttgcagagaaacaggtgtacagttatcgttgtacttttgtacaatgtgaattttgttaataaattataaggtttgtttttttttttttaaactctgcagtgttgatttttctctgggttgttttttctgccatgagaccaacaggtcaccagccttgttcaagttacagcaaacgaagctgggccttgtttggtctcatacttaattttcttttatatacatgtttttcttttacatgcatatatatatattttattttattttatgttttttggagacagggcctcgctcttttgtccaggccgggtcacaactcactgcagcctggacctcctagcctcaagcaatccacccacctcagccttccaagtagctgggactacaggtgtgcaccaccacagctggctaattctatttttttatagaggcgaagtctcactatgtcgccaggctggtctctaactcctgggctcagtgatcctcccgtttcgacttcccaaagtgctgggattacaggtgtgagccacttcaccaggcccattttctcctaaaacttcaaggacaaatcattaataatgtaacaggaatctttaggagaaaaaacaatttggtttactgataacaaaagataattggaaacatgagagtatttgagattggccaagcagaactatgaagtccatcaagtaagtcaaagatcatcgtttctgttttgaattgtgggtgataatgggtgggagagtgctacagtctgtatgtctgtgtctccctagaattcatacgatgaaatcttcactctcaagttgatagaaggtggggcccttgggaagtgtgaggtcatgagagtggagccctcatgaatgggatcagtgccttatgaaaggccctagagagatacctcatcctctccacagtgtgagacttcaaggggaagtatgagacttctctgaggaagcagacccttcacaagcaaaatcagccagcactttgatcacggacttcccagcctctaggactgtgagcaataaatgtttgatgtttataagcc

SEQ ID NO: 25494 - protein, 136 aa, Homo sapiens; identical to SEQ ID NO: 25492

SEQ ID NO: 25495 - DNA, 2635 bp, Homo sapiens
tattggccagttccgttcaacgaagtggttgctttttttagttccggcaatgagttgcgccggggcggcggcggctccccgcctttggcggctgcgcccgggggcccggcggtccctctcagcttatggaagaagaaccagtgtcagatttcgcagttcaggaatgactttagacaatatcagtcgggcagctgtggatcgaataatccgggtggatcatgcaggcgaatatggagcaaaccgcatctatgccgggcagatggctgtcctgggtcggaccagcgtcgggccagtcattcagaaaatgtgggatcaagaaaaggaccatttgaaaaagttcaatgagttgatggttacgttcagggtccggccaacagttctgatgcccttgtggaacgtgctggggtttgcactgggtacgtgtctctctagaagagcttatgcaagcttggggatctaggatgattaaatccttcaggggcggggaccgccttgctcgggaaggaaggtgccatggcctgcaccgtggcggtggaagagagcatagcacatcactacaacaaccagatcaggacgctgatggaggaggaccctgaaaaatacgaggaacttcttcagctgataaagaaatttcgggatgaagagcttgagcaccatgacataggcctcgaccatgatgcagaattggctccagcctatgccgtcctgaagagcattatccaggccggatgcagagtggcgatatatttatcagaaagattataaagtgtgtccagttttgcctgtctataaaagatgatagtaatttaccaagtgacatttgcagagaaacaggtgtacagttatcgttgtacttttgtacaatgtgaattttgttaataaattataaggtttgtttttttttttttaaactctgcagtgttgatttttctctgggttgttttttctgccatgagaccaacaggtcaccagccttgttcaagttacagcaaacgaagctgggccttgtttggtctcatacttaattttcttttatatacatgtttttcttttacatgcatatatatatattttattttattttatgttttttggagacagggcctcgctcttttgtccaggccgggtcacaactcactgcagcctggacctcctagcctcaagcaatccacccacctcagccttccaagtagctgggactacaggtgtgcaccaccacagctggctaattctatttttttatagaggcgaagtctcactatgtcgccaggctggtctctaactcctgggctcagtgatcctcccgtttcgacttcccaaagtgctgggattacaggtgtgagccacttcaccaggcccattttctcctaaaacttcaaggacaaatcattaataatgtaacaggaatctttaggagaaaaaacaatttggtttactgataacaaaagataattggaaacatgagagtatttgagattggccaagcagaactatgaagtccatcaagtaagtcaaagatcatcgtttctgttttgaattgtgggtgataatgggtgggagagtgctacagtctgtatgtctgtgtctccctagaattcatacgatgaaatcttcactctcaagttgatagaaggtggggcccttgggaagtgtgaggtcatgagagtggagccctcatgaatgggatcagtgccttatgaaaggccctagagagatacctcatcctctccacagtgtgagacttcaaggggaagtatgagacttctctgaggaagcagacccttcacaagcaaaatcagccagcactttgatcacggacttcccagcctctaggactgtgagcaataaatgtttgatgtttataagccacccagactgtggtattttgttatagcagcctgaacagactaagacgggggtgttgcttccatcaaaggatgtactaagttgtggattatttgtgaaattgaattacaaccttttccttaaggtcttttaccacctcccccccaaaaaaatcccccaaaactgattcagattttcatactttaatgaaatattttataatttgcaaatttttaagtaatttatgaaaaacctagatcagtggatctcctctctggctgcccattagaatgtcctgtggagattaaacttttttttttcagtttatggaccaagagttttgatttatttagggtggagttcaggatcagaatggtttcagaagctcccaggtgattccggagtgagttggagctgcaagcccctgagctagattataagatgcttctgggaaagaaccacattttaggaatttgcttcccacccagtgccctgcatttaatcagcacctgatgacttggcaggacttgccccaccagggtctggctttgaagggtagtggacaccaggatcctttggattaatcctctgccacctctctcttttcctcaaccgagagtgaatttatgtaattgagtgaaagtctacgaatcataattgtaataaattaaggctgggcatttgtttgaaattagataggataaagccaaaggtttgaacaagttgtggatggtttgtaaaaattaatcttacaaaataaatgctgtgtgtgaacacgttgattaaattc

SEQ ID NO: 25496 - protein, 136 aa, Homo sapiens; identical to SEQ ID NO: 25492

SEQ ID NO: 25497 - DNA, 3047 bp, Homo sapiens
tattggccagttccgttcaacgaagtggttgctttttttagttccggcaatgagttgcgccggggcggcggcggctccccgcctttggcggctgcgcccgggggcccggcggtccctctcagcttatggaagaagaaccagtgtcagatttcgcagttcaggaatgactttagacaatatcagtcgggcagctgtggatcgaataatccgggtggatcatgcaggcgaatatggagcaaaccgcatctatgccgggcagatggctgtcctgggtcggaccagcgtcgggccagtcattcagaaaatgtgggatcaagaaaaggaccatttgaaaaagttcaatgagttgatggttacgttcagggtccggccaacagttctgatgcccttgtggaacgtgctggggtttgcactgggtacgtgtctctctagaagagcttatgcaagcttggggatctaggatgattaaatccttcaggggcggggaccgccttgctcgggaaggaaggtgccatggcctgcaccgtggcggtggaagagagcatagcacatcactacaacaaccagatcaggacgctgatggaggaggaccctgaaaaatacgaggaacttcttcagctgataaagaaatttcgggatgaagagcttgagcaccatgacataggcctcgaccatgatgcagaattggctccagcctatgccgtcctgaagagcattatccaggccggatgcagagtggcgatatatttatcagaaagattataaagtgtgtccagttttgcctgtctataaaagatgatagtaatttaccaagtgacatttgcagagaaacaggtgtacagttatcgttgtacttttgtacaatgtgaattttgttaataaattataaggtttgtttttttttttttaaactctgcagtgttgatttttctctgggttgttttttctgccatgagaccaacaggtcaccagccttgttcaagttacagcaaacgaagctgggccttgtttggtctcatacttaattttcttttatatacatgtttttcttttacatgcatatatatatattttattttattttatgttttttggagacagggcctcgctcttttgtccaggccgggtcacaactcactgcagcctggacctcctagcctcaagcaatccacccacctcagccttccaagtagctgggactacaggtgtgcaccaccacagctggctaattctatttttttatagaggcgaagtctcactatgtcgccaggctggtctctaactcctgggctcagtgatcctcccgtttcgacttcccaaagtgctgggattacaggtgtgagccacttcaccaggcccattttctcctaaaacttcaaggacaaatcattaataatgtaacaggaatctttaggagaaaaaacaatttggtttactgataacaaaagataattggaaacatgagagtatttgagattggccaagcagaactatgaagtccatcaagtaagtcaaagatcatcgtttctgttttgaattgtgggtgataatgggtgggagagtgctacagtctgtatgtctgtgtctccctagaattcatacgatgaaatcttcactctcaagttgatagaaggtggggcccttgggaagtgtgaggtcatgagagtggagccctcatgaatgggatcagtgccttatgaaaggccctagagagatacctcatcctctccacagtgtgagacttcaaggggaagtatgagacttctctgaggaagcagacccttcacaagcaaaatcagccagcactttgatcacggacttcccagcctctaggactgtgagcaataaatgtttgatgtttataagccacccagactgtggtattttgttatagcagcctgaacagactaagacgggggtgttgcttccatcaaaggatgtactaagttgtggattatttgtgaaattgaattacaaccttttccttaaggtcttttaccacctcccccccaaaaaaatcccccaaaactgattcagattttcatactttaatgaaatattttataatttgcaaatttttaagtaatttatgaaaaacctagatcagtggatctcctctctggctgcccattagaatgtcctgtggagattaaacttttttttttcagtttatggaccaagagttttgatttatttagggtggagttcaggatcagaatggtttcagaagctcccaggtgattccggagtgagttggagctgcaagcccctgagctagattataagatgcttctgggaaagaaccacattttaggaatttgcttcccacccagtgccctgcatttaatcagcacctgatgacttggcaggacttgccccaccagggtctggctttgaagggtagtggacaccaggatcctttggattaatcctctgccacctctctcttttcctcaaccgagagtgaatttatgtaattgagtgaaagtctacgaatcataattgtaataaattaaggctgggcatttgtttgaaattagataggataaagccaaaggtttgaacaagttgtggatggtttgtaaaaattaatcttacaaaataaatgctgtgtgtgaacacgttgattaaattcaaaagggtattatttggtttttctgtaaattgaaccttgaaataaaagcacaacaaggttttcttaaggtactgatctgctctttaacaagaatttgtaaagggttataaaaggtttacaagaatctcacctcatggtcaaactagttaagattggatagatttatctataaggtattattaaaaattggggatgacattaatagtagactgatgcaaggatgacatttgactctgtcttgaacaagatttttatgtaatagtaaaggataatgaaagatttttgtttgccttgcaaataaactaccaaaaaaagaagggaaaggcaagagacaaattgtttggaaagttgtcttcccttttaatgggtaaaggttttgtgctttttaaaaaagtttttgagtcatcatttt

SEQ ID NO: 25498 - protein, 136 aa, Homo sapiens; identical to SEQ ID NO: 25492

SEQ ID NO: 25499 - DNA, 2693 bp, Homo sapiens
tgacttcggcctccggggcgctggcgggcggggcggggtctgtagttagcggcgagagtgacaggaggacaggggttgtttcggcagtgacgcctggggagtgacgcaattgcacccctgtgcagtgatgtcacggcaggtgcggccagcgttccgagtcgaggacagttggcgacactgaaaattcagcgtctccgggagtctctctctttgtagtctttgcccagggccttgccaggcaaagggtagcccgacgaccagcagcctccgctacttctgggcgctcgctagaaatacagattctcgggccccaccccgacctacttggtcggtatctgtgatctgtgaacaggacctttaggtgatttgcatgcactgtaaactgtgaaagccatcagtgtagtggaaggagcatcgaatttagagtagagagacatggttttggaccctggttcctgctttccttgtttcatctgtgctgccttagaaaattgtcatgagcccgggcgcggtggctccggcctataatctcagcactttgggaggccgaggctggaggatcccctgaggtcaggagtttgagaccagcctggccaacatggtgaaaccccgcctctactaaaaatacaaaaatttgccaggcgtgatggcaggtgcctgtaatcccagctactcaggaggctgagacaggagaatcgcttgaacccgggaggcagagattgctttgaggcgagattgcaccactgcactgcaacctgggcgtcagagcgagactttgtctcccccgcgcaaaaaaaaaaaaaaaaaagaaatttcatgaagtcgttttctcaacgttaaattaccgtgtaccactttcgggatttttgcctaatggcagtactgcttgaacttttgattactagatgtgtttttttgtatagctatgtcccatttaaaaattaaattaatttccttgaaacaaaatccttatggtgaatgggaagccagtgccacttgccacaaatggcttatggaagaagaaccagtgtcagatttcgcagttcaggaatgactttagacaatatcagtcgggcagctgtggatcgaataatccgggtggatcatgcaggcgaatatggagcaaaccgcatctatgccgggcagatggctgtcctgggtcggaccagcgtcgggccagtcattcagaaaatgtgggatcaagaaaaggaccatttgaaaaagttcaatgagttgatggttacgttcagggtccggccaacagttctgatgcccttgtggaacgtgctggggtttgcactgggggcggggaccgccttgctcgggaaggaaggtgccatggcctgcaccgtggcggtggaagagagcatagcacatcactacaacaaccagatcaggacgctgatggaggaggaccctgaaaaatacgaggaacttcttcagctgataaagaaatttcgggatgaagagcttgagcaccatgacataggcctcgaccatgatgcagaattggctccagcctatgccgtcctgaagagcattatccaggccggatgcagagtggcgatatatttatcagaaagattataaagtgtgtccagttttgcctgtctataaaagatgatagtaatttaccaagtgacatttgcagagaaacaggtgtacagttatcgttgtacttttgtacaatgtgaattttgttaataaattataaggtttgtttttttttttttaaactctgcagtgttgatttttctctgggttgttttttctgccatgagaccaacaggtcaccagccttgttcaagttacagcaaacgaagctgggccttgtttggtctcatacttaattttcttttatatacatgtttttcttttacatgcatatatatatattttattttattttatgttttttggagacagggcctcgctcttttgtccaggccgggtcacaactcactgcagcctggacctcctagcctcaagcaatccacccacctcagccttccaagtagctgggactacaggtgtgcaccaccacagctggctaattctatttttttatagaggcgaagtctcactatgtcgccaggctggtctctaactcctgggctcagtgatcctcccgtttcgacttcccaaagtgctgggattacaggtgtgagccacttcaccaggcccattttctcctaaaacttcaaggacaaatcattaataatgtaacaggaatctttaggagaaaaaacaatttggtttactgataacaaaagataattggaaacatgagagtatttgagattggccaagcagaactatgaagtccatcaagtaagtcaaagatcatcgtttctgttttgaattgtgggtgataatgggtgggagagtgctacagtctgtatgtctgtgtctccctagaattcatacgatgaaatcttcactctcaagttgatagaaggtggggcccttgggaagtgtgaggtcatgagagtggagccctcatgaatgggatcagtgccttatgaaaggccctagagagatacctcatcctctccacagtgtgagacttcaaggggaagtatgagacttctctgaggaagcagacccttcacaagcaaaatcagccagcactttgatcacggacttcccagcctctaggactgtgagcaataaatgtttgatgtttataagcc

SEQ ID NO: 25500 - protein, 203 aa, Homo sapiens
MGSQCHLPQMAYGRRTSVRFRSSGMTLDNISRAAVDRIIRVDHAGEYGANRIYAGQMAVLGRTSVGPVIQKMWDQEKDHLKKFNELMVTFRVRPTVLMPLWNVLGFALGAGTALLGKEGAMACTVAVEESIAHHYNNQIRTLMEEDPEKYEELLQLIKKFRDEELEHHDIGLDHDAELAPAYAVLKSIIQAGCRVAIYLSERL

SEQ ID NO: 25501 - DNA, 822 bp, Homo sapiens
gtagttagcggcgagagtgacaggaggacaggggttgtttcggcagtgacgcctggggagtgacgcaattgcacccctgtgcagtgatgtcacggcagcttatggaagaagaaccagtgtcagatttcgcagttcaggaatgactttagacaatatcagtcgggcagctgtggatcgaataatccgggtggatcatgcaggcgaatatggagcaaaccgcatctatgccgggcagatggctgtcctgggtcggaccagcgtcgggccagtcattcagaaaatgtgggatcaagaaaaggaccatttgaaaaagttcaatgagttgatggttacgttcagggtccggccaacagttctgatgcccttgtggaacgtgctggggtttgcactgggggcggggaccgccttgctcgggaaggaaggtgccatggcctgcaccgtggcggtggaagagagcatagcacatcactacaacaaccagatcaggacgctgatggaggaggaccctgaaaaatacgaggaacttcttcagctgataaagaaatttcgggatgaagagcttgagcaccatgacataggcctcgaccatgatgcagaattggctccagcctatgccgtcctgaagagcattatccaggccggatgcagagtggcgatatatttatcagaaagattataaagtgtgtccagttttgcctgtctataaaagatgatagtaatttaccaagtgacatttgcagagaaacaggtgtacagttatcgttgtacttttgtacaatgtgaattttgttaataaattataaggtttgttttttttttttt

SEQ ID NO: 25502 - protein, 179 aa, Homo sapiens
MTLDNISRAAVDRIIRVDHAGEYGANRIYAGQMAVLGRTSVGPVIQKMWDQEKDHLKKFNELMVTFRVRPTVLMPLWNVLGFALGAGTALLGKEGAMACTVAVEESIAHHYNNQIRTLMEEDPEKYEELLQLIKKFRDEELEHHDIGLDHDAELAPAYAVLKSIIQAGCRVAIYLSERL

SEQ ID NO: 25503 - DNA, 1782 bp, Homo sapiens
gtagttagcggcgagagtgacaggaggacaggggttgtttcggcagtgacgcctggggagtgacgcaattgcacccctgtgcagtgatgtcacggcagcttatggaagaagaaccagtgtcagatttcgcagttcaggaatgactttagacaatatcagtcgggcagctgtggatcgaataatccgggtggatcatgcaggcgaatatggagcaaaccgcatctatgccgggcagatggctgtcctgggtcggaccagcgtcgggccagtcattcagaaaatgtgggatcaagaaaaggaccatttgaaaaagttcaatgagttgatggttacgttcagggtccggccaacagttctgatgcccttgtggaacgtgctggggtttgcactgggggcggggaccgccttgctcgggaaggaaggtgccatggcctgcaccgtggcggtggaagagagcatagcacatcactacaacaaccagatcaggacgctgatggaggaggaccctgaaaaatacgaggaacttcttcagctgataaagaaatttcgggatgaagagcttgagcaccatgacataggcctcgaccatgatgcagaattggctccagcctatgccgtcctgaagagcattatccaggccggatgcagagtggcgatatatttatcagaaagattataaagtgtgtccagttttgcctgtctataaaagatgatagtaatttaccaagtgacatttgcagagaaacaggtgtacagttatcgttgtacttttgtacaatgtgaattttgttaataaattataaggtttgtttttttttttttaaactctgcagtgttgatttttctctgggttgttttttctgccatgagaccaacaggtcaccagccttgttcaagttacagcaaacgaagctgggccttgtttggtctcatacttaattttcttttatatacatgtttttcttttacatgcatatatatatattttattttattttatgttttttggagacagggcctcgctcttttgtccaggccgggtcacaactcactgcagcctggacctcctagcctcaagcaatccacccacctcagccttccaagtagctgggactacaggtgtgcaccaccacagctggctaattctatttttttatagaggcgaagtctcactatgtcgccaggctggtctctaactcctgggctcagtgatcctcccgtttcgacttcccaaagtgctgggattacaggtgtgagccacttcaccaggcccattttctcctaaaacttcaaggacaaatcattaataatgtaacaggaatctttaggagaaaaaacaatttggtttactgataacaaaagataattggaaacatgagagtatttgagattggccaagcagaactatgaagtccatcaagtaagtcaaagatcatcgtttctgttttgaattgtgggtgataatgggtgggagagtgctacagtctgtatgtctgtgtctccctagaattcatacgatgaaatcttcactctcaagttgatagaaggtggggcccttgggaagtgtgaggtcatgagagtggagccctcatgaatgggatcagtgccttatgaaaggccctagagagatacctcatcctctccacagtgtgagacttcaaggggaagtatgagacttctctgaggaagcagacccttcacaagcaaaatcagccagcactttgatcacggacttcccagcctctaggactgtgagcaataaatgtttgatgtttataagcc

SEQ ID NO: 25504 - protein, 179 aa, Homo sapiens; identical to SEQ ID NO: 25502

SEQ ID NO: 25505 - DNA, 2549 bp, Homo sapiens
gtagttagcggcgagagtgacaggaggacaggggttgtttcggcagtgacgcctggggagtgacgcaattgcacccctgtgcagtgatgtcacggcagcttatggaagaagaaccagtgtcagatttcgcagttcaggaatgactttagacaatatcagtcgggcagctgtggatcgaataatccgggtggatcatgcaggcgaatatggagcaaaccgcatctatgccgggcagatggctgtcctgggtcggaccagcgtcgggccagtcattcagaaaatgtgggatcaagaaaaggaccatttgaaaaagttcaatgagttgatggttacgttcagggtccggccaacagttctgatgcccttgtggaacgtgctggggtttgcactgggggcggggaccgccttgctcgggaaggaaggtgccatggcctgcaccgtggcggtggaagagagcatagcacatcactacaacaaccagatcaggacgctgatggaggaggaccctgaaaaatacgaggaacttcttcagctgataaagaaatttcgggatgaagagcttgagcaccatgacataggcctcgaccatgatgcagaattggctccagcctatgccgtcctgaagagcattatccaggccggatgcagagtggcgatatatttatcagaaagattataaagtgtgtccagttttgcctgtctataaaagatgatagtaatttaccaagtgacatttgcagagaaacaggtgtacagttatcgttgtacttttgtacaatgtgaattttgttaataaattataaggtttgtttttttttttttaaactctgcagtgttgatttttctctgggttgttttttctgccatgagaccaacaggtcaccagccttgttcaagttacagcaaacgaagctgggccttgtttggtctcatacttaattttcttttatatacatgtttttcttttacatgcatatatatatattttattttattttatgttttttggagacagggcctcgctcttttgtccaggccgggtcacaactcactgcagcctggacctcctagcctcaagcaatccacccacctcagccttccaagtagctgggactacaggtgtgcaccaccacagctggctaattctatttttttatagaggcgaagtctcactatgtcgccaggctggtctctaactcctgggctcagtgatcctcccgtttcgacttcccaaagtgctgggattacaggtgtgagccacttcaccaggcccattttctcctaaaacttcaaggacaaatcattaataatgtaacaggaatctttaggagaaaaaacaatttggtttactgataacaaaagataattggaaacatgagagtatttgagattggccaagcagaactatgaagtccatcaagtaagtcaaagatcatcgtttctgttttgaattgtgggtgataatgggtgggagagtgctacagtctgtatgtctgtgtctccctagaattcatacgatgaaatcttcactctcaagttgatagaaggtggggcccttgggaagtgtgaggtcatgagagtggagccctcatgaatgggatcagtgccttatgaaaggccctagagagatacctcatcctctccacagtgtgagacttcaaggggaagtatgagacttctctgaggaagcagacccttcacaagcaaaatcagccagcactttgatcacggacttcccagcctctaggactgtgagcaataaatgtttgatgtttataagccacccagactgtggtattttgttatagcagcctgaacagactaagacgggggtgttgcttccatcaaaggatgtactaagttgtggattatttgtgaaattgaattacaaccttttccttaaggtcttttaccacctcccccccaaaaaaatcccccaaaactgattcagattttcatactttaatgaaatattttataatttgcaaatttttaagtaatttatgaaaaacctagatcagtggatctcctctctggctgcccattagaatgtcctgtggagattaaacttttttttttcagtttatggaccaagagttttgatttatttagggtggagttcaggatcagaatggtttcagaagctcccaggtgattccggagtgagttggagctgcaagcccctgagctagattataagatgcttctgggaaagaaccacattttaggaatttgcttcccacccagtgccctgcatttaatcagcacctgatgacttggcaggacttgccccaccagggtctggctttgaagggtagtggacaccaggatcctttggattaatcctctgccacctctctcttttcctcaaccgagagtgaatttatgtaattgagtgaaagtctacgaatcataattgtaataaattaaggctgggcatttgtttgaaattagataggataaagccaaaggtttgaacaagttgtggatggtttgtaaaaattaatcttacaaaataaatgctgtgtgtgaacacgttgattaaattc

SEQ ID NO: 25506 - protein, 179 aa, Homo sapiens; identical to SEQ ID NO: 25502

SEQ ID NO: 25507 - DNA, 2961 bp, Homo sapiens
gtagttagcggcgagagtgacaggaggacaggggttgtttcggcagtgacgcctggggagtgacgcaattgcacccctgtgcagtgatgtcacggcagcttatggaagaagaaccagtgtcagatttcgcagttcaggaatgactttagacaatatcagtcgggcagctgtggatcgaataatccgggtggatcatgcaggcgaatatggagcaaaccgcatctatgccgggcagatggctgtcctgggtcggaccagcgtcgggccagtcattcagaaaatgtgggatcaagaaaaggaccatttgaaaaagttcaatgagttgatggttacgttcagggtccggccaacagttctgatgcccttgtggaacgtgctggggtttgcactgggggcggggaccgccttgctcgggaaggaaggtgccatggcctgcaccgtggcggtggaagagagcatagcacatcactacaacaaccagatcaggacgctgatggaggaggaccctgaaaaatacgaggaacttcttcagctgataaagaaatttcgggatgaagagcttgagcaccatgacataggcctcgaccatgatgcagaattggctccagcctatgccgtcctgaagagcattatccaggccggatgcagagtggcgatatatttatcagaaagattataaagtgtgtccagttttgcctgtctataaaagatgatagtaatttaccaagtgacatttgcagagaaacaggtgtacagttatcgttgtacttttgtacaatgtgaattttgttaataaattataaggtttgtttttttttttttaaactctgcagtgttgatttttctctgggttgttttttctgccatgagaccaacaggtcaccagccttgttcaagttacagcaaacgaagctgggccttgtttggtctcatacttaattttcttttatatacatgtttttcttttacatgcatatatatatattttattttattttatgttttttggagacagggcctcgctcttttgtccaggccgggtcacaactcactgcagcctggacctcctagcctcaagcaatccacccacctcagccttccaagtagctgggactacaggtgtgcaccaccacagctggctaattctatttttttatagaggcgaagtctcactatgtcgccaggctggtctctaactcctgggctcagtgatcctcccgtttcgacttcccaaagtgctgggattacaggtgtgagccacttcaccaggcccattttctcctaaaacttcaaggacaaatcattaataatgtaacaggaatctttaggagaaaaaacaatttggtttactgataacaaaagataattggaaacatgagagtatttgagattggccaagcagaactatgaagtccatcaagtaagtcaaagatcatcgtttctgttttgaattgtgggtgataatgggtgggagagtgctacagtctgtatgtctgtgtctccctagaattcatacgatgaaatcttcactctcaagttgatagaaggtggggcccttgggaagtgtgaggtcatgagagtggagccctcatgaatgggatcagtgccttatgaaaggccctagagagatacctcatcctctccacagtgtgagacttcaaggggaagtatgagacttctctgaggaagcagacccttcacaagcaaaatcagccagcactttgatcacggacttcccagcctctaggactgtgagcaataaatgtttgatgtttataagccacccagactgtggtattttgttatagcagcctgaacagactaagacgggggtgttgcttccatcaaaggatgtactaagttgtggattatttgtgaaattgaattacaaccttttccttaaggtcttttaccacctcccccccaaaaaaatcccccaaaactgattcagattttcatactttaatgaaatattttataatttgcaaatttttaagtaatttatgaaaaacctagatcagtggatctcctctctggctgcccattagaatgtcctgtggagattaaacttttttttttcagtttatggaccaagagttttgatttatttagggtggagttcaggatcagaatggtttcagaagctcccaggtgattccggagtgagttggagctgcaagcccctgagctagattataagatgcttctgggaaagaaccacattttaggaatttgcttcccacccagtgccctgcatttaatcagcacctgatgacttggcaggacttgccccaccagggtctggctttgaagggtagtggacaccaggatcctttggattaatcctctgccacctctctcttttcctcaaccgagagtgaatttatgtaattgagtgaaagtctacgaatcataattgtaataaattaaggctgggcatttgtttgaaattagataggataaagccaaaggtttgaacaagttgtggatggtttgtaaaaattaatcttacaaaataaatgctgtgtgtgaacacgttgattaaattcaaaagggtattatttggtttttctgtaaattgaaccttgaaataaaagcacaacaaggttttcttaaggtactgatctgctctttaacaagaatttgtaaagggttataaaaggtttacaagaatctcacctcatggtcaaactagttaagattggatagatttatctataaggtattattaaaaattggggatgacattaatagtagactgatgcaaggatgacatttgactctgtcttgaacaagatttttatgtaatagtaaaggataatgaaagatttttgtttgccttgcaaataaactaccaaaaaaagaagggaaaggcaagagacaaattgtttggaaagttgtcttcccttttaatgggtaaaggttttgtgctttttaaaaaagtttttgagtcatcatttt

SEQ ID NO: 25508 - protein, 179 aa, Homo sapiens; identical to SEQ ID NO: 25502

SEQ ID NO: 25509 - DNA, 1268 bp, Homo sapiens
gttcaggaatgactttagacaatatcagtcgggcagctgtggatcgaataatccgggtggatcatgcaggcgaatatggagcaaaccgctccagcctatgccgtcctgaagagcattatccaggccggatgcagagtggcgatatatttatcagaaagattataaagtgtgtccagttttgcctgtctataaaagatgatagtaatttaccaagtgacatttgcagagaaacaggtgtacagttatcgttgtacttttgtacaatgtgaattttgttaataaattataaggtttgtttttttttttttaaactctgcagtgttgatttttctctgggttgttttttctgccatgagaccaacaggtcaccagccttgttcaagttacagcaaacgaagctgggccttgtttggtctcatacttaattttcttttatatacatgtttttcttttacatgcatatatatatattttattttattttatgttttttggagacagggcctcgctcttttgtccaggccgggtcacaactcactgcagcctggacctcctagcctcaagcaatccacccacctcagccttccaagtagctgggactacaggtgtgcaccaccacagctggctaattctatttttttatagaggcgaagtctcactatgtcgccaggctggtctctaactcctgggctcagtgatcctcccgtttcgacttcccaaagtgctgggattacaggtgtgagccacttcaccaggcccattttctcctaaaacttcaaggacaaatcattaataatgtaacaggaatctttaggagaaaaaacaatttggtttactgataacaaaagataattggaaacatgagagtatttgagattggccaagcagaactatgaagtccatcaagtaagtcaaagatcatcgtttctgttttgaattgtgggtgataatgggtgggagagtgctacagtctgtatgtctgtgtctccctagaattcatacgatgaaatcttcactctcaagttgatagaaggtggggcccttgggaagtgtgaggtcatgagagtggagccctcatgaatgggatcagtgccttatgaaaggccctagagagatacctcatcctctccacagtgtgagacttcaaggggaagtatgagacttctctgaggaagcagacccttcacaagcaaaatcagccagcactttgatcacggacttcccagcctctaggactgtgagcaataaatgtttgatgtttataagcc

SEQ ID NO: 25510 - protein, 86 aa, Homo sapiens
MTLDNISRAAVDRIIRVDHAGEYGANRSSLCRPEEHYPGRMQSGDIFIRKIIKCVQFCLSIKDDSNLPSDICRETGVQLSLYFCTM

SEQ ID NO: 25511 - DNA, 2035 bp, Homo sapiens
gttcaggaatgactttagacaatatcagtcgggcagctgtggatcgaataatccgggtggatcatgcaggcgaatatggagcaaaccgctccagcctatgccgtcctgaagagcattatccaggccggatgcagagtggcgatatatttatcagaaagattataaagtgtgtccagttttgcctgtctataaaagatgatagtaatttaccaagtgacatttgcagagaaacaggtgtacagttatcgttgtacttttgtacaatgtgaattttgttaataaattataaggtttgtttttttttttttaaactctgcagtgttgatttttctctgggttgttttttctgccatgagaccaacaggtcaccagccttgttcaagttacagcaaacgaagctgggccttgtttggtctcatacttaattttcttttatatacatgtttttcttttacatgcatatatatatattttattttattttatgttttttggagacagggcctcgctcttttgtccaggccgggtcacaactcactgcagcctggacctcctagcctcaagcaatccacccacctcagccttccaagtagctgggactacaggtgtgcaccaccacagctggctaattctatttttttatagaggcgaagtctcactatgtcgccaggctggtctctaactcctgggctcagtgatcctcccgtttcgacttcccaaagtgctgggattacaggtgtgagccacttcaccaggcccattttctcctaaaacttcaaggacaaatcattaataatgtaacaggaatctttaggagaaaaaacaatttggtttactgataacaaaagataattggaaacatgagagtatttgagattggccaagcagaactatgaagtccatcaagtaagtcaaagatcatcgtttctgttttgaattgtgggtgataatgggtgggagagtgctacagtctgtatgtctgtgtctccctagaattcatacgatgaaatcttcactctcaagttgatagaaggtggggcccttgggaagtgtgaggtcatgagagtggagccctcatgaatgggatcagtgccttatgaaaggccctagagagatacctcatcctctccacagtgtgagacttcaaggggaagtatgagacttctctgaggaagcagacccttcacaagcaaaatcagccagcactttgatcacggacttcccagcctctaggactgtgagcaataaatgtttgatgtttataagccacccagactgtggtattttgttatagcagcctgaacagactaagacgggggtgttgcttccatcaaaggatgtactaagttgtggattatttgtgaaattgaattacaaccttttccttaaggtcttttaccacctcccccccaaaaaaatcccccaaaactgattcagattttcatactttaatgaaatattttataatttgcaaatttttaagtaatttatgaaaaacctagatcagtggatctcctctctggctgcccattagaatgtcctgtggagattaaacttttttttttcagtttatggaccaagagttttgatttatttagggtggagttcaggatcagaatggtttcagaagctcccaggtgattccggagtgagttggagctgcaagcccctgagctagattataagatgcttctgggaaagaaccacattttaggaatttgcttcccacccagtgccctgcatttaatcagcacctgatgacttggcaggacttgccccaccagggtctggctttgaagggtagtggacaccaggatcctttggattaatcctctgccacctctctcttttcctcaaccgagagtgaatttatgtaattgagtgaaagtctacgaatcataattgtaataaattaaggctgggcatttgtttgaaattagataggataaagccaaaggtttgaacaagttgtggatggtttgtaaaaattaatcttacaaaataaatgctgtgtgtgaacacgttgattaaattc

SEQ ID NO: 25512 - protein, 86 aa, Homo sapiens; identical to SEQ ID NO: 25510

SEQ ID NO: 25513 - DNA, 2447 bp, Homo sapiens
gttcaggaatgactttagacaatatcagtcgggcagctgtggatcgaataatccgggtggatcatgcaggcgaatatggagcaaaccgctccagcctatgccgtcctgaagagcattatccaggccggatgcagagtggcgatatatttatcagaaagattataaagtgtgtccagttttgcctgtctataaaagatgatagtaatttaccaagtgacatttgcagagaaacaggtgtacagttatcgttgtacttttgtacaatgtgaattttgttaataaattataaggtttgtttttttttttttaaactctgcagtgttgatttttctctgggttgttttttctgccatgagaccaacaggtcaccagccttgttcaagttacagcaaacgaagctgggccttgtttggtctcatacttaattttcttttatatacatgtttttcttttacatgcatatatatatattttattttattttatgttttttggagacagggcctcgctcttttgtccaggccgggtcacaactcactgcagcctggacctcctagcctcaagcaatccacccacctcagccttccaagtagctgggactacaggtgtgcaccaccacagctggctaattctatttttttatagaggcgaagtctcactatgtcgccaggctggtctctaactcctgggctcagtgatcctcccgtttcgacttcccaaagtgctgggattacaggtgtgagccacttcaccaggcccattttctcctaaaacttcaaggacaaatcattaataatgtaacaggaatctttaggagaaaaaacaatttggtttactgataacaaaagataattggaaacatgagagtatttgagattggccaagcagaactatgaagtccatcaagtaagtcaaagatcatcgtttctgttttgaattgtgggtgataatgggtgggagagtgctacagtctgtatgtctgtgtctccctagaattcatacgatgaaatcttcactctcaagttgatagaaggtggggcccttgggaagtgtgaggtcatgagagtggagccctcatgaatgggatcagtgccttatgaaaggccctagagagatacctcatcctctccacagtgtgagacttcaaggggaagtatgagacttctctgaggaagcagacccttcacaagcaaaatcagccagcactttgatcacggacttcccagcctctaggactgtgagcaataaatgtttgatgtttataagccacccagactgtggtattttgttatagcagcctgaacagactaagacgggggtgttgcttccatcaaaggatgtactaagttgtggattatttgtgaaattgaattacaaccttttccttaaggtcttttaccacctcccccccaaaaaaatcccccaaaactgattcagattttcatactttaatgaaatattttataatttgcaaatttttaagtaatttatgaaaaacctagatcagtggatctcctctctggctgcccattagaatgtcctgtggagattaaacttttttttttcagtttatggaccaagagttttgatttatttagggtggagttcaggatcagaatggtttcagaagctcccaggtgattccggagtgagttggagctgcaagcccctgagctagattataagatgcttctgggaaagaaccacattttaggaatttgcttcccacccagtgccctgcatttaatcagcacctgatgacttggcaggacttgccccaccagggtctggctttgaagggtagtggacaccaggatcctttggattaatcctctgccacctctctcttttcctcaaccgagagtgaatttatgtaattgagtgaaagtctacgaatcataattgtaataaattaaggctgggcatttgtttgaaattagataggataaagccaaaggtttgaacaagttgtggatggtttgtaaaaattaatcttacaaaataaatgctgtgtgtgaacacgttgattaaattcaaaagggtattatttggtttttctgtaaattgaaccttgaaataaaagcacaacaaggttttcttaaggtactgatctgctctttaacaagaatttgtaaagggttataaaaggtttacaagaatctcacctcatggtcaaactagttaagattggatagatttatctataaggtattattaaaaattggggatgacattaatagtagactgatgcaaggatgacatttgactctgtcttgaacaagatttttatgtaatagtaaaggataatgaaagatttttgtttgccttgcaaataaactaccaaaaaaagaagggaaaggcaagagacaaattgtttggaaagttgtcttcccttttaatgggtaaaggttttgtgctttttaaaaaagtttttgagtcatcatttt

SEQ ID NO: 25514 - protein, 86 aa, Homo sapiens; identical to SEQ ID NO: 25510

SEQ ID NO: 25515 - DNA, 962 bp, Homo sapiens
tttgcagagaaacaggtgtacagttatcgttgtacttttgtacaatgtgaattttgttaataaattataaggtttgtttttttttttttaaactctgcagtgttgatttttctctgggttgttttttctgccatgagaccaacaggtcaccagccttgttcaagttacagcaaacgaagctgggccttgtttggtctcatacttaattttcttttatatacatgtttttcttttacatgcatatatatatattttattttattttatgttttttggagacagggcctcgctcttttgtccaggccgggtcacaactcactgcagcctggacctcctagcctcaagcaatccacccacctcagccttccaagtagctgggactacaggtgtgcaccaccacagctggctaattctatttttttatagaggcgaagtctcactatgtcgccaggctggtctctaactcctgggctcagtgatcctcccgtttcgacttcccaaagtgctgggattacaggtgtgagccacttcaccaggcccattttctcctaaaacttcaaggacaaatcattaataatgtaacaggaatctttaggagaaaaaacaatttggtttactgataacaaaagataattggaaacatgagagtatttgagattggccaagcagaactatgaagtccatcaaaattcatacgatgaaatcttcactctcaagttgatagaaggtggggcccttgggaagtgtgaggtcatgagagtggagccctcatgaatgggatcagtgccttatgaaaggccctagagagatacctcatcctctccacagtgtgagacttcaaggggaagtatgagacttctctgaggaagcagacccttcacaagcaaaatcagccagcactttgatcacggacttcccagcctctaggactgtgagcaataaatgtttgatgtttataagcc

SEQ ID NO: 25516 - protein, 97 aa, Homo sapiens
MRPTGHQPCSSYSKRSWALFGLILNFLLYTCFSFTCIYIYFILFYVFWRQGLALLSRPGHNSLQPGPPSLKQSTHLSLPSSWDYRCAPPQLANSIFL

SEQ ID NO: 25517 - DNA, 1729 bp, Homo sapiens
tttgcagagaaacaggtgtacagttatcgttgtacttttgtacaatgtgaattttgttaataaattataaggtttgtttttttttttttaaactctgcagtgttgatttttctctgggttgttttttctgccatgagaccaacaggtcaccagccttgttcaagttacagcaaacgaagctgggccttgtttggtctcatacttaattttcttttatatacatgtttttcttttacatgcatatatatatattttattttattttatgttttttggagacagggcctcgctcttttgtccaggccgggtcacaactcactgcagcctggacctcctagcctcaagcaatccacccacctcagccttccaagtagctgggactacaggtgtgcaccaccacagctggctaattctatttttttatagaggcgaagtctcactatgtcgccaggctggtctctaactcctgggctcagtgatcctcccgtttcgacttcccaaagtgctgggattacaggtgtgagccacttcaccaggcccattttctcctaaaacttcaaggacaaatcattaataatgtaacaggaatctttaggagaaaaaacaatttggtttactgataacaaaagataattggaaacatgagagtatttgagattggccaagcagaactatgaagtccatcaaaattcatacgatgaaatcttcactctcaagttgatagaaggtggggcccttgggaagtgtgaggtcatgagagtggagccctcatgaatgggatcagtgccttatgaaaggccctagagagatacctcatcctctccacagtgtgagacttcaaggggaagtatgagacttctctgaggaagcagacccttcacaagcaaaatcagccagcactttgatcacggacttcccagcctctaggactgtgagcaataaatgtttgatgtttataagccacccagactgtggtattttgttatagcagcctgaacagactaagacgggggtgttgcttccatcaaaggatgtactaagttgtggattatttgtgaaattgaattacaaccttttccttaaggtcttttaccacctcccccccaaaaaaatcccccaaaactgattcagattttcatactttaatgaaatattttataatttgcaaatttttaagtaatttatgaaaaacctagatcagtggatctcctctctggctgcccattagaatgtcctgtggagattaaacttttttttttcagtttatggaccaagagttttgatttatttagggtggagttcaggatcagaatggtttcagaagctcccaggtgattccggagtgagttggagctgcaagcccctgagctagattataagatgcttctgggaaagaaccacattttaggaatttgcttcccacccagtgccctgcatttaatcagcacctgatgacttggcaggacttgccccaccagggtctggctttgaagggtagtggacaccaggatcctttggattaatcctctgccacctctctcttttcctcaaccgagagtgaatttatgtaattgagtgaaagtctacgaatcataattgtaataaattaaggctgggcatttgtttgaaattagataggataaagccaaaggtttgaacaagttgtggatggtttgtaaaaattaatcttacaaaataaatgctgtgtgtgaacacgttgattaaattc

SEQ ID NO: 25518 - protein, 97 aa, Homo sapiens; identical to SEQ ID NO: 25516

SEQ ID NO: 25519 - DNA, 2141 bp, Homo sapiens
tttgcagagaaacaggtgtacagttatcgttgtacttttgtacaatgtgaattttgttaataaattataaggtttgtttttttttttttaaactctgcagtgttgatttttctctgggttgttttttctgccatgagaccaacaggtcaccagccttgttcaagttacagcaaacgaagctgggccttgtttggtctcatacttaattttcttttatatacatgtttttcttttacatgcatatatatatattttattttattttatgttttttggagacagggcctcgctcttttgtccaggccgggtcacaactcactgcagcctggacctcctagcctcaagcaatccacccacctcagccttccaagtagctgggactacaggtgtgcaccaccacagctggctaattctatttttttatagaggcgaagtctcactatgtcgccaggctggtctctaactcctgggctcagtgatcctcccgtttcgacttcccaaagtgctgggattacaggtgtgagccacttcaccaggcccattttctcctaaaacttcaaggacaaatcattaataatgtaacaggaatctttaggagaaaaaacaatttggtttactgataacaaaagataattggaaacatgagagtatttgagattggccaagcagaactatgaagtccatcaaaattcatacgatgaaatcttcactctcaagttgatagaaggtggggcccttgggaagtgtgaggtcatgagagtggagccctcatgaatgggatcagtgccttatgaaaggccctagagagatacctcatcctctccacagtgtgagacttcaaggggaagtatgagacttctctgaggaagcagacccttcacaagcaaaatcagccagcactttgatcacggacttcccagcctctaggactgtgagcaataaatgtttgatgtttataagccacccagactgtggtattttgttatagcagcctgaacagactaagacgggggtgttgcttccatcaaaggatgtactaagttgtggattatttgtgaaattgaattacaaccttttccttaaggtcttttaccacctcccccccaaaaaaatcccccaaaactgattcagattttcatactttaatgaaatattttataatttgcaaatttttaagtaatttatgaaaaacctagatcagtggatctcctctctggctgcccattagaatgtcctgtggagattaaacttttttttttcagtttatggaccaagagttttgatttatttagggtggagttcaggatcagaatggtttcagaagctcccaggtgattccggagtgagttggagctgcaagcccctgagctagattataagatgcttctgggaaagaaccacattttaggaatttgcttcccacccagtgccctgcatttaatcagcacctgatgacttggcaggacttgccccaccagggtctggctttgaagggtagtggacaccaggatcctttggattaatcctctgccacctctctcttttcctcaaccgagagtgaatttatgtaattgagtgaaagtctacgaatcataattgtaataaattaaggctgggcatttgtttgaaattagataggataaagccaaaggtttgaacaagttgtggatggtttgtaaaaattaatcttacaaaataaatgctgtgtgtgaacacgttgattaaattcaaaagggtattatttggtttttctgtaaattgaaccttgaaataaaagcacaacaaggttttcttaaggtactgatctgctctttaacaagaatttgtaaagggttataaaaggtttacaagaatctcacctcatggtcaaactagttaagattggatagatttatctataaggtattattaaaaattggggatgacattaatagtagactgatgcaaggatgacatttgactctgtcttgaacaagatttttatgtaatagtaaaggataatgaaagatttttgtttgccttgcaaataaactaccaaaaaaagaagggaaaggcaagagacaaattgtttggaaagttgtcttcccttttaatgggtaaaggttttgtgctttttaaaaaagtttttgagtcatcatttt

SEQ ID NO: 25520 - protein, 97 aa, Homo sapiens; identical to SEQ ID NO: 25516

SEQ ID NO: 25521 - DNA, 1571 bp, Homo sapiens
gtacagttatcgttgtacttttgtacaatgtgaattttgttaataaattataaggtttgtttttttttttttaaactctgcagtgttgatttttctctgggttgttttttctgccatgagaccaacaggtcaccagccttgttcaagttacagcaaacgaagctgggccttgtttggtctcatacttaattttcttttatatacatgtttttcttttacatgcatatatatatattttattttattttatgttttttggagacagggcctcgctcttttgtccaggccgggtcacaactcactgcagcctggacctcctagcctcaagcaatccacccacctcagccttccaagtagctgggactacaggtgtgcaccaccacagctggctaattctatttttttatagaggcgaagtctcactatgtcgccaggctggtctctaactcctgggctcagtgatcctcccgtttcgacttcccaaagtgctgggattacaggtgtgagccacttcaccaggcccattttctcctaaaacttcaaggacaaatcattaataatgtaacaggaatctttaggagaaaaaacaatttggtttactgataacaaaagataattggaaacatgagagtatttgagattggccaagcagaactatgaagtccatcaatgtgagacttcaaggggaagtatgagacttctctgaggaagcagacccttcacaagcaaaatcagccagcactttgatcacggacttcccagcctctaggactgtgagcaataaatgtttgatgtttataagccacccagactgtggtattttgttatagcagcctgaacagactaagacgggggtgttgcttccatcaaaggatgtactaagttgtggattatttgtgaaattgaattacaaccttttccttaaggtcttttaccacctcccccccaaaaaaatcccccaaaactgattcagattttcatactttaatgaaatattttataatttgcaaatttttaagtaatttatgaaaaacctagatcagtggatctcctctctggctgcccattagaatgtcctgtggagattaaacttttttttttcagtttatggaccaagagttttgatttatttagggtggagttcaggatcagaatggtttcagaagctcccaggtgattccggagtgagttggagctgcaagcccctgagctagattataagatgcttctgggaaagaaccacattttaggaatttgcttcccacccagtgccctgcatttaatcagcacctgatgacttggcaggacttgccccaccagggtctggctttgaagggtagtggacaccaggatcctttggattaatcctctgccacctctctcttttcctcaaccgagagtgaatttatgtaattgagtgaaagtctacgaatcataattgtaataaattaaggctgggcatttgtttgaaattagataggataaagccaaaggtttgaacaagttgtggatggtttgtaaaaattaatcttacaaaataaatgctgtgtgtgaacacgttgattaaattc

SEQ ID NO: 25522 - protein, 97 aa, Homo sapiens; identical to SEQ ID NO: 25516

SEQ ID NO: 25523 - DNA, 1983 bp, Homo sapiens
gtacagttatcgttgtacttttgtacaatgtgaattttgttaataaattataaggtttgtttttttttttttaaactctgcagtgttgatttttctctgggttgttttttctgccatgagaccaacaggtcaccagccttgttcaagttacagcaaacgaagctgggccttgtttggtctcatacttaattttcttttatatacatgtttttcttttacatgcatatatatatattttattttattttatgttttttggagacagggcctcgctcttttgtccaggccgggtcacaactcactgcagcctggacctcctagcctcaagcaatccacccacctcagccttccaagtagctgggactacaggtgtgcaccaccacagctggctaattctatttttttatagaggcgaagtctcactatgtcgccaggctggtctctaactcctgggctcagtgatcctcccgtttcgacttcccaaagtgctgggattacaggtgtgagccacttcaccaggcccattttctcctaaaacttcaaggacaaatcattaataatgtaacaggaatctttaggagaaaaaacaatttggtttactgataacaaaagataattggaaacatgagagtatttgagattggccaagcagaactatgaagtccatcaatgtgagacttcaaggggaagtatgagacttctctgaggaagcagacccttcacaagcaaaatcagccagcactttgatcacggacttcccagcctctaggactgtgagcaataaatgtttgatgtttataagccacccagactgtggtattttgttatagcagcctgaacagactaagacgggggtgttgcttccatcaaaggatgtactaagttgtggattatttgtgaaattgaattacaaccttttccttaaggtcttttaccacctcccccccaaaaaaatcccccaaaactgattcagattttcatactttaatgaaatattttataatttgcaaatttttaagtaatttatgaaaaacctagatcagtggatctcctctctggctgcccattagaatgtcctgtggagattaaacttttttttttcagtttatggaccaagagttttgatttatttagggtggagttcaggatcagaatggtttcagaagctcccaggtgattccggagtgagttggagctgcaagcccctgagctagattataagatgcttctgggaaagaaccacattttaggaatttgcttcccacccagtgccctgcatttaatcagcacctgatgacttggcaggacttgccccaccagggtctggctttgaagggtagtggacaccaggatcctttggattaatcctctgccacctctctcttttcctcaaccgagagtgaatttatgtaattgagtgaaagtctacgaatcataattgtaataaattaaggctgggcatttgtttgaaattagataggataaagccaaaggtttgaacaagttgtggatggtttgtaaaaattaatcttacaaaataaatgctgtgtgtgaacacgttgattaaattcaaaagggtattatttggtttttctgtaaattgaaccttgaaataaaagcacaacaaggttttcttaaggtactgatctgctctttaacaagaatttgtaaagggttataaaaggtttacaagaatctcacctcatggtcaaactagttaagattggatagatttatctataaggtattattaaaaattggggatgacattaatagtagactgatgcaaggatgacatttgactctgtcttgaacaagatttttatgtaatagtaaaggataatgaaagatttttgtttgccttgcaaataaactaccaaaaaaagaagggaaaggcaagagacaaattgtttggaaagttgtcttcccttttaatgggtaaaggttttgtgctttttaaaaaagtttttgagtcatcatttt

SEQ ID NO: 25524 - protein, 97 aa, Homo sapiens; identical to SEQ ID NO: 25516

SEQ ID NO: 25525 - DNA, 770 bp, Homo sapiens
cggctggctgctccagtctgcgccgtccatgcgtctcgggtgtcctatcccggaggatacatttttctttttcagaaaagggaaacaggaaaacggggacgattagactctatctaggggagccatgtggaaaaaccagcttcaggctggagtttagctcactgcaacctctgcctcctgggttcaagcaattctcctccctcagccttctgagtagctgggactacaggctttagaactggcggctttataagaagagaaagagagatctgagctagcacactcaacccccttgctctgtgatgccctgtgccatctcgggactctgcagagggtccccaccagcaagaaggccttcaccagagcggccccttaaccttggacttcccagcctccataactgtctgactggatccagaagttccagtgaagccgatttctatctctagtctttgtgatcctttcctctccagcaaggcttttccttgccatgacaagacacctggcagcatctccaggcttactcaaccagtacccttgatgggaaaagggcttttctttcttaattttccagcaaaagcctcaagattgactctggagtaaattgcacatggcctcaaattctttgcagctccttccactatgaggtggcatgtattactccaatccctgcatctgggctggatttgtgacttgttttgaacaatagaatgtggtaaaagtgacagtgaaaatatatgagtttcaagcctaagacaacatgcttttca

SEQ ID NO: 25526 - protein, 48 aa, Homo sapiens
MPCAISGLCRGSPPARRPSPERPLNLGLPSLHNCLTGSRSSSEADFYL

SEQ ID NO: 25527 - DNA, 7183 bp, Homo sapiens
gtcgctttaaggcggaggcccgggagggggccgacccggctcgccagctccacgctcggctccagactccggcatttcctccccgctagctggcgcggcctcgcctccccctcggaagaggaaactcccggggtccgagtaacagggtcaggcgcggagaggagcggcgggagagccaggagggccgcccaggctatgtcctcctgcgctgtcgccacgctgtccggcagcgcttcctgcccgggtctccccgtctggagggtcacgccgccttctcctcgagacacttccgagagccgggcctcagcatcctgctggagagttactacgagcatgaggtgcgcctgtctccgcacgtgttgggccacagcaaggcgcacgtgagccggatcgtgggcgagctggtgcgggctggccgcgcccgggggtcccccggtctcattcctgggggagcgctggccttggccttccgcggagacttcatccaggtgggcagcgcctacgagcaacataaaatccgccggcccgacagcttcgacgtgctggtgccactgcgcctcccgccgcttgtggcgctggagccacggagcctgggcgaggagccagcgctggccccggccttccgcggctgcttcttgtgcgccctcaaggcaccaccctcaccatcgggggcctcggggggccactggcttcgggactgcaaaccctttgctgatgccttctgcgtggatgtgcgcgggcggcgtcacctctctgctactctggtgctgcgctggttccagtcgcatctgcagcgctccttggccactgtgcgttacagcctggaggggcgctgtcgggtcaccttgaccccaggtggcctggaacagccccccaccttacacatcttgccctgccgcactgactacggctgctgccgcctttctatggctgtgcgtctcatccccgctgtccatctgggagatggggtcttccttgtggcgccaccaccgccacccttgcccagcgcgcccctgttggagctccctgagggcctgcgtgcggaggcactgtggggtgtgaacacagcacgccaggagcagaagctgctgagttggctgcaggaacgggcagctccaggtgcctgctacctcaagtgcctgcagttgcttaaggctctgcgcgatctgggggcccgtgggctggactcagcggccgccacccagtggggacgcatcctatcctcatatgtgctcaagacagtgctgctggcagtgctgctgcgcaagggggcccctgggcaaggctgggacgaggagcacctgggaaggtgtttggaggagttggtgcagttccttagggactgcctgctgcgacgccatacgctcttccactgcgtcctgggccctggtggggcggctgccgaggtgggtcccctgcccaaggcactgagggaagccgccccagttgacctcctggccgctttcgacgggcacgcccgggaacttgcagcagcgcggttgctgtccacgtggcaaaggctgccccagcttctccgggcctacgggggtccccgctaccttgccaggtgccccccaccccggagtcagcgcacccagggcttccttgaaggtgaaccgtaaaccctgacagcacccccacctgaccaaatgctcctaaagcctttcccactgggtgggggtgggaatggcggtgaagccagttaaatgcaagattgcagaaggcattggaaaatttggtggctgccacaagctttagtggcttaaatatcaccttctcgcttcacagtccagtataatatgacatcttcacacccactagagtgtcctgggcaaaccatgggaagacatccaacaggagacccaagaattggttcaaatattgttctgtgtagacggattctgtagaaggatgtggcttttagagaagtccagtagaagaagcaagaactagctgcagggaaagttccttctgtcggtttttagacacagatctctctgcccaaattaaaaaaaaacaaaacaaaacactaaagtttttgacacaattacttgctaggtactgggttcctgattgtctttaaaaagaaaaatctgaatctttatttgcaactggaattgaagttctattttaggggctaatgtttagaggaacataatttccactgttcaaattaatattaatgtatttttaaaatggtgcaatcacaggtgtttgacaagattgtcaacaagttaagtcacatagatggaaaggcaatcgagagttggttagagaagcttccagagaaaatagcactttatattgatcaattcactcattttgtggtaattgctagcaccaagcattgcatctgaaagggaagccagttatatttattattaaatgtacaaccttgaaaagcagccagcatgcttgcctaactaacatcgccgcaggccacaagctgggatatgtacctgtccgtcaacatccattcattaaactacctactaccagccagagatgtctggaaccaaagtagcaaccaaatacatattcaagacaacactggtgaaggcataaaacatgttggctttggagaaagatgtgttttaggctttgcctgtaaaggtgtttctccaaggctggctgctggctggagacagaaaacttttttgttttaaggtttttagcaaactccttcacaaagagatttctttctgagcttaatgagctaatgaagaggaaatgcctgctgcttagcatgtggtttgtgctgggtctctaaccattgatggttcttccttgtccaggcagtcttacgtggtccaagagacctgttgattcagcacaggtcttgcaaaacatttcacttatagttcagtatcttgggctctgtgcttgaagatcagttactccctggtcgtgggcagaggagacaaattaggaaaagagcaagggagacagcccttgacggcagtctgtctcttttctctttaggtgtcagtatcaccaggttgggtgtattttgcagctgggaggagccggtcctggaattcttccttgttctcccaaatttataacagtcctcaattgcagtttaagttcagcatggcccctcatctgcttgcctgattggaaatgcagccagtccaagtgttacaaattgggatttttttgttttctaaataaaaacatgtacttcctcagactcttaaagctaaaatttggaagacagaaatgcctatgtgaatagaatcattgttgaagttctgagctcttttgagggaactctataagccttctttctttaggggatccacttgcctgctgtgggaaatcatagtgagtgatttacaggaatccttctcctccaagctgcattggcttcttatatcctttgcgaccttgggctgaaagagaaacagctgcaaatgttgtgctgtctctttgaggttgtcttggggacagttccccgcaaaggtcattcctagcttttgaggtcaatgttgggtcataaggtactgcattgtgcaaagaagtcagtctgctaactttatgcaaagatagaaactgcacggtattttttaaaattagtttttaaaataaatgccaagagtagatcttatatatatatatatgtatacatattttatatatatatatatttccatactcaaccacaacttcctctgtactcattgtttactacagtgggggacatcaagggttggaaggattataaagctttaaggctgggcgtggtggctcacgcctgtaatcccagcactttgggaggcgaggtgggcggatcacctgaggtcaggagttcaagaccagcctagccaacatagtgaaactctgtctctactaaaaaatacaaaaattagctgggcgtggtggcgggcgcctgtaatcccagatactcgggaggctaaggcaggagaatcacttgaacccgggaggtgaaggttgcagagagccaagatcacaccactgcactccagcctgggtgaccgagcgagactccgtctcaaaaaaaaaaaaaaaaagctttaaaaagctgaattttagaaatatttctagcagtgtcagtgagttcctcttttaatagtgttttaaagtataaatctggtaacatactgttcttgtagttttttgttagttttgtttttcaggttaattacccaaagcctcatccatcctcaaggtttttaaattttatttttttaaaataaattgtgcattgtatttgtgaatttttaaaatattactgttttatttaaatgccatgctgagcaattgttctctgtacatggtaaccaaaacttagagatttcgatcaattttgatcaatgtttagtaaaccaaaacatgtactgtgtacaacggaaataatatggcatattagccaggcatgatggttgcccaagacagttaaattaagctcaattctgtattttattagggctctgttatgtccttcatctgaaatgtacacatttttggtgtatgcttggtactggagattcatatatgcaaatattctcatgcaagaagttccacagtaacaacagcaaaaagaaaaaattagttgtccagccagtgctggaggaaaatgtttctggggaagatgactcagtcattttgtggcgagacaccctttggtaactcccactgaccagtcttgggagccttcctggaatgatcgtgggctgagcggagatgttttttgcaaaatgaaactgaagctgaaagaaaggagaattcgagtgaaccaagagaaatccaaagacctggggaaggaggacttaagatgaaagtgaagcaagagagggaaggggaaatgaagtgaaaatggcgtgagggtgtgagagaggtttgggttaggaaacatgtttttagtgctatttccaaccaggggtcgcaaactcagcagcctgtagaaacaggggtgggaggtgggggggaagctgtgcccacctttaaagagggggccattgctcagccatgcagaaaaaaatggggcaacaagctggaaatcaggttttttttttttaaagtgaaacttgatgatttttaaacaagtaattaaaaaaatgtccaaaacaccatgtgggccaaacatttgtttgagcctgggggccaccagtttgcgaccactgccttacgtagttaacaccctgagtatgtatacagtcatattttttgttttggatatggtagtgttatatatacttgggggcgtgatatttgaagtcatctttatctctcagagttaagctttattgtagaagaaaaaaaaaaaagttaacacagccatagataacacttaactcacagttcccaggaggacacttgatctcgaagctgctctttttgagtcagatcctacatcaaaccacttagggccagtttttggcatttccttcctggtgatttggggtaaacttctttgctctgtcggagtttgcagatgagtaatcagaaggattgcagaataacttgtttctttgtattttattcttacatttaaattaattttggggggttagtggtatcctagctcgtgcctttacagggatgattggtggctagatttggggtgcaagcttcttaggctcataccatttcaactaccaagaacacaggtttttgtttttgttttttgagacagggtctcagtctgttgcccaggctggagtgcagtggcaagattgcagctcattgcagccttgacctcctgggctcaagcgatcctcctgcctcggcctcccaactagctgggaccacaggtatgtgccactacacccagcgaatttttaaattatttgtagagtcagggtctccctatgttgcccaggctggtcttgaactactggactcaagccatcctcccacctcggcctcccaaagtgttgggattataggcgcgagccaccacacctggcctaaaagcgtcgttctgatcagacttcacccctgaatgtttctatcattttcttttctttttttttttttttcgagacagagttttgctcttgttttacaggctggggtgcggtgggatgatcttggctcactgcaatctcctcctcccaggttcaagtgattcttgggccttagcctcccgagtagctgggattacaggcacctgccaccacgcctggctaatatatatatatatatatatatattttttttttttttttttagtagagatggggtttcatcatgttggccaggctggtctcgaactcctgacctcaggtgatctacctgcctcggcctcccaaagtgcagggattacaggtgtgagtgagccaccgcggccggcctctatcattttctgactcagcagctccaccaaaattgacatcctagcaaacactgtgaaggaattaacctaagtgcttccagagcatctcatgtaacctctatggagtaagtcactttttctgtaacatgtggcttttgaccttgatgaagactttgacttctcatccctgtctacatggaggaagatgattcagtggtggggaaaatgaacctcggtaacatttccaatgtccttcaagagggaaacaagttcagtgttatcatcgtggcattcgttagtttttttttttttaaatcacttgtttagatacaactttatttttttatacctacatagcacatgactggggggataaagcatgtataagttgggagagggtaaagaatgtgtgactatgtatacagaaaatagactaaaatgtgcagcaaaatgatatatactgtaatctggtttttgaagtatctactattctggaatattgttaaacaactttttgcttttgaaaaaaaaaggtgccttgattcagttgcgtgacttagaacattcatcctattttattgtgatttttaatgtcttctgaccccaaactgtgtttttggttgcagtctggcggctgcaggcatagcgtcggttttgttccaataacagagaccaaagagttaatcagatatggttcagctgctacaattgtatgattcaaaggcaatttaatcaccccaaatttccatggcccccacagtcaagacctgccattcgttttctcttgcaggttggagtaaatttgcactttgaatcatgtgggtcatttggggaccttgttcttttctattttgctttattaataaaggaacttgtagaaac

SEQ ID NO: 25528 - protein, 231 aa, Homo sapiens [sequence omitted]

SEQ ID NO: 25529 - DNA, 2506 bp, Homo sapiens
cccgggagggggccgacccggctcgccagctccacgctcggctccagactccggcatttcctccccgctagctggcgcggcctcgcctccccctcggaagaggaaactcccggggtccgagtaacagggtcaggcgcggagaggagcggcgggagagccaggagggccgcccagggtaggaggcgagccaggccgggccagaagctggccgacggcggcgcgcgggggcgccgggcggggagggccgctgggccggactcagcgcgcagccggggcagggcgcggcccggggcccgagagcgcagggcgggccgcagctggaaggaacacttgagctgggagaggaggccgagctggagggcggcctccctcgggcctgcgttcgggaagccgccgcggaggaggagacggggacagcggggctgcccgggcgctgtgcgcatgctgggcttgggtcgccgccggggcttgccccctgggctgctcggccaccgccgccccgggcgcccggcatgtcggtgcactacaccctcaatctacgcgtcttctggcccctggtgaccggcctgtgcaccgccctggtgtgcctctaccatgtcctgcggggaagcgggggcgcccgggccgagcccgccgacggcgtggatggcggcttcccgttgcttaaggtggccgtcctgctcctcctcagctatgtcctcctgcgctgtcgccacgctgtccggcagcgcttcctgcccgggtctccccgtctggagggtcacgccgccttctcctcgagacacttccgagagccgggcctcagcatcctgctggagagttactacgagcatgaggtgcgcctgtctccgcacgtgttgggccacagcaaggcgcacgtgagccggatcgtgggcgagctggtgcgggctggccgcgcccgggggtcccccggtctcattcctgggggagcgctggccttggccttccgcggagacttcatccaggtgggcagcgcctacgagcaacataaaatccgccggcccgacagcttcgacgtgctggtgccactgcgcctcccgccgcttgtggcgctggagccacggagcctgggcgaggagccagcgctggccccggccttccgcggctgcttcttgtgcgccctcaaggcaccaccctcaccatcgggggcctcggggggccactggcttcgggactgcaaaccctttgctgatgccttctgcgtggatgtgcgcgggcggcgtcacctctctgctactctggtgctgcgctggttccagtcgcatctgcagcgctccttggccactgtgcgttacagcctggaggggcgctgtcgggtcaccttgaccccaggtggcctggaacagccccccaccttacacatcttgccctgccgcactgactacggctgctgccgcctttctatggctgtgcgtctcatccccgctgtccatctgggagatggggtcttccttgtggcgccaccaccgccacccttgcccagcgcgcccctgttggagctccctgagggcctgcgtgcggaggcactgtggggtgtgaacacagcacgccaggagcagaagctgctgagttggctgcaggaacgggcagctccaggtgcctgctacctcaagtgcctgcagttgcttaaggctctgcgcgatctgggggcccgtgggctggactcagcggccgccacccagtggggacgcatcctatcctcatatgtgctcaagacagtgctgctggcagtgctgctgcgcaagggggcccctgggcaaggctgggacgaggagcacctgggaaggtgtttggaggagttggtgcagttccttagggactgcctgctgcgacgccatacgctcttccactgcgtcctgggccctggtggggcggctgccgaggtgggtcccctgcccaaggcactgagggaagccgccccagttgacctcctggccgctttcgacgggcacgcccgggaacttgcagcagcgcggttgctgtccacgtggcaaaggctgccccagcttctccgggcctacgggggtccccgctaccttgccaggtgccccccaccccggagtcagcgcacccagggcttccttgaaggtgaaccgtaaaccctgacagcacccccacctgaccaaatgctcctaaagcctttcccactgggtgggggtgggaatggcggtgaagccagttaaatgcaagattgcagaaggcattggaaaatttggtggctgccacaagctttagtggcttaaatatcaccttctcgcttcacagtccagtataatatgacatcttcacacccactagagtgtcctgggcaaaccatgggaagacatccaacaggagacccaagaattggttcaaatattgttctgtgtagacggattctgtagaaggatgtggcttttagagaagtccagtagaagaagcaagaactagctgcagggaaagttccttctgtcggtttttagacacagatctctctgcccaaatt

SEQ ID NO: 25530 - protein, 535 aa, Homo sapiens; identical to SEQ ID NO: 3389

SEQ ID NO: 25531 - DNA, 2943 bp, Homo sapiens
aaaaaataaagttgtatctaaacaagtgatttaaaaaaaaaaaaactaacgaatgccacgatgataacactgaacttgtttccctcttgaaggacattggaaatgttaccgaggttcattttccccaccactgaatcatcttcctccatgtagacagggatgagaagtcaaagtcttcatcaaggtcaaaagccacatgttacagaaaaagtgacttactccatagaggttacatgagatgctctggaagcacttaggttaattccttcacagtgtttgctaggatgtcaattttggtggagctgctgagtcagaaaatgatagaggccggccgcggtggctcactcacacctgtaatccctgcatgggattacaggcgtgagccaccacgcccagccttaaagctttataatccttccaacccttgatgtcccccactgtagtaaacaatgagtacagaggaagttgtggttgagtatggaaatatatatatatataaaatatgtatacatatatatatatataagatctactcttggcatttattttaaaaactaattttaaaaaataccgtgcagtttctatctttgcataaagttagcagactgacttctttgcacaatgcagtaccttatgacccaacattgacctcaaaagctaggaatgacctttgcggggaactgtccccaagacaacctcaaagagacagcacaacatttgcagctgtttctctttcagcccaaggtcgcaaaggatataagaagccaatgcagcttggaggagaaggattcctgtaaatcactcactatgatttcccacagcaggcaagtggatcccctaaagaaagaaggcttatagagttccctcaaaagagctcagaacttcaacaatgattctattcacataggcatttctgtcttccaaattttagctttaagagtctgaggaagtacatgtttttatttagaaaacaaaaaaatcccaatttgtaacacttggactggctgcatttccaatcaggcaagcagatgaggggccatgctgaacttaaactgcaattgaggactgttataaatttgggagaacaaggaagaattccaggaccggctcctcccagctgcaaaatacacccaacctggtgatactgacacctaaagagaaaagagacagactgccgtcaagggctgtctcccttgctcttttcctaatttgtctcctctgcccacgaccagggagtaactgatcttcaagcacagagcccaagatactgaactataagtgaaatgttttgcaagacctgtgctgaatcaacaggtctcttggaccacgtaagactgcctggacaaggaagaaccatcaatggttagagacccagcacaaaccacatgctaagcagcaggcatttcctcttcattagctcattaagctcagaaagaaatctctttgtgaaggagtttgctaaaaaccttaaaacaaaaaagttttctgtctccagccagcagccagccttggagaaacacctttacaggcaaagcctaaaacacatctttctccaaagccaacatgttttatgccttcaccagtgttgtcttgaatatgtatttggttgctactttggttccagacatctctggctggtagtaggtagtttaatgaatggatgttgacggacaggtacatatcccagcttgtggcctgcggcgatgttagttaggcaagcatgctggctgcttttcaaggttgtacatttaataataaatataactggcttccctttcagatgcaatgcttggtgctagcaattaccacaaaatgagtgaattgatcaatataaagtgctattttctctggaagcttctctaaccaactctcgattgcctttccatctatgtgacttaacttgttgacaatcttgtcaaacacctgtgattgcaccattttaaaaatacattaatattaatttgaacagtggaaattatgttcctctaaacattagcccctaaaatagaacttcaattccagttgcaaataaagattcagatttttctttttaaagacaatcaggaacccagtacctagcaagtaattgtgtcaaaaactttagtgttttgttttgtttttttttaatttgggcagagagatctgtgtctaaaaaccgacagaaggaactttccctgcagctagttcttgcttcttctactggacttctctaaaagccacatccttctacagaatccgtctacacagaacaatatttgaaccaattcttgggtctcctgttggatgtcttcccatggtttgcccaggacactctagtgggtgtgaagatgtcatattatactggactgtgaagcgagaaggtgatatttaagccactaaagcttgtggcagccaccaaattttccaatgccttctgcaatcttgcatttaactggcttcaccgccattcccacccccacccagtgggaaaggctttaggagcatttggtcaggtgggggtgctgtcagggtttacggttcaccttcaaggaagccctgggtgcgctgactccggggtggggggcacctggcaaggtagcggggacccccgtaggcccggagaagctggggcagcctttgccacgtggacagcaaccgcgctgctgcaagttcccgggcgtgcccgtcgaaagcggccaggaggtcaactggggcggcttccctcagtgccttgggcaggggacccacctcggcagccgccccaccagggcccaggacgcagtggaagagcgtatggcgtcgcagcaggcagtccctaaggaactgcaccaactcctccaaacaccttcccaggtgctcctcgtcccagccttgcccaggggcccccttgcgcagcagcactgccagcagcactgtcttgagcacatatgaggataggatgcgtccccactgggtggcggccgc

SEQ ID NO: 25532 - protein, 47 aa, Homo sapiens
MSILVELLSQKMIEAGRGGSLTPVIPAWDYRREPPRPALKLYNPSNP

SEQ ID NO: 25533 - DNA, 1013 bp, Homo sapiens
agacagggtctcagtctgttgcccaggctggagtgcagtggcaagattgcagctcattgcagccttgacctcctgggctcaagcgatcctcctgcctcggcctcccaaagtgcagggattacaggtgtgagtgagccaccgcggccggcctctatcattttctgactcagcagctccaccaaaattgacatcctagcaaacactgtgaaggaattaacctaagtgcttccagagcatctcatgtaacctctatggagtaagtcactttttctgtaacatgtggcttttgaccttgatgaagactttgacttctcatccctgtctacatggaggaagatgattcagtggtggggaaaatgaacctcggtaacatttccaatgtccttcaagagggaaacaagttcagtgttatcatcgtggcattcgttagtttttttttttttaaatcacttgtttagatacaactttatttttttatacctacatagcacatgactggggggataaagcatgtataagttgggagagggtaaagaatgtgtgactatgtatacagaaaatagactaaaatgtgcagcaaaatgatatatactgtaatctggtttttgaagtatctactattctggaatattgttaaacaactttttgcttttgaaaaaaaaaggtgccttgattcagttgcgtgacttagaacattcatcctattttattgtgatttttaatgtcttctgaccccaaactgtgtttttggttgcagtctggcggctgcaggcatagcgtcggttttgttccaataacagagaccaaagagttaatcagatatggttcagctgctacaattgtatgattcaaaggcaatttaatcaccccaaatttccatggcccccacagtcaagacctgccattcgttttctcttgcaggttggagtaaatttgcactttgaatcatgtgggtcatttggggaccttgttcttttctattttgctttattaataaaggaacttgtagaaac

SEQ ID NO: 25534 - protein, 55 aa, Homo sapiens
MIQRQFNHPKFPWPPQSRPAIRFLLQVGVNLHFESCGSFGDLVLFYFALLIKELV

SEQ ID NO: 25535 - DNA, 847 bp, Homo sapiens
ggaggataaggctaaagacagaggctccagctaccttggtgacaaggaatggaggagaaaaggaacaggaaattttaataagattaggagggcttgcttttctgccaagtgagccgctttcacaggagcgataaattggaaatgttatctggcttgatatgccagtttttctgagaaaatcactctgccagtggtgacagaatggaagagctgaaaacatcttcttttttcaaagtcatatgtcacgaaccaaggagactccaaaaaataaattatggaagattatgaccactgctgccaaggatacagtgaaataggtacatcttgtatgcccagtaatgttgaaaattaatataaccttatttaaaaagcaatttggagatgttgaaagaaagcctgaagattaccaccatgcttcatgattctatccaggtgtcccacatatgagagccaattccaaagaaataactacaacttggaaaaaactatatgcataaagatgttcattatggtgttagctatagcagcaaaacaaaaaaaaaaaacacagaaaatgtttgcaagaattcccaaatagaaaattattaagtcagctatgacattttcccagtaggatattctgcagcacttaatatgaaagtcactaagtttacatggaaaaatacctgaagcataatcttaagttaaaataaatctaaatatacttatatgctatagttgcactttttaaaaaatatgacagacagcatgaaatatccagaataggcaaattcatagagaccaaaagacaggcatagtggttgccacaggctggaggaagaaaagaatgtggagtgactgctaatgc

SEQ ID NO: 25536 - protein, 52 aa, Homo sapiens
MILSRCPTYESQFQRNNYNLEKTICIKMFIMVLAIAAKQKKKTQKMFARIPK

SEQ ID NO: 25537 - DNA, 410 bp, Homo sapiens
caaggaatggaggagaaaaggaacaggaaattttaataagattaggagggcttgcttttctgccaagtgagccgctttcacaggagcgataaattggaaatgttatctggcttgatatgccagtttttctgagaaaatcactctgccagtggtgacagaatggaagagctgaaaacatcttcttttttcaaagtcatatgtcacgaaccaaggagactccaaaaaataaattatggaagattatgaccactgctgccaaggatacagtgaaataggctgcatttgtaaccaagccgtggtccttttcattgcatcttgccagaatgaagaagagctgatctctccagttcctgttattccccttacattgcccacatttattgctcaataaaccacagaaatccttctgt

SEQ ID NO: 25538 - protein, 52 aa, Homo sapiens
MEDYDHCCQGYSEIGCICNQAVVLFIASCQNEEELISPVPVIPLTLPTFIAQ

SEQ ID NO: 25539 - DNA, 292 bp, Homo sapiens
tgctgtgttcctgggaaacccaagcaaccagaagttcatccaattatttatttgcttcgagtcatccggatgtaaaagtatgcagctatcatatactggtgaagactccttccatgtaaacatccacatactctggggaaacctgctgccaaagtaggaggattccaaaggacctagaggaagaaaaagctacaatatggaagacacctgagtttctgaaggactgtgtggagcacttccttctgctgatgaacatgtgctatgaaaaataaacttattttgtttagcaact

SEQ ID NO: 25540 - DNA, 3863 bp, Homo sapiens
taaggaaagcaagacgtcttaaagtatattttcttgagatgagtatgtcccatcactaccatgaagtgtgctcacccttccagcctcctctgccctcacccccggagttaaagtgggtaagagttggtttgttctgcagtctttggttggagtgttgtgaaagtggacccgcggtgccactagatggcacttggtgcctagccatggtgaatgaccagggcgaagttagtctcacagaataccagggctagaagacatcgtggagcccatggagtcccaccctccttcccccttccaccctgcgcaaaaggggacggcccagtgtgcacgccgtccggccatgcccacagccacagccacagctgaggagtggccgggcaggcagcaggctccccagccagggcttgacacgcccacagtcaggggcctccacatgcctggcctggctctggaagtcacgtcttagcttctgaacaccgtagcgggttatgaggaagtttaatgaagagcccggtcactgtggccatcttgtgtccccaactgcaggagacgccctgatgtggagtttgtacagctttgccaaaaaatggttttctattctcaaaagtgacccaagccaataaatagcattagtagcttctgtggggggatcccagagcccctgtatttattttccctgtgtttgtctctagtgtcctcctaaacagcctttcctgtgagtctttctcagaattgatatcttaatattgtctgttctaggtgttgcccaaattcagtgtcagtgaagttcttttcctgggcaatcttaacatctttactcttattgtctggaccttcaaagggctttgtattttacacctgcgcccccaggctgctcacagtcggcttgctgcctgtcctgcctgtccggatcttgtctcctagtcctgaggagcggaggctgagaactcagtgctggtttgtaaatggtgaggggacttgggggcatcccagagtgctccctccaggcctgcttcttggttttgtttgatcactgcgttcttcaagggatgaatccagagccctccatgaggccaagcttgtccttcaatcatgtttcctctcagatgcgtccgtgatgcctcctaatgtggaactggttgtccattgtttgggcctatggccaagtcacccagctgtggaagcagaggtagaagacgaggccagccaggagggcgacttcagtcacagctcccatgcctcagctttgtacctgttttcaaaagcacaactgaggtgtgcgggctggagctgtcttgcagtgattctggccttctggctcatggttcagtccagcagcctggctgacccactatttctcctctgcttcagaggaaacccaggaaatgcccttactgccaggctgagtctccacccatgctggttggtgctggctaggctgagggggccaccacttttcctggctagaagctacttgacctttgatgtttgagttctgtaagtcttcgtgttctgacttactgcttcagagggattggcctgtcccctttccctttctcggctatgggaaggaaggattgctcattggttgccttcatcagttacagcatgagacggaattcatcattccttccgaaacccctgatatttaatatttaatatttaaaaacccaaattatcaaaccattaagaactcattactggttctcagcctcctccagtactagcctcagtgtggctgctgcataagtatctgtagcctgtctacctcctgcagtggggccgctcgcctcttccctgtctactgctcaggctctcccacttcgtggcatccatgtaaagtaggtggcagggcagagatgtcactctcattcaacagggaggatgtctgttgctcagagaggttgtcctgaggggctgggtgattcctgggcctacattcttcccgaggctccaggccgctgtctctggaagtaaaagagccttgtctgaccttaatgcaagcagtctgtttgaacccctgtaggctgcattcaggagacagaaggtgtctgggccatcctgggcggccggtcagcgttgctaggcaggctcggctgtctggccgggacttgggcctgggtggcttttgagaccagtgaagaagggagagccggcctcatgccgatgcggcttgtggcacggctgggatgtgagggaggactcagatctacacacagaaacccctcttctccccgccctcccccagctcctacctgcctcccacgcctcaggtgtggctgcctgtgggaccatcccccaacccctttcctcgcacctccttgtcctcacccagttcctgcagtgtctctgacccacgcctcccgcctcctggccgacttgcccaggaggtgtctctggctcacctccgtctgttcatcaccttcctccccagtgtttccacttatcttggatgttttagattgaaacagcctgattcccggaagaatcctcttcattcattgctagtgcttcccctcacctcccactctccacttcccagtttgcaaatgtggctttcgcccaccaagtgaaagcggactgagagcagcccttggggacggcccggtgcctggctgcaaggccgcgctggggctctgtcttggtgcacatggcttgaccggactttccctgcttcccaccacttccctcactcccagacctccctcattctttttgtctcttctttttgcctaaagccagtccttaacaccctattcttcctctgcaggtggcttgcagacttttccccacctttggggctcgtggtggtggagagggcagctggtgttaagaatgtaggttaccgggcatgacccggcagatgcttgcccagtagttctggaggaaggcccgggaatctgcaaatgagcgcattccccaggcagttcccatgcaggtgatccacggaccacatgttgagaaactgcagtcacccttagggccacaccgtccctctcctcgctgtcccctctctgtagtgactggccctgaccttcaggagtgcactttccactctaccaggaagccctatgacatcctcaggctccccagacctgcagcttgcatggggcccctcccttcttccacacccaccctccgtatggtcccctgctctgccctcgtgctttgctggcccctgcccgctactcccactctcagacacccaggggtggtgggccctaactggctggcccctcccagcgctgccctctgccgtccagatgctgcagtgtggccagatttaccttccagtaacatacttctagtcacccctcctcctgcgaagtgatctgcagtggctgtttgaccagaccacaaagttcacatctcctgagcttagtgtccgtggctgtccacctcccagccatacttgactgtccccaaactctccctgcagccacatgtttcccatgacctgtgggctctgcagatggacctctctccgctagagatgcccttctcccaaatggcttccctcctggaaggcccagcctgagtcctcgtctcctttccagtgcttctgccagaagcatccccatgatgttgtgaccgcacagcactttgtgtctcgctttgagcacttgccactctggctggtgctgctgccactgattgtgtactgtcttgctgccctttctagactgtgagctcctcgtgggcagggaccgcctgtgttctctgtatttcccacggcgcctagcacagtgccttgcacttgataggtgcttaataaatgtctgctcaactgaactggaggacagtgccttcttgactgcggcatctggcagcaggaccagtaagaggccgggaatccactgccc

SEQ ID NO: 25541 - protein, 132 aa, Homo sapiens; identical to SEQ ID NO: 5180

SEQ ID NO: 25542 - DNA, 1949 bp, Homo sapiens
tcacccagctgtggaagcagaggtagaagacgaggccagccaggagggcgacttcagtcacagctcccatgcctcagctttgtacctgttttcaaaagcacaactgaggtgtgcgggctggagctgtcttgcagtgattctggccttctggctcatggttcagtccagcagcctggctgacccactatttctcctctgcttcagaggaaacccaggaaatgcccttactgccaggctgagtctccacccatgctggttggtgctggctaggctgagggggccaccacttttcctggctagaagctacttgacctttgatgtttgagttctgtaagtcttcgtgttctgacttactgcttcagagggattggcctgtcccctttccctttctcggctatgggaaggaaggattgctcattggttgccttcatcagttacagcatgagacggaattcatcattccttccgaaacccctgatatttaatatttaatatttaaaaacccaaattatcaaaccattaagaactcattactggttctcagcctcctccagtactagcctcagtgtggctgctgcataagtatctgtagcctgtctacctcctgcagtggggccgctcgcctcttccctgtctactgctcaggctctcccacttcgtggcatccatgtaaagtaggtggcagggcagagatgtcactctcattcaacagggaggatgtctgttgctcagagaggttgtcctgaggggctgggtgattcctgggcctacattcttcccgaggctccaggccgtgtcttggtgcacatggcttgaccggactttccctgcttcccaccacttccctcactcccagacctccctcattctttttgtctcttctttttgcctaaagccagtccttaacaccctattcttcctctgcaggtggcttgcagacttttccccacctttggggctcgtggtggtggagagggcagctggtgttaagaatgtaggttaccgggcatgacccggcagatgcttgcccagtagttctggaggaaggcccgggaatctgcaaatgagcgcattccccaggcagttcccatgcaggtgatccacggaccacatgttgagaaactgcagtcacccttagggccacaccgtccctctcctcgctgtcccctctctgtagtgactggccctgaccttcaggagtgcactttccactctaccaggaagccctatgacatcctcaggctccccagacctgcagcttgcatggggcccctcccttcttccacacccaccctccgtatggtcccctgctctgccctcgtgctttgctggcccctgcccgctactcccactctcagacacccaggggtggtgggccctaactggctggcccctcccagcgctgccctctgccgtccagatgctgcagtgtggccagatttaccttccagtaacatacttctagtcacccctcctcctgcgaagtgatctgcagtggctgtttgaccagaccacaaagttcacatctcctgagcttagtgtccgtggctgtccacctcccagccatacttgactgtccccaaactctccctgcagccacatgtttcccatgacctgtgggctctgcagatggacctctctccgctagagatgcccttctcccaaatggcttccctcctggaaggcccagcctgagtcctcgtctcctttccagtgcttctgccagaagcatccccatgatgttgtgaccgcacagcactttgtgtctcgctttgagcacttgccactctggctggtgctgctgccactgattgtgtactgtcttgctgccctttctagactgtgagctcctcgtgggcagggaccgcctgtgttctctgtatttcccacggcgcctagcacagtgccttgcacttgataggtgcttaataaatgtctgctcaactgaa

SEQ ID NO: 25543 - protein, 32 aa, Homo sapiens
MSVAQRGCPEGLGDSWAYILPEAPGRVLVHMA

SEQ ID NO: 25544 - DNA, 3790 bp, Homo sapiens
taaggaaagcaagacgtcttaaagtatattttcttgagatgagtatgtcccatcactaccatgaagtgtgctcacccttccagcctcctctgccctcacccccggagttaaagtgggtaagagttggtttgttctgcagtctttggttggagtgttgtgaaagtggacccgcggtgccactagatggcacttggtgcctagccatggtgaatgaccagggcgaagttagtctcacagaataccagggctagaagacatcgtggagcccatggagtcccaccctccttcccccttccaccctgcgcaaaaggggacggcccagtgtgcacgccgtccggccatgcccacagccacagccacagctgaggagtggccgggcaggcagcaggctccccagccagggcttgacacgcccacagtcaggggcctccacatgcctggcctggctctggaagtcacgtcttagcttctgaacaccgtagcgggttatgaggaagtttaatgaagagcccggtcactgtggccatcttgtgtccccaactgcaggagacgccctgatgtggagtttgtacagctttgccaaaaaatggttttctattctcaaaagtgacccaagccaataaatagcattagtagcttctgtggggggatcccagagcccctgtatttattttccctgtgtttgtctctagtgtcctcctaaacagcctttcctgtgagtctttctcagaattgatatcttaatattgtctgttctaggtgttgcccaaattcagtgtcagtgaagttcttttcctgggcaatcttaacatctttactcttattgtctggaccttcaaagggctttgtattttacacctgcgcccccaggctgctcacagtcggcttgctgcctgtcctgcctgtccggatcttgtctcctagtcctgaggagcggaggctgagaactcagtgctggtttgtaaatggtgaggggacttgggggcatcccagagtgctccctccaggcctgcttcttggttttgtttgatcactgcgttcttcaagggatgaatccagagccctccatgaggccaagcttgtccttcaatcatgtttcctctcagatgcgtccgtgatgcctcctaatgtggaactggttgtccattgtttgggcctatggccaagtcacccagctgtggaagcagaggtagaagacgaggccagccaggagggcgacttcagtcacagctcccatgcctcagctttgtacctgttttcaaaagcacaactgaggtgtgcgggctggagctgtcttgcagtgattctggccttctggctcatggttcagtccagcagcctggctgacccactatttctcctctgcttcagaggaaacccaggaaatgcccttactgccaggctgagtctccacccatgctggttggtgctggctaggctgagggggccaccacttttcctggctagaagctacttgacctttgatgtttgagttctgtaagtcttcgtgttctgacttactgcttcagagggattggcctgtcccctttccctttctcggctatgggaaggaaggattgctcattggttgccttcatcagttacagcatgagacggaattcatcattccttccgaaacccctgatatttaatatttaatatttaaaaacccaaattatcaaaccattaagaactcattactggttctcagcctcctccagtactagcctcagtgtggctgctgcataagtatctgtagcctgtctacctcctgcagtggggccgctcgcctcttccctgtctactgctcaggctctcccacttcgtggcatccatgtaaagtaggtggcagggcagagatgtcactctcattcaacagggaggatgtctgttgctcagagaggttgtcctgaggggctgggtgattcctgggcctacattcttcccgaggctccaggccgctgtctctggaagtaaaagagccttgtctgaccttaatgcaagcagtctgtttgaacccctgtaggctgcattcaggagacagaaggtgtctgggccatcctgggcggccggtcagcgttgctaggcaggctcggctgtctggccgggacttgggcctgggtggcttttgagaccagtgaagaagggagagccggcctcatgccgatgcggcttgtggcacggctgggatgtgagggaggactcagatctacacacagaaacccctcttctccccgccctcccccagctcctacctgcctcccacgcctcaggtgtggctgcctgtgggaccatcccccaacccctttcctcgcacctccttgtcctcacccagttcctgcagtgtctctgacccacgcctcccgcctcctggccgacttgcccaggaggtgtctctggctcacctccgtctgttcatcaccttcctccccagtgtttccacttatcttggatgttttagattgaaacagcctgattcccggaagaatcctcttcattcattgctagtgcttcccctcacctcccactctccacttcccagtttgcaaatgtggctttcgcccaccaagtgaaagcggactgagagcagcccttggggacggcccggtgcctggctgcaaggccgcgctggggctctgtcttggtgcacatggcttgaccggactttccctgcttcccaccacttccctcactcccagacctccctcattctttttgtctcttctttttgcctaaagccagtccttaacaccctattcttcctctgcaggtggcttgcagacttttccccacctttggggctcgtggtggtggagagggcagctggtgttaagaatgtaggttaccgggcatgacccggcagatgcttgcccagtagttctggaggaaggcccgggaatctgcaaatgagcgcattccccaggcagttcccatgcaggtgatccacggaccacatgttgagaaactgcagtcacccttagggccacaccgtccctctcctcgctgtcccctctctgtagtgactggccctgaccttcaggagtgcactttccactctaccaggaagccctatgacatcctcaggctccccagacctgcagcttgcatggggcccctcccttcttccacacccaccctccgtatggtcccctgctctgccctcgtgctttgctggcccctgcccgctactcccactctcagacacccaggggtggtgggccctaactggctggcccctcccagcgctgccctctgccgtccagatgctgcagtgtggccagatttaccttccagtaacatacttctagtcacccctcctcctgcgaagtgatctgcagtggctgtttgaccagaccacaaagttcacatctcctgagcttagtgtccgtggctgtccacctcccagccatacttgactgtccccaaactctccctgcagccacatgtttcccatgacctgtgggctctgcagatggacctctctccgctagagatgcccttctcccaaatggcttccctcctggaaggcccagcctgagtcctcgtctcctttccagtgcttctgccagaagcatccccatgatgttgtgaccgcacagcactttgtgtctcgctttgagcacttgccactctggctggtgctgctgccactgattgtgtactgtcttgctgccctttctagactgtgagctcctcgtgggcagggaccgcctgtgttctctgtatttcccacggcgcctagcacagtgccttgcacttgataggtgcttaataaatgtctgctcaactg

SEQ ID NO: 25545 - protein, 132 aa, Homo sapiens; identical to SEQ ID NO: 5180

SEQ ID NO: 25546 - DNA, 1804 bp, Homo sapiens
gacagtctttaaatcttatttttcaaagttatattgaaagttatattagaagaagaagcggcttcctaagcccagtacaaatctgcaagtcttaatgagaaatttgagggccagctgataaaacgttctgactattgtttttgtgtccaaaacagaaattaaaagggtttgacttgggtgttttccccgcttttaggcagttgagcagtcttaggatttgtaggctgacctgaccgttgctttggcatcaggtggctgctttgggatccttacgcaggccctgggcagtgaggaccctgtctctcagcctcatggtgttctgtgttgtaggctgctgcagtacacgttcgtgggggacatatttatggttcccgatgatcctctgggaagaagtggacctcgattagaggagtttcttcagaaggaagtctgtcttagagatatgcagcccctactcagtgccctgccaaatgtgggcatgtttgaccccagcttcagagtccctggcacccaggcagccagcaccagccaccagcctccgacccggattcagggagccccttcaagccactggctccctcagcagccccacttcccactgctgccagccctccccagtctccagcagaacctgcccatgccagctcagagatcttctgcagaaaccaacgagctgagggaagcccttctgaagatcttccctgactcagagcaaagactgaaaatagaccagatcttggtggcccacccatacatgaaagatctaaatgcgctttctgccatggtgttggattgaagattgtgctgagcgctgagcttgcgctcagggctggctgatcaaactcaagctcacacctgtacctgatgggaatgaacataatgtgaagaaacttatttcccagtgtaaacgcagttgtacagaaaaaaaatgttttgggtataaatctgggttttcaaaaccagcttttttctatatataaattatgctgctattacagatttaacattttctgttaaaggaaagtctacattttctgcctgttcagaactgtttaatagcagttactcttgagtgtatttacctttttatgttttttaaactattttccttaaagccgaaaatattgacaaatggatatggttagcctttataaataaataaaaaaaaaagtgttgctttcttaaggaaagcaagacgtcttaaagtatattttcttgagatgagtatgtcccatcactaccatgaagtgtgctcacccttccagcctcctctgccctcacccccggagttaaagtgggtaagagttggtttgttctgcagtctttggttggagtgttgtgaaagtggacccgcggtgccactagatggcacttggtgcctagccatggtgaatgaccagggcgaagttagtctcacagaataccagggctagaagacatcgtggagcccatggagtcccaccctccttcccccttccaccctgcgcaaaaggggacggcccagtgtgcacgccgtccggccatgcccacagccacagccacagctgaggagtggccgggcaggcagcaggctccccagccagggcttgacacgcccacagtcaggggcctccacatgcctggcctggctctggaagtcacgtcttagcttctgaacaccgtagcgggttatgaggaagtttaatgaagagcccggtcactgtggccatcttgtgtccccaactgcaggagacgccctgatgtggagtttgtacagctttgccaaaaaatggttttctattctcaaaagtgacccaagccaata

SEQ ID NO: 25547 - protein, 143 aa, Homo sapiens [sequence omitted]

SEQ ID NO: 25548 - DNA, 3936 bp, Homo sapiens
ggcccggcccgcggcggcggcaaaggggcggaggggttcgctgccagcaattgccaagctgctgcggtcgtggcgggatggtatagccgggcctgagggcgggcggcggggcgcgggcgggggcgaggcggccgggaagggccgacgccgcctgactggcttgggagcagcggcagcaagctgagggggcgtcgccgccgccggcccccggcgccgccgcgggaggccgcgcccgccatggcggcccgggcggtgctggacgagttcactgcgccagctgagaaggcggagctgctggagcagagccgcggccgtatcgagggcctgtttggcgtgagcctagccgtgctcggcgcgctaggggctgaggagccgctgcccgcgcgcatctggctgcagctctgcggggcgcaggaggcggtgcacagcgccaaggaatatattaaaggaatctgtgaacctgaactagaagaaagagaatgttaccccaaggacatgcactgcatttttgttggggcagagagcctgtttctgaaaagcttgattcaggatacttgtgctgacctctgcattctggacattggccttcttggcatcagaggaagtgctgaggctgtggtcatggctaggagtcacattcaacaatttgtaaagctctttgaaaataaagagaacctacccagtagtcagaaagaatcagaggtgaaaagggaattcaaacaatttgttgaagcccatgcagacaattacacaatggatttgttgattttgcccacttccttgaaaaaagaacttttgacactcacacaaggtgaggagaatctctttgaaacaggagatgatgaggttattgaaatgagagattctcaacaaacagagtttacacagaatgctgccacagggctgaatatttctagagatgaaactgttttgcaggaagaggcaagaaataaagctgggactcctgtttctgagcttacaaaacaaatggacacagtcctttctagctcaccagatgtgctttttgatccaataaatggtctaaccccagatgaagaggcactttccaatgagagaatttgtcagaaaaggagattttctgattctgaagaaaggcatacgaagaagcagttttctttggaaaatgttcaggagggggagattttacacgatgctaagacattggctggaaatgtaatagctgacctatctgattcttctgctgattctgaaaatttaagtccagatataaaagaaactactgaggaaatggaatacaacatcctcgtaaacttttttaaaaccatgggctactcccaagaaattgttgaaaaggtcattaaggtgtatggaccatctactgaaccattattgctcttagaggaaattgaaaaagaaaataaaagattccaagaagacagagaattttcagctggtacagtgtatccagagaccaacaaaaccaaaaataaaggtgtttatagcagcacaaatgagcttacaactgattccactccaaagaaaacacaggctcacacacagcaaaatatggtagaaaaattttctcagttaccattcaaagtggaagctaaaccatgtacctcaaattgtagaattaatactttcagaacagtgccaatagaacagaaacatgaagtctggggttcaaaccagaactacatttgtaacacagaccctgaaactgatggcctttcaccttctgttgcctctccaagtcccaaagaagtcaattttgtttcaaggggagcttcaagtcaccagcccagagttccactttttcctgaaaatggtttacaccagcagccagaacccttgcttccaaataatatgaaatctgcctgtgaaaaacgtttaggatgttgtagttctcctcattctaagccaaattgctcaaccctttctccaccaatgccactgccccagctgttaccttcggttactgatgcaaggtcggcaggaccttctgatcatattgattcctcagttactggggttcaaaggtttcgagatactctaaaaataccctacaagctggaattaaaaaatgaaccagggagaacggatttgaaacacattgttatagatgggagcaatgttgcaattacccatggtctgaaaaagttcttttcttgtcgtggaattgcaattgcagttgaatatttttggaagcttggcaacagaaacatcactgtatttgtccctcagtggagaacaaggcgtgatcctaatgtcacagaacagcacttcttaacccagctccaggagctcggaatattatctttaactcctgcccggatggtctttggagaaagaattgcttctcatgatgacaggtttctactacacttagcggacaaaactggtggcataattgtgacaaatgataatttcagagaatttgtgaatgagtcagtctcttggagagaaattattacaaaaaggctgctgcagtacacgttcgtgggggacatatttatggttcccgatgatcctctgggaagaagtggacctcgattagaggagtttcttcagaaggaagtctgtcttagagatatgcagcccctactcagtgccctgccaaatgtgggcatgtttgaccccagcttcagagtccctggcacccaggcagccagcaccagccaccagcctccgacccggattcagggagccccttcaagccactggctccctcagcagccccacttcccactgctgccagccctccccagtctccagcagaacctgcccatgccagctcagagatcttctgcagaaaccaacgagctgagggaagcccttctgaagatcttccctgactcagagcaaagactgaaaatagaccagatcttggtggcccacccatacatgaaagatctaaatgcgctttctgccatggtgttggattgaagattgtgctgagcgctgagcttgcgctcagggctggctgatcaaactcaagctcacacctgtacctgatgggaatgaacataatgtgaagaaacttatttcccagtgtaaacgcagttgtacagaaaaaaaatgttttgggtataaatctgggttttcaaaaccagcttttttctatatataaattatgctgctattacagatttaacattttctgttaaaggaaagtctacattttctgcctgttcagaactgtttaatagcagttactcttgagtgtatttacctttttatgttttttaaactattttccttaaagccgaaaatattgacaaatggatatggttagcctttataaataaataaaaaaaaaagtgttgctttcttaaggaaagcaagacgtcttaaagtatattttcttgagatgagtatgtcccatcactaccatgaagtgtgctcacccttccagcctcctctgccctcacccccggagttaaagtgggtaagagttggtttgttctgcagtctttggttggagtgttgtgaaagtggacccgcggtgccactagatggcacttggtgcctagccatggtgaatgaccagggcgaagttagtctcacagaataccagggctagaagacatcgtggagcccatggagtcccaccctccttcccccttccaccctgcgcaaaaggggacggcccagtgtgcacgccgtccggccatgcccacagccacagccacagctgaggagtggccgggcaggcagcaggctccccagccagggcttgacacgcccacagtcaggggcctccacatgcctggcctggctctggaagtcacgtcttagcttctgaacaccgtagcgggttatgaggaagtttaatgaagagcccggtcactgtggccatcttgtgtccccaactgcaggagacgccctgatgtggagtttgtacagctttgccaaaaaatggttttctattctcaaaagtgacccaagccaata

SEQ ID NO: 25549 - protein, 896 aa, Homo sapiens; identical to SEQ ID NO: 3391

SEQ ID NO: 25550 - DNA, 1218 bp, Homo sapiens
gacagtctttaaatcttatttttcaaagttatattgaaagttatattagaagaagaagcggcttcctaagcccagtacaaatctgcaagtcttaatgagaaatttgagggccagctgataaaacgttctgactattgtttttgtgtccaaaacagaaattaaaagggtttgacttgggtgttttccccgcttttaggcagttgagcagtcttaggatttgtaggctgacctgaccgttgctttggcatcaggtggctgctttgggatccttacgcaggccctgggcagtgaggaccctgtctctcagcctcatggtgttctgtgttgtaggctgctgcagtacacgttcgtgggggacatatttatggttcccgatgatcctctgggaagaagtggacctcgattagaggagtttcttcagaaggaagtctgtcttagagatatgcagcccctactcagtgccctgccaaatgtgggcatgtttgaccccagcttcagagtccctggcacccaggcagccagcaccagccaccagcctccgacccggattcagggagccccttcaagccactggctccctcagcagccccacttcccactgctgccagccctccccagtctccagcagaacctgcccatgccagctcagagatcttctgcagaaaccaacgagctgagggaagcccttctgaagatcttccctgactcagagcaaagactgaaaatagaccagatcttggtggcccacccatacatgaaagatctaaatgcgctttctgccatggtgttggattgaagattgtgctgagcgctgagcttgcgctcagggctggctgatcaaactcaagctcacacctgtacctgatgggaatgaacataatgtgaagaaacttatttcccagtgtaaacgcagttgtacagaaaaaaaatgttttgggtataaatctgggttttcaaaaccagcttttttctatatataaattatgctgctattacagatttaacattttctgttaaaggaaagtctacattttctgcctgttcagaactgtttaatagcagttactcttgagtgtatttacctttttatgttttttaaactattttccttaaagccgaaaatattgacaaatggatatggttagcctttataaataaataaaaaaaaaagtgttgctttcttaaggaaagcaagacgtcttaaagtatattttcttg

SEQ ID NO: 25551 - protein, 143 aa, Homo sapiens [sequence omitted]

SEQ ID NO: 25552 - DNA, 3350 bp, Homo sapiens
ggcccggcccgcggcggcggcaaaggggcggaggggttcgctgccagcaattgccaagctgctgcggtcgtggcgggatggtatagccgggcctgagggcgggcggcggggcgcgggcgggggcgaggcggccgggaagggccgacgccgcctgactggcttgggagcagcggcagcaagctgagggggcgtcgccgccgccggcccccggcgccgccgcgggaggccgcgcccgccatggcggcccgggcggtgctggacgagttcactgcgccagctgagaaggcggagctgctggagcagagccgcggccgtatcgagggcctgtttggcgtgagcctagccgtgctcggcgcgctaggggctgaggagccgctgcccgcgcgcatctggctgcagctctgcggggcgcaggaggcggtgcacagcgccaaggaatatattaaaggaatctgtgaacctgaactagaagaaagagaatgttaccccaaggacatgcactgcatttttgttggggcagagagcctgtttctgaaaagcttgattcaggatacttgtgctgacctctgcattctggacattggccttcttggcatcagaggaagtgctgaggctgtggtcatggctaggagtcacattcaacaatttgtaaagctctttgaaaataaagagaacctacccagtagtcagaaagaatcagaggtgaaaagggaattcaaacaatttgttgaagcccatgcagacaattacacaatggatttgttgattttgcccacttccttgaaaaaagaacttttgacactcacacaaggtgaggagaatctctttgaaacaggagatgatgaggttattgaaatgagagattctcaacaaacagagtttacacagaatgctgccacagggctgaatatttctagagatgaaactgttttgcaggaagaggcaagaaataaagctgggactcctgtttctgagcttacaaaacaaatggacacagtcctttctagctcaccagatgtgctttttgatccaataaatggtctaaccccagatgaagaggcactttccaatgagagaatttgtcagaaaaggagattttctgattctgaagaaaggcatacgaagaagcagttttctttggaaaatgttcaggagggggagattttacacgatgctaagacattggctggaaatgtaatagctgacctatctgattcttctgctgattctgaaaatttaagtccagatataaaagaaactactgaggaaatggaatacaacatcctcgtaaacttttttaaaaccatgggctactcccaagaaattgttgaaaaggtcattaaggtgtatggaccatctactgaaccattattgctcttagaggaaattgaaaaagaaaataaaagattccaagaagacagagaattttcagctggtacagtgtatccagagaccaacaaaaccaaaaataaaggtgtttatagcagcacaaatgagcttacaactgattccactccaaagaaaacacaggctcacacacagcaaaatatggtagaaaaattttctcagttaccattcaaagtggaagctaaaccatgtacctcaaattgtagaattaatactttcagaacagtgccaatagaacagaaacatgaagtctggggttcaaaccagaactacatttgtaacacagaccctgaaactgatggcctttcaccttctgttgcctctccaagtcccaaagaagtcaattttgtttcaaggggagcttcaagtcaccagcccagagttccactttttcctgaaaatggtttacaccagcagccagaacccttgcttccaaataatatgaaatctgcctgtgaaaaacgtttaggatgttgtagttctcctcattctaagccaaattgctcaaccctttctccaccaatgccactgccccagctgttaccttcggttactgatgcaaggtcggcaggaccttctgatcatattgattcctcagttactggggttcaaaggtttcgagatactctaaaaataccctacaagctggaattaaaaaatgaaccagggagaacggatttgaaacacattgttatagatgggagcaatgttgcaattacccatggtctgaaaaagttcttttcttgtcgtggaattgcaattgcagttgaatatttttggaagcttggcaacagaaacatcactgtatttgtccctcagtggagaacaaggcgtgatcctaatgtcacagaacagcacttcttaacccagctccaggagctcggaatattatctttaactcctgcccggatggtctttggagaaagaattgcttctcatgatgacaggtttctactacacttagcggacaaaactggtggcataattgtgacaaatgataatttcagagaatttgtgaatgagtcagtctcttggagagaaattattacaaaaaggctgctgcagtacacgttcgtgggggacatatttatggttcccgatgatcctctgggaagaagtggacctcgattagaggagtttcttcagaaggaagtctgtcttagagatatgcagcccctactcagtgccctgccaaatgtgggcatgtttgaccccagcttcagagtccctggcacccaggcagccagcaccagccaccagcctccgacccggattcagggagccccttcaagccactggctccctcagcagccccacttcccactgctgccagccctccccagtctccagcagaacctgcccatgccagctcagagatcttctgcagaaaccaacgagctgagggaagcccttctgaagatcttccctgactcagagcaaagactgaaaatagaccagatcttggtggcccacccatacatgaaagatctaaatgcgctttctgccatggtgttggattgaagattgtgctgagcgctgagcttgcgctcagggctggctgatcaaactcaagctcacacctgtacctgatgggaatgaacataatgtgaagaaacttatttcccagtgtaaacgcagttgtacagaaaaaaaatgttttgggtataaatctgggttttcaaaaccagcttttttctatatataaattatgctgctattacagatttaacattttctgttaaaggaaagtctacattttctgcctgttcagaactgtttaatagcagttactcttgagtgtatttacctttttatgttttttaaactattttccttaaagccgaaaatattgacaaatggatatggttagcctttataaataaataaaaaaaaaagtgttgctttcttaaggaaagcaagacgtcttaaagtatattttcttg

SEQ ID NO: 25553 - protein, 896 aa, Homo sapiens; identical to SEQ ID NO: 3391

SEQ ID NO: 25554 - DNA, 3267 bp, Homo sapiens
gggcggaggggttcgctgccagcaattgccaagctgctgcggtcgtggcgggatggtatagccgggcctgagggcgggcggcggggcgcgggcgggggcgaggcggccgggaagggccgacgccgcctgactggcttgggagcagcggcagcaagctgagggggcgtcgccgccgccggcccccggcgccgccgcgggaggccgcgcccgccatggcggcccgggcggtgctggacgagttcactgcgccagctgagaaggcggagctgctggagcagagccgcggccgtatcgagggcctgtttggcgtgagcctagccgtgctcggcgcgctaggggctgaggagccgctgcccgcgcgcatctggctgcagctctgcggggcgcaggaggcggtgcacagcgccaaggaatatattaaaggaatctgtgaacctgaactagaagaaagagaatgttaccccaaggacatgcactgcatttttgttggggcagagagcctgtttctgaaaagcttgattcaggatacttgtgctgacctctgcattctggacattggccttcttggcatcagaggaagtgctgaggctgtggtcatggctaggagtcacattcaacaatttgtaaagctctttgaaaataaagagaacctacccagtagtcagaaagaatcagaggtgaaaagggaattcaaacaatttgttgaagcccatgcagacaattacacaatggatttgttgattttgcccacttccttgaaaaaagaacttttgacactcacacaaggtgaggagaatctctttgaaacaggagatgatgaggttattgaaatgagagattctcaacaaacagagtttacacagaatgctgccacagggctgaatatttctagagatgaaactgttttgcaggaagaggcaagaaataaagctgggactcctgtttctgagcttacaaaacaaatggacacagtcctttctagctcaccagatgtgctttttgatccaataaatggtctaaccccagatgaagaggcactttccaatgagagaatttgtcagaaaaggagattttctgattctgaagaaaggcatacgaagaagcagttttctttggaaaatgttcaggagggggagattttacacgatgctaagacattggctggaaatgtaatagctgacctatctgattcttctgctgattctgaaaatttaagtccagatataaaagaaactactgaggaaatggaatacaacatcctcgtaaacttttttaaaaccatgggctactcccaagaaattgttgaaaaggtcattaaggtgtatggaccatctactgaaccattattgctcttagaggaaattgaaaaagaaaataaaagattccaagaagacagagaattttcagctggtacagtgtatccagagaccaacaaaaccaaaaataaaggtgtttatagcagcacaaatgagcttacaactgattccactccaaagaaaacacaggctcacacacagcaaaatatggtagaaaaattttctcagttaccattcaaagtggaagctaaaccatgtacctcaaattgtagaattaatactttcagaacagtgccaatagaacagaaacatgaagtctggggttcaaaccagaactacatttgtaacacagaccctgaaactgatggcctttcaccttctgttgcctctccaagtcccaaagaagtcaattttgtttcaaggggagcttcaagtcaccagcccagagttccactttttcctgaaaatggtttacaccagcagccagaacccttgcttccaaataatatgaaatctgcctgtgaaaaacgtttaggatgttgtagttctcctcattctaagccaaattgctcaaccctttctccaccaatgccactgccccagctgttaccttcggttactgatgcaaggtcggcaggaccttctgatcatattgattcctcagttactggggttcaaaggtttcgagatactctaaaaataccctacaagctggaattaaaaaatgaaccagggagaacggatttgaaacacattgttatagatgggagcaatgttgcaattacccatggtctgaaaaagttcttttcttgtcgtggaattgcaattgcagttgaatatttttggaagcttggcaacagaaacatcactgtatttgtccctcagtggagaacaaggcgtgatcctaatgtcacagaacagcacttcttaacccagctccaggagctcggaatattatctttaactcctgcccggatggtctttggagaaagaattgcttctcatgatgacaggtttctactacacttagcggacaaaactggtggcataattgtgacaaatgataatttcagagaatttgtgaatgagtcagtctcttggagagaaattattacaaaaaggctgctgcagtacacgttcgtgggggacatatttatggttcccgatgatcctctgggaagaagtggacctcgattagaggagtttcttcagaaggaagtctgtcttagagatatgcagcccctactcagtgccctgccaaatgtgggcatgtttgaccccagcttcagagtccctggcacccaggcagccagcaccagccaccagcctccgacccggattcagggagccccttcaagccactggctccctcagcagccccacttcccactgctgccagccctccccagtctccagcagaacctgcccatgccagctcagagatcttctgcagaaaccaacgagctgagggaagcccttctgaagatcttccctgactcagagcaaagactgaaaatagaccagatcttggtggcccacccatacatgaaagatctaaatgcgctttctgccatggtgttggattgaagattgtgctgagcgctgagcttgcgctcagggctggctgatcaaactcaagctcacacctgtacctgatgggaatgaacataatgtgaagaaacttatttcccagtgtaaacgcagttgtacagaaaaaaaatgttttgggtataaatctgggttttcaaaaccagcttttttctatatataaattatgctgctattacagatttaacattttctgttaaaggaaagtctacattttctgcctgttcagaactgtttaatagcagttactcttgagtgtatttacctttttatgttttttaaactattttccttaaagccgaaaatattgacaaatggatatggttagcctttataaataaat

SEQ ID NO: 25555 - protein, 896 aa, Homo sapiens; identical to SEQ ID NO: 3391

SEQ ID NO: 25556 - DNA, 438 bp, Homo sapiens
atgcctcatcacaggatgcctggataaggcaaatgccaacccaaattaagttcagcagggtgaagtaaagttcatgaatccagaagatggactgacaaaacctttccaaccagttggttcccattcccctccaccatccgaccctaaggctacagatcaactatatacaacatcatagaaagtgggtctacaacaaaggatgacagtccgagagtcttgcagaagagactatgccagacactcttgactactgatacctcaagaaactgactcatggacacaaactttggagtataagcgacatcccttaagcaacaggctagactacaccaaaggattcagtcgagatttctgggaccctttgtgaagcagacaacccaagatctagtggaacacaatgtaatgactgaatgaattaatgaaagaaatctaactcta

SEQ ID NO: 25557 - protein, 34 aa, Homo sapiens
MNPEDGLTKPFQPVGSHSPPPSDPKATDQLYTTS

SEQ ID NO: 25558 - DNA, 727 bp, Homo sapiens
atgaggtctccccatagcctttttggcctgtctacgccggggccacccgcagcacgcagagcttctgggagccggtggcaaggccgaattgggatgcaaaccaaatggacgtgggtgactggcagaaaacgcctcccacaaatgggagggatttcggagggaaccgaaagaaagttggaaaccaagttacagctgaagccagggccttctcctacccgactcccgcggcccattaaaacctacgtgagcttatctgataccttcaagccctgttttgtggccccatctcctcttcagatggcaatgtgcctagctacactacatttcctgcctcccttgcagctagaggtggccaatgagatataaacagatgctgtaagacatgatgtctagatccctagcagtcatcccagaccatgagataactttgagaaggaacaccatgtacaaaggactgtgcagaagagggttggcaggagcctggatctctgatgacttcacccttgactgcccacctcaccaggctgtacaagccactgttactggcagatgaatgcaagttctaaaacatacaactactgacctactgaattttccaaggagcacatttccactggagacatttggtgcctgcagaaaatacttactgaggaatttctatgggaccagcctgaagtagaagccactgaagagaggccctgaagcagcttttcttccttatcccaga

SEQ ID NO: 25559 - protein, 121 aa, Homo sapiens
MRSPHSLFGLSTPGPPAARRASGSRWQGRIGMQTKWTWVTGRKRLPQMGGISEGTERKLETKLQLKPGPSPTRLPRPIKTYVSLSDTFKPCFVAPSPLQMAMCLATLHFLPPLQLEVANEI

SEQ ID NO: 25560 - DNA, 674 bp, Homo sapiens
gccggggccacccgcagcacgcagagcttctgggagccggtggcaaggccgaattgggatgcaaaccaaatggacgtgggtgactggcagaaaacgcctcccacaaatgggagggatttcggagggaaccgaaagaaagttgtaggcaatttgtgcgagcaaggggctcttctccacacagacactcagggaccacagtctccaccatcttatagaggcacttccttgaacatgtggtcctctcagcgcctgcagcagaagagagcactggagagtgcctgtccttggaattagttcttcttccctaattagagtgaactactacagccaccccaaccttgagcaaccatcactctgatcaatcagcagccatcaacattgagacaagactctccaccagcaaaaagattatgacttgtccgggtgcggtggctcacacctgtaatcccagcactttgggaggctgaggcagacagatcatctgaggtcaggagttcgagaccagcctgaccaacattgtgaaacctgtctctactaaaaatacaaaaaattagccgggcatggtggtaggcacctataatctcagctatttgtaaggctgaagcaggagaattgcttgaacctgggaggtggaggttgcagtgagccgagatcacatcattgcactccagcct

SEQ ID NO: 25561 - protein, 74 aa, Homo sapiens
MDVGDWQKTPPTNGRDFGGNRKKVVGNLCEQGALLHTDTQGPQSPPSYRGTSLNMWSSQRLQQKRALESACPWN

SEQ ID NO: 25562 - DNA, 538 bp, Homo sapiens
acacataacagatccagctcagactcctgtgctccttgataggcacatttcctcctggtcagcagatctttctgggaggtgcagccaggtggaccatcctcatggccggtggcatcccctgagcctccagctgtactctaagcctgattcttccaaccatggccctcatattgaattcaccatcctctctcatcctgcatttaagccctgcaacgggctagcttgtgtcttcccaaaatctatatgtggaagtcctaacacccagtacctcaaaatgggactgtgtttggacacagggcctttaaggaggtgatcaaggcaaatgaggtcatatgggtgagccctaatacgatatgactgctgttcccataagaagagattaggacgccgacaagcacagaggaaagaccacatgaggacgtggggagaagacggcatctacaagccaaggagagaggcctcagaagaaactggtcctgctgattttggccttccagcccccagaactggaggaaaataaatttctgttgcttaagtc

SEQ ID NO: 25563 - protein, 35 aa, Homo sapiens [sequence omitted]

SEQ ID NO: 25564 - DNA, 478 bp, Homo sapiens
ggcgaagccgcgctcggtgaaagttgaagagggggaggcctcagacttctcgctggcctgggattcctccgtgacagcagcaggaggcctagaaggagagccagagtgcgatcagaaaaccagccgtgcgctggaagacaggaacagcgtgacaagtcaagaggagagaaatgaggatgatgaagacatggaggatgaatcaatttacacctgcgatcactgtcagcaggacttcgagtctctggcagacctgacggaccaccgggcccaccgctgtcctggaggtaatgcaaaacagccccaggactctgacaggtggttacacgggtaattggacatagcaacagcttgaagcctcaagtgagattaaagaattaataatgtaattttacagttaatgtcattttattgtggtgtcttgggtaccctgtatccgccttttaaatacaattaaaaataaaagcaacagctttccggc

SEQ ID NO: 25565 - protein, 47 aa, Homo sapiens
MEDESIYTCDHCQQDFESLADLTDHRAHRCPGGNAKQPQDSDRWLHG

SEQ ID NO: 25566 - DNA, 768 bp, Homo sapiens
ccctggcccatggaggcagctagcggggccggcgacttggcaccggcctggggatcggctgcgcgcctcgcgctgagcaccgcagcccgagggcaggcagcggcggcccggcgcacgggctgagcgatgcccggggcacgggcgcgcctgccggccgccgcctgagcgcccccgcgcgccccttcctcctccggggggccggctggcctccggactccccgcgccgctgggaccgccgcttggatcgggagccccggactgccgcattgcaacaggcagggccccggcgcgccccccgggcctccccccgccttcgagcggcctcggccggcccgggctgcccccccaagggaggccgccccggacctgcggtccgctccccacagccgccaaccgggctgcaaaaaaaaaagtttccaagagacaggcggaggagaagggggagaagggctgcccggagcggcggggggcggcggggggagccggctgcggagggcgacggagcgcccggagccccggacatgtccaggcggaagcaggcgaagccgcgctcggtgaaaggtggcctagaaggagagccagagtgcgatcagaaaaccagccgtgcgctggaagacaggaacagcgtgacaagtcaagaggagagaaatgaggatgatgaagacatggaggatgaatcaatttacacctgcgatcactgtcagcaggacttcgagtctctggcagacctgacggaccaccgggcccaccgctgtcctggaggtaatg

SEQ ID NO: 25567 - protein, 81 aa, Homo sapiens
MSRRKQAKPRSVKGGLEGEPECDQKTSRALEDRNSVTSQEERNEDDEDMEDESIYTCDHCQQDFESLADLTDHRAHRCPGG

SEQ ID NO: 25568 - DNA, 2085 bp, Homo sapiens
gatgtaccttttctggtgggactgccaaacccttaggacgtcatcctcgaactgggatcgggtagggaacaacctaagggagaggatggtgaacctgcctgagagtgaagacacagaggacagcgcaggcaaggagcaggttcctgatatgattgtctgaggccctgggtcctggtgctggaaggcagccgcaccctggcattttcagatactagaaccagcgaccccctttcatactgaatcctgtttgactgggtgtttatcacttgactgacatcctctaagaattgtgcagtgggccgtgtgcagccagccacctccttccggaaagacaaactctcaactctgtcagaaaatgggctgtgtctgtgcctctctctctttcctagaacctgaggacctccctcctgactccccacacctggggctgacctgcacgccctccgagccacattacctgcgcagccttgcctggcgatcgtgctgagcagcacctacctggtcactgaagggaggctggcctggcaatggaccgcaagattcaaggtggagaatgtccctcgtttccatcctgtttctgtgacttgtatatgacagtatttagggaaggtgaaaggcatacctttgtggctcctgtcctgataaggtgggcaaccaattgccacagtcagggttggggaggggcacagggaggtggtggagccctgcaccttcaccccattacctgtgctggagttcctgccatcggaggcttcctgagaatttccagccaccagaagggggcagacggtgacttctgaagctgggacacaatgggtctgtgaggaggcaggcaagagggggtggaggcgccaggctgaaaccaccacctccaccaccttgggacaagctgggcccccatcagctgggcttggctctccggaagcttcaggtgtgggctagctcagaggatcccaggcccactgcttgtctagtcaggtcaccagattggggagggcttgacaggctagggggctggcagtctgccttaggagcaggggctggggctggttttgaagctgaagaacaggcacattgtctttacctggaccatacatttaactagggggttggagggggctggtggagatttgaggtgggtttaagttttctgaagccagccaggtgcagtggctcacacctgtaatcccagcactttgggaggctgaggtggaaggatcgcttgagcccaggagtttgagaccagcctgggcaacacagggagactctgtctctacaacaacaaaaacgttcccctaagccaccccttggcttggccactgctcagggaagtccttccagcctcagaaacccccagagctgccgaatcgtcccgcatggaagacagacacagatgcaagtgtctaaatgcctttgtgcatcctggttccaggtgggaggcgctgggagatgggggcctctcacttagaaactgcctcccctcccaaacctggacacatggcccactgctacacaccaccaccaccagtgttggctgtcgcaggacgccgagggcctgtggtatgtctggagcttcctcgtggacaggcctttcagcagtgtgccatgatgggcccagtccctgttgaaattgagtcctttgtggatttcctaagctacaaagcaaccccagccctgggatatctcaaagagaatttttaaatgacatgagctggacatgcaaccacaaggtgtctgcccagattaaggcgaactccagcatgggcctttgaagggcactcgatttcccagggtgaagatggatttccacaacagaattcacaaaagcctccccagcccacactcgtccactgggacagggctcactgtccctgggggctgcggggaaggttccaggatagcaggtatttttcacatcccaccatacactgctgcccaggcagtggtaccagcaccagagtccccggacctgtgtctgccctaagtgtcctgcctccatgctgtcccttctcagcacaagacccactgtgtgtctagccccccaccccactggttacatatccatggctcctgcagcctcagagc

SEQ ID NO: 25569 - protein, 97 aa, Homo sapiens
MPLCILVPGGRRWEMGASHLETASPPKPGHMAHCYTPPPPVLAVAGRRGPVVCLELPRGQAFQQCAMMGPVPVEIESFVDFLSYKATPALGYLKENF

SEQ ID NO: 25570 - DNA, 2090 bp, Homo sapiens
gagttggcgctgcgggccgggcgggggccgcggaagctgcgatgcggacagggcagcggcggtgacccgagctgccgcccgacatgaactcgctggagcaggcggaagatctcaaggcttttgagaggagacttactgaatatattcattgtttgcaacctgctactggacgctggagaatgcttcttatagtggtatctgtctgtacagctactggtgcctggaactggttaatagaccctgagacacaaaaggtgtccttcttcacatcattatggaatcacccatttttcaccattagctgtatcactctaataggcttgttctttgctggaatacacaagagagtagttgcaccatcaattatagctgctcgatgtcgaacggtattagcagaatacaatatgtcttgtgatgatacaggaaaactaattttgaaacctaggcctcatgttcaatgacaatcttcactcattgttatgggacttaaaatagcctttcttcgaataagtgatacagcaaaaagccataaaggattccttttgcggttggatatgtaaaggtcatagcagcaactgacaagaagtgtgcaatatttacctggattatcttgatgatggtgactcattatcagtgctttggtacttttgattacctgtgtttcagtattagtgtcactttagtacttcagatcctgcaaatatttttgcagatgaagtatgtatgtatgttactaagttaaacttagaaacagaacctcattcagtttttataatgtatttttgcaaactactgtaaatagcaaatcaatgccaatgttaaacaaagaggaaaacgttgtgtggactttgttctcttgcaccagtatttcaggaacatctgcttgccatccccacagctctttaaaactggctattatgtgtgcctttcattcttacatttctaatcatactgcaggaaaaacattggattcagcttagactgaggaaaactctccattatgttgtaagaaattatagatgttttgagagacactttttgttaaaccagatattgaactccagcaactattgtggttatatttttagttcattgttctcatttaatgctaaatatcctttatattgctttaataattttcttttttttttttttttttttagacggagtctcgctctgttgccaggctggagggcagtggcacgatcttggctttctgcaacctctgcctcccaggttcaagcgattctcctgcttcagccttctgagtagctgggactacaggcgcatgccaccatgcccagctaatttttttgtatttttagtagagacggggtttcaccacgttggccaggatggtttcgatctcctgacctcgtgatcctcctgcctcatcctcccaaaatgctgggattacaggcataagccaccgtgcctggcctctttaataatttttaaaataccctaaaggcttgtgaatatacaagtctactgataaattatgtattgtctgggaatttgatagtcattgttttagataactggattttacgctgtggtagacaggctgtgacactagtgttgcacaggtgtaattggtcatcctatgccttcaccagaataacttgggagtggtgccagaaactagagtctacaattctcactgtttagagagtgttaatgacatactgtgtatgcataatagccgcatgtactataatagcccttaaaattaaactattgggattgctgtaaatattttaaagtactggaggtgccttttacctgtttattagattttgaaaaggtttaaattatttcatgagcaatcttttaaatttcatttaacataaagctgaaaattcaataacaggataaaaaagctttttaacaaggctgccatttaacttaaatgtgttcatcttagctttcacttgtataaaatttgattctttgaactgcagcaataaaaccctcagctcctaagaagtcttaagagggtattctatatattctgctttgttttattttctgtaaattttgtaggtaaatatgtgcattaaaaataaatactttatatataactcgtg

SEQ ID NO: 25571 - protein, 125 aa, Homo sapiens
MNSLEQAEDLKAFERRLTEYIHCLQPATGRWRMLLIVVSVCTATGAWNWLIDPETQKVSFFTSLWNHPFFTISCITLIGLFFAGIHKRVVAPSIIAARCRTVLAEYNMSCDDTGKLILKPRPHVQ

SEQ ID NO: 25572 - DNA, 1996 bp, Homo sapiens
gcgggggccgcggaagctgcgatgcggacagggcagcggcggtgacccgagctgccgcccgacatgaactcgctggagcaggcggaagatctcaaggcttttgagaggagacttactgaatatattcattgtttgcaacctgctactggacgctggagaagtgtccttcttcacatcattatggaatcacccatttttcaccattagctgtatcactctaataggcttgttctttgctggaatacacaagagagtagttgcaccatcaattatagctgctcgatgtcgaacggtattagcagaatacaatatgtcttgtgatgatacaggaaaactaattttgaaacctaggcctcatgttcaatgacaatcttcactcattgttatgggacttaaaatagcctttcttcgaataagtgatacagcaaaaagccataaaggattccttttgcggttggatatgtaaaggtcatagcagcaactgacaagaagtgtgcaatatttacctggattatcttgatgatggtgactcattatcagtgctttggtacttttgattacctgtgtttcagtattagtgtcactttagtacttcagatcctgcaaatatttttgcagatgaagtatgtatgtatgttactaagttaaacttagaaacagaacctcattcagtttttataatgtatttttgcaaactactgtaaatagcaaatcaatgccaatgttaaacaaagaggaaaacgttgtgtggactttgttctcttgcaccagtatttcaggaacatctgcttgccatccccacagctctttaaaactggctattatgtgtgcctttcattcttacatttctaatcatactgcaggaaaaacattggattcagcttagactgaggaaaactctccattatgttgtaagaaattatagatgttttgagagacactttttgttaaaccagatattgaactccagcaactattgtggttatatttttagttcattgttctcatttaatgctaaatatcctttatattgctttaataattttcttttttttttttttttttttagacggagtctcgctctgttgccaggctggagggcagtggcacgatcttggctttctgcaacctctgcctcccaggttcaagcgattctcctgcttcagccttctgagtagctgggactacaggcgcatgccaccatgcccagctaatttttttgtatttttagtagagacggggtttcaccacgttggccaggatggtttcgatctcctgacctcgtgatcctcctgcctcatcctcccaaaatgctgggattacaggcataagccaccgtgcctggcctctttaataatttttaaaataccctaaaggcttgtgaatatacaagtctactgataaattatgtattgtctgggaatttgatagtcattgttttagataactggattttacgctgtggtagacaggctgtgacactagtgttgcacaggtgtaattggtcatcctatgccttcaccagaataacttgggagtggtgccagaaactagagtctacaattctcactgtttagagagtgttaatgacatactgtgtatgcataatagccgcatgtactataatagcccttaaaattaaactattgggattgctgtaaatattttaaagtactggaggtgccttttacctgtttattagattttgaaaaggtttaaattatttcatgagcaatcttttaaatttcatttaacataaagctgaaaattcaataacaggataaaaaagctttttaacaaggctgccatttaacttaaatgtgttcatcttagctttcacttgtataaaatttgattctttgaactgcagcaataaaaccctcagctcctaagaagtcttaagagggtattctatatattctgctttgttttattttctgtaaattttgtaggtaaatatgtgcattaaaaataaatactttatatataactcgtg

SEQ ID NO: 25573 - protein, 47 aa, Homo sapiens
MNSLEQAEDLKAFERRLTEYIHCLQPATGRWRSVLLHIIMESPIFHH

SEQ ID NO: 25574 - DNA, 363 bp, Homo sapiens
gcggaagctgcgatgcggacagggcagcggcggtgacccgagctgccgcccgacatgaactcgctggagcaggcggaagccccgcgagttgtatccctgattcctgcggtggtttccggtaactgccaagatctcaaggcttttgagaggagacttactgaatatattcattgtttgcaacctgctactggacgctggagaagcgccgtagctcacgcctgtaatcccagcactttaggaagcccaggcaggcggatcacctaaggtcagaagttcaagactagcgtggccaacacggtgaaacgccgtctctactaaaaatacgaaattagccggtcgtggtgacgctgcctgtgatcccag

SEQ ID NO: 25575 - protein, 69 aa, Homo sapiens
MNSLEQAEAPRVVSLIPAVVSGNCQDLKAFERRLTEYIHCLQPATGRWRSAVAHACNPSTLGSPGRRIT

SEQ ID NO: 25576 - DNA, 2112 bp, Homo sapiens
gcggaagctgcgatgcggacagggcagcggcggtgacccgagctgccgcccgacatgaactcgctggagcaggcggaagccccgcgagttgtatccctgattcctgcggtggtttccggtaactgccaagatctcaaggcttttgagaggagacttactgaatatattcattgtttgcaacctgctactggacgctggagaatgcttcttatagtggtatctgtctgtacagctactggtgcctggaactggttaatagaccctgagacacaaaaggtgtccttcttcacatcattatggaatcacccatttttcaccattagctgtatcactctaataggcttgttctttgctggaatacacaagagagtagttgcaccatcaattatagctgctcgatgtcgaacggtattagcagaatacaatatgtcttgtgatgatacaggaaaactaattttgaaacctaggcctcatgttcaatgacaatcttcactcattgttatgggacttaaaatagcctttcttcgaataagtgatacagcaaaaagccataaaggattccttttgcggttggatatgtaaaggtcatagcagcaactgacaagaagtgtgcaatatttacctggattatcttgatgatggtgactcattatcagtgctttggtacttttgattacctgtgtttcagtattagtgtcactttagtacttcagatcctgcaaatatttttgcagatgaagtatgtatgtatgttactaagttaaacttagaaacagaacctcattcagtttttataatgtatttttgcaaactactgtaaatagcaaatcaatgccaatgttaaacaaagaggaaaacgttgtgtggactttgttctcttgcaccagtatttcaggaacatctgcttgccatccccacagctctttaaaactggctattatgtgtgcctttcattcttacatttctaatcatactgcaggaaaaacattggattcagcttagactgaggaaaactctccattatgttgtaagaaattatagatgttttgagagacactttttgttaaaccagatattgaactccagcaactattgtggttatatttttagttcattgttctcatttaatgctaaatatcctttatattgctttaataattttcttttttttttttttttttttagacggagtctcgctctgttgccaggctggagggcagtggcacgatcttggctttctgcaacctctgcctcccaggttcaagcgattctcctgcttcagccttctgagtagctgggactacaggcgcatgccaccatgcccagctaatttttttgtatttttagtagagacggggtttcaccacgttggccaggatggtttcgatctcctgacctcgtgatcctcctgcctcatcctcccaaaatgctgggattacaggcataagccaccgtgcctggcctctttaataatttttaaaataccctaaaggcttgtgaatatacaagtctactgataaattatgtattgtctgggaatttgatagtcattgttttagataactggattttacgctgtggtagacaggctgtgacactagtgttgcacaggtgtaattggtcatcctatgccttcaccagaataacttgggagtggtgccagaaactagagtctacaattctcactgtttagagagtgttaatgacatactgtgtatgcataatagccgcatgtactataatagcccttaaaattaaactattgggattgctgtaaatattttaaagtactggaggtgccttttacctgtttattagattttgaaaaggtttaaattatttcatgagcaatcttttaaatttcatttaacataaagctgaaaattcaataacaggataaaaaagctttttaacaaggctgccatttaacttaaatgtgttcatcttagctttcacttgtataaaatttgattctttgaactgcagcaataaaaccctcagctcctaagaagtcttaagagggtattctatatattctgctttgttttattttctgtaaattttgtaggtaaatatgtgcattaaaaataaatactttatatataactcgtg

SEQ ID NO: 25577 - protein, 142 aa, Homo sapiens; identical to SEQ ID NO: 3393

SEQ ID NO: 25578 - DNA, 3048 bp, Homo sapiens
gcctgcgcacggcttgcccatgtgtgctgcagccgtcagccggcccagctgagcagcagcaacggaccttgttaacggcgcggcagcctccaccgcctgctgttgccctcctctctcggtggtctgtccgcccagcgcacgtcaccatgggcaagagccggacgaagcgcttcaagcgacctcagttctcccctacgggcgactgtcaggccgaggcggctgcggcggcgaatgggaccggaggcgaggaggacgacgggccggcggcggagctgctggaaaagaaatctcagtgcttgtggaggttttgaagtttgtgatgacatggtgactaaggatatcatgacccctctggttgcgctgctaaaagagtgtagtgctggactggattcaaatgagatgtctctgcaggagaaaaaagatcagaacagaaattctattgagaacatagccaatgagactgtgaacgtgctgtggaatatatgtgaatgcagtagtagagcagtgtctatattcaacaaagaagggtgtttggagattgtgttaaagtatttaagtaggtttcctaccaatgttgacctggctatttcagtagcatattgtttgcagacagtgactgaggataacccagagctgctgaagtctttcagtgctacagcattgaacatgctggaatcagcactgctttctcctgtcagttccatggaatctcttctattgaagacattggtagcaggcacaatttggaatctaaaggacattattccatgcaagagtcaagcagaaatcataaatgccttactaaagatcttatctgaagttttgggaatggatgctggtgaaatggttattcaaatgaaagaggctgaaacgcaaaggttaaaaactgctgcagaggctgaggaaatattagagaacactaatggggatgatttgattgaagatgatgaaatggaaggaatttctcataaaagaagagtcagaaggaaaactttcgtttcagatttacttccgcccactgacaaggaactgagagagactatagcattgctgacagcccaacagactgctctggaaattattgtcaacatgtgctgcaatgaaggtttgttaacatttacatttagacattttccccctgagccaagagggaaactcccgtggagattttcttaactattccagttctgcgtggtttgcccgcttcccagatccctctgatgacgaatgggaagagctttctagcagtgatgaaagtgacgcatttatggagaattccttcagtgagtgcgggggacagctgttttctcccctctgcctctcccatgaagttcacacggctctcaccaactacctcatcccaaagaaggtaatccattttcattctaggcttaccgtggagcatgggaaaggcttaagcaaggtattcattttgtgtacaaaagaagcaagctcacacttccaggttgtagatggtggtaagatctgagacaaagctgagcctaacagtactggaaataggcgaaaaggtcattctatatgaagcctaaccatttcacttaggagtaatatgttggaattatgtaagggaatcgtgttaaatgactactctttaacctttgctttactgcctcttttaaatctagatttttgagaaaactgcctttccaaacagcattgcagttgacctatgttctaggaaccctacttggaaacctttgattagaaaaatgaacactattcagtgcagagccctcttctgtctccagagtcttgtgtccctcctggatgtggagcacctgggaggagccgcagcccttcagacgcttgcacagcatctgtcacagctgcttttttctcaaccagattttgctaaacatgttgactttctagaagccataagtagtgctttgagggcccttttgcaaacaatggcctccaagaacatttcccagtgcatgactcctgatcagctgatgacattatgcaaagcaggcattcatagtagtaatgtcggggttagagtgaatgtcgttagcattttaggaatcactggcagcgtccttgccaaagaagatggtacacttgaaactcttaagaacattgggtgctttctgcttgaagttaccaccaaagatccttcccttgtggtagcaggagaagctttggatgccctctttgatgtttttgcagatggtaaagaagccgaaagagcctcgattcaaattaaattattatctgctctgaaagaattccagccggtctttaaaatgaagatacgtaaagaagggagaggtaactatagcacagatcagctgtgtgttcttgacaatgtgaaaatgaatttgcgaagatttattgcttatcaagaaactgttgagaaaagactgacttcttaaacaatccaaaaaagaaaccagttcttcccccaaagtattcaatgcttagaatactaaaaggttttctttgaatgtatatgtttctgaaagtcattttttaatgattacattctgcatgagccaccgtgcctggccagaaactcttttttaagtgatgagatctgtgtggcatttctagcgctctctaaattatgtctctggcatattttaatcactggaaactcaaagagtggaagagtggaagtgcgaaggaatctcaggtagctcttaactaattcgccagcagtgaagaaacttcaaccaatcatgttttccttgaattttgcaaagaaagaaaatccaaagcattgcttggatgttcttttaaggcattttatatcagttgaaccttaaactgaaatatgaagacaagctttataaactagttttttgatatgaagtatatcaattatgtttgccttttgtgaagaagtaaatgagttgaatttctatttcacttactagattatactaatgagctaatggggtcattgccatcctccctactcatgactttgatgagttattgctgtaacatcacttcttgatttaatttgatatggaatcagaattgggagaaggtatttttaaataaacaactttttaatgg

SEQ ID NO: 25579 - protein, 314 aa, Homo sapiens
MGPEARRTTGRRRSCWKRNLSACGGFEVCDDMVTKDIMTPLVALLKECSAGLDSNEMSLQEKKDQNRNSIENIANETVNVLWNICECSSRAVSIFNKEGCLEIVLKYLSRFPTNVDLAISVAYCLQTVTEDNPELLKSFSATALNMLESALLSPVSSMESLLLKTLVAGTIWNLKDIIPCKSQAEIINALLKILSEVLGMDAGEMVIQMKEAETQRLKTAAEAEEILENTNGDDLIEDDEMEGISHKRRVRRKTFVSDLLPPTDKELRETIALLTAQQTALEIIVNMCCNEGLLTFTFRHFPPEPRGKLPWRFS

SEQ ID NO: 25580 - DNA, 2665 bp, Homo sapiens
gcctgcgcacggcttgcccatgtgtgctgcagccgtcagccggcccagctgagcagcagcaacggaccttgttaacggcgcggcagcctccaccgcctgctgttgccctcctctctcggtggtctgtccgcccagcgcacgtcaccatgggcaagagccggacgaagcgcttcaagcgacctcagttctcccctacgggcgactgtcaggccgaggcggctgcggcggcgaatgggaccggaggcgaggaggacgacgggccggcggcggagctgctggaaaagaaatctcagtgcttgtggaggttttgaagtttgtgatgacatggtgactaaggatatcatgacccctctggttgcgctgctaaaagagtgtagtgctggactggattcaaatgagatgtctctgcaggagaaaaaagatcagaacagaaattctattgagaacatagccaatgagactgtgaacgtgctgtggaatatatgtgaatgcagtagtagagcagtgtctatattcaacaaagaagggtgtttggagattgtgttaaagtatttaagtaggtttcctaccaatgttgacctggctatttcagtagcatattgtttgcagacagtgactgaggataacccagagctgctgaagtctttcagtgctacagcattgaacatgctggaatcagcactgctttctcctgtcagttccatggaatctcttctattgaagacattggtagcaggcacaatttggaatctaaaggacattattccatgcaagagtcaagcagaaatcataaatgccttactaaagatcttatctgaagttttgggaatggatgctggtgaaatggttattcaaatgaaagaggctgaaacgcaaaggttaaaaactgctgcagaggctgaggaaatattagagaacactaatggggatgatttgattgaagatgatgaaatggaaggaatttctcataaaagaagagtcagaaggaaaactttcgtttcagatttacttccgcccactgacaaggaactgagagagactatagcattgctgacagcccaacagactgctctggaaattattgtcaacatgtgctgcaatgaagatccctctgatgacgaatgggaagagctttctagcagtgatgaaagtgacgcatttatggagaattccttcagtgagtgcgggggacagctgttttctcccctctgcctctcccatgaagttcacacggctctcaccaactacctcatcccaaagaagatttttgagaaaactgcctttccaaacagcattgcagttgacctatgttctaggaaccctacttggaaacctttgattagaaaaatgaacactattcagtgcagagccctcttctgtctccagagtcttgtgtccctcctggatgtggagcacctgggaggagccgcagcccttcagacgcttgcacagcatctgtcacagctgcttttttctcaaccagattttgctaaacatgttgactttctagaagccataagtagtgctttgagggcccttttgcaaacaatggcctccaagaacatttcccagtgcatgactcctgatcagctgatgacattatgcaaagcaggcattcatagtagtaatgtcggggttagagtgaatgtcgttagcattttaggaatcactggcagcgtccttgccaaagaagatggtacacttgaaactcttaagaacattgggtgctttctgcttgaagttaccaccaaagatccttcccttgtggtagcaggagaagctttggatgccctctttgatgtttttgcagatggtaaagaagccgaaagagcctcgattcaaattaaattattatctgctctgaaagaattccagccggtctttaaaatgaagatacgtaaagaagggagaggtaactatagcacagatcagctgtgtgttcttgacaatgtgaaaatgaatttgcgaagatttattgcttatcaagaaactgttgagaaaagactgacttcttaaacaatccaaaaaagaaaccagttcttcccccaaagtattcaatgcttagaatactaaaaggttttctttgaatgtatatgtttctgaaagtcattttttaatgattacattctgcatgagccaccgtgcctggccagaaactcttttttaagtgatgagatctgtgtggcatttctagcgctctctaaattatgtctctggcatattttaatcactggaaactcaaagagtggaagagtggaagtgcgaaggaatctcaggtagctcttaactaattcgccagcagtgaagaaacttcaaccaatcatgttttccttgaattttgcaaagaaagaaaatccaaagcattgcttggatgttcttttaaggcattttatatcagttgaaccttaaactgaaatatgaagacaagctttataaactagttttttgatatgaagtatatcaattatgtttgccttttgtgaagaagtaaatgagttgaatttctatttcacttactagattatactaatgagctaatggggtcattgccatcctccctactcatgactttgatgagttattgctgtaacatcacttcttgatttaatttgatatggaatcagaattgggagaaggtatttttaaataaacaactttttaatgg

SEQ ID NO: 25581 - protein, 594 aa, Homo sapiens
MGPEARRTTGRRRSCWKRNLSACGGFEVCDDMVTKDIMTPLVALLKECSAGLDSNEMSLQEKKDQNRNSIENIANETVNVLWNICECSSRAVSIFNKEGCLEIVLKYLSRFPTNVDLAISVAYCLQTVTEDNPELLKSFSATALNMLESALLSPVSSMESLLLKTLVAGTIWNLKDIIPCKSQAEIINALLKILSEVLGMDAGEMVIQMKEAETQRLKTAAEAEEILENTNGDDLIEDDEMEGISHKRRVRRKTFVSDLLPPTDKELRETIALLTAQQTALEIIVNMCCNEDPSDDEWEELSSSDESDAFMENSFSECGGQLFSPLCLSHEVHTALTNYLIPKKIFEKTAFPNSIAVDLCSRNPTWKPLIRKMNTIQCRALFCLQSLVSLLDVEHLGGAAALQTLAQHLSQLLFSQPDFAKHVDFLEAISSALRALLQTMASKNISQCMTPDQLMTLCKAGIHSSNVGVRVNVVSILGITGSVLAKEDGTLETLKNIGCFLLEVTTKDPSLVVAGEALDALFDVFADGKEAERASIQIKLLSALKEFQPVFKMKIRKEGRGNYSTDQLCVLDNVKMNLRRFIAYQETVEKRLTS

SEQ ID NO: 25582 - DNA, 3111 bp, Homo sapiens
gcctgcgcacggcttgcccatgtgtgctgcagccgtcagccggcccagctgagcagcagcaacggaccttgttaacggcgcggcagcctccaccgcctgctgttgccctcctctctcggtggtctgtccgcccagcgcacgtcaccatgggcaagagccggacgaagcgcttcaagcgacctcagttctcccctacgggcgactgtcaggccgaggcggctgcggcggcgaatgggaccggaggcgaggaggacgacgggccggcggcggagctgctggaaaagaaatctcagtgcttgtggaggttttgaagtttgtgatgacatggtgactaaggatatcatgacccctctggttgcgctgctaaaagagtgtagtgctggactggattcaaatgagatgtctctgcaggagaaaaaagatcagaacagaaattctattgagaacatagccaatgagactgtgaacgtgctgtggaatatatgtgaatgcagtagtagagcagtgtctatattcaacaaagaagggtgtttggagattgtgttaaagtatttaagtaggtttcctaccaatgttgacctggctatttcagtagcatattgtttgcagacagtgactgaggataacccagagctgctgaagtctttcagtgctacagcattgaacatgctggaatcagcactgctttctcctgtcagttccatggaatctcttctattgaagacattggtagcaggcacaatttggaatctaaaggacattattccatgcaagagtcaagcagaaatcataaatgccttactaaagatcttatctgaagttttgggaatggatgctggtgaaatggttattcaaatgaaagaggctgaaacgcaaaggttaaaaactgctgcagaggctgaggaaatattagagaacactaatggggatgatttgattgaagatgatgaaatggaaggaatttctcataaaagaagagtcagaaggaaaactttcgtttcagatttacttccgcccactgacaaggaactgagagagactatagcattgctgacagcccaacagactgctctggaaattattgtcaacatgtgctgcaatgaaggtttgttaacatttacatttagacattttccccctgagccaagagggaaactcccgtggagattttcttaactattccagttctgcgtggtttgcccgcttcccagatccctctgatgacgaatgggaagagctttctagcagtgatgaaagtgacgcatttatggagaattccttcagtgagtgcgggggacagctgttttctcccctctgcctctcccatgaagttcacacggctctcaccaactacctcatcccaaagaaggtaatccattttcattctaggcttaccgtggagcatgggaaaggcttaagcaaggtattcattttgtgtacaaaagaagcaagctcacacttccaggttgtagatggtggtaagatctgagacaaagctgagcctaacagtactggaaataggcgaaaaggtcattctatatgaagcctaaccatttcacttaggagtaatatgttggaattatgtaagggaatcgtgttaaatgactactctttaacctttgctttactgcctcttttaaatctagatttttgagaaaactgcctttccaaacagcattgcagttgacctatgttctaggaaccctacttggaaacctttgattagaaaaatgaacactattcagtgcagagccctcttctgtctccagagtcttgtgtccctcctggatgtggagcacctgggaggagccgcagcccttcagacgcttgcacagcatctgtcacagctgcttttttctcaaccagattttgctaaacatgttgactttctagaagccataagtagtgctttgagggcccttttgcaaacaatggcctccaagaacatttcccagtgcatgactcctgatcagctgatgacattatgcaaagcaggcattcatagtagtaatgtcggggttagagtgaatgtcgttagcattttaggaatcactggcagcgtccttgccaaagaagatggtacacttgaaactcttaagaacattgggtgctttctgcttgaagttaccaccaaagatccttcccttgtggtagcaggagaagctttggatgccctctttgatgtttttgcagatggtaaagaagccgaaagagcctcgattcaaattaaattattatctgctctgaaagaattccagccggtctttaaaatgaagatacgtaaagaagggagaggtaactatagcacagatcagctgtgtgttcttgacaatgtgaaaatgaatttgcgaagatttattgcttatcaagaaactgttgagaaaagactgacttcttaaacaatccaaaaaagaaaccagttcttcccccaaagtattcaatgcttagaatactaaaaggttttctttgaatgtatatgtttctgaaagtcattttttaatgattacattctgcatgagccaccgtgcctggccagaaactcttttttaagtgatgagatctgtgtggcatttctagcgctctctaaattatgtctctggcatattttaatcactggaaactcaaagagtggaagagtggaagtgcgaaggaatctcaggtagctcttaactaattcgccagcagtgaagaaacttcaaccaatcatgttttccttgaattttgcaaagaaagaaaatccaaagcattgcttggatgttcttttaaggcattttatatcagttgaaccttaaactgaaatatgaagacaagctttataaactagttttttgatatgaagtatatcaattatgtttgccttttgtgaagaagtaaatgagttgaatttctatttcacttactagattatactaatgagctaatggggtcattgccatcctccctactcatgactttgatgagttattgctgtaacatcacttcttgatttaatttgatatggaatcagaattgggagaaggtatttttaaataaacaactttttaatggaaagttttgtgtcttacaaaatcttttttaagataccaaataaagggttattagtagaaaatg

SEQ ID NO: 25583 - protein, 314 aa, Homo sapiens; identical to SEQ ID NO: 25579

SEQ ID NO: 25584 - DNA, 2728 bp, Homo sapiens
gcctgcgcacggcttgcccatgtgtgctgcagccgtcagccggcccagctgagcagcagcaacggaccttgttaacggcgcggcagcctccaccgcctgctgttgccctcctctctcggtggtctgtccgcccagcgcacgtcaccatgggcaagagccggacgaagcgcttcaagcgacctcagttctcccctacgggcgactgtcaggccgaggcggctgcggcggcgaatgggaccggaggcgaggaggacgacgggccggcggcggagctgctggaaaagaaatctcagtgcttgtggaggttttgaagtttgtgatgacatggtgactaaggatatcatgacccctctggttgcgctgctaaaagagtgtagtgctggactggattcaaatgagatgtctctgcaggagaaaaaagatcagaacagaaattctattgagaacatagccaatgagactgtgaacgtgctgtggaatatatgtgaatgcagtagtagagcagtgtctatattcaacaaagaagggtgtttggagattgtgttaaagtatttaagtaggtttcctaccaatgttgacctggctatttcagtagcatattgtttgcagacagtgactgaggataacccagagctgctgaagtctttcagtgctacagcattgaacatgctggaatcagcactgctttctcctgtcagttccatggaatctcttctattgaagacattggtagcaggcacaatttggaatctaaaggacattattccatgcaagagtcaagcagaaatcataaatgccttactaaagatcttatctgaagttttgggaatggatgctggtgaaatggttattcaaatgaaagaggctgaaacgcaaaggttaaaaactgctgcagaggctgaggaaatattagagaacactaatggggatgatttgattgaagatgatgaaatggaaggaatttctcataaaagaagagtcagaaggaaaactttcgtttcagatttacttccgcccactgacaaggaactgagagagactatagcattgctgacagcccaacagactgctctggaaattattgtcaacatgtgctgcaatgaagatccctctgatgacgaatgggaagagctttctagcagtgatgaaagtgacgcatttatggagaattccttcagtgagtgcgggggacagctgttttctcccctctgcctctcccatgaagttcacacggctctcaccaactacctcatcccaaagaagatttttgagaaaactgcctttccaaacagcattgcagttgacctatgttctaggaaccctacttggaaacctttgattagaaaaatgaacactattcagtgcagagccctcttctgtctccagagtcttgtgtccctcctggatgtggagcacctgggaggagccgcagcccttcagacgcttgcacagcatctgtcacagctgcttttttctcaaccagattttgctaaacatgttgactttctagaagccataagtagtgctttgagggcccttttgcaaacaatggcctccaagaacatttcccagtgcatgactcctgatcagctgatgacattatgcaaagcaggcattcatagtagtaatgtcggggttagagtgaatgtcgttagcattttaggaatcactggcagcgtccttgccaaagaagatggtacacttgaaactcttaagaacattgggtgctttctgcttgaagttaccaccaaagatccttcccttgtggtagcaggagaagctttggatgccctctttgatgtttttgcagatggtaaagaagccgaaagagcctcgattcaaattaaattattatctgctctgaaagaattccagccggtctttaaaatgaagatacgtaaagaagggagaggtaactatagcacagatcagctgtgtgttcttgacaatgtgaaaatgaatttgcgaagatttattgcttatcaagaaactgttgagaaaagactgacttcttaaacaatccaaaaaagaaaccagttcttcccccaaagtattcaatgcttagaatactaaaaggttttctttgaatgtatatgtttctgaaagtcattttttaatgattacattctgcatgagccaccgtgcctggccagaaactcttttttaagtgatgagatctgtgtggcatttctagcgctctctaaattatgtctctggcatattttaatcactggaaactcaaagagtggaagagtggaagtgcgaaggaatctcaggtagctcttaactaattcgccagcagtgaagaaacttcaaccaatcatgttttccttgaattttgcaaagaaagaaaatccaaagcattgcttggatgttcttttaaggcattttatatcagttgaaccttaaactgaaatatgaagacaagctttataaactagttttttgatatgaagtatatcaattatgtttgccttttgtgaagaagtaaatgagttgaatttctatttcacttactagattatactaatgagctaatggggtcattgccatcctccctactcatgactttgatgagttattgctgtaacatcacttcttgatttaatttgatatggaatcagaattgggagaaggtatttttaaataaacaactttttaatggaaagttttgtgtcttacaaaatcttttttaagataccaaataaagggttattagtagaaaatg

SEQ ID NO: 25585 - protein, 594 aa, Homo sapiens; identical to SEQ ID NO: 25581

SEQ ID NO: 25586 - DNA, 2587 bp, Homo sapiens
gcacggcttgcccatgtgtgctgcagccgtcagccggcccagctgagcagcagcaacggaccttgttaacggcgcggcagcctccaccgcctgctgttgccctcctctctcggtggtctgtccgcccagcgcacgtcaccatgggcaagagccggacgaagcgcttcaagcgacctcagttctcccctacgggcgactgtcaggccgaggcggctgcggcggcgaatgggaccggaggcgaggaggacgacgggccggcggcggagctgctggaaaagctccagcacccgagcgccgaggtccgcgagtgcgcctgcgcagggctggcccggctggtgcagcagcggccggcactcccgggcctggcgcgacgagacgccgtgcgccgcctcgggccgctgctgctagaccccagcctggccgtcagggagactgcagccggcgcgctgagaaatctcagtgcttgtggaggttttgaagtttgtgatgacatggtgactaaggatatcatgacccctctggttgcgctgctaaaagagtgtagtgctggactggattcaaatgagatgtctctgcaggagaaaaaagatcagaacagaaattctattgagaacatagccaatgagactgtgaacgtgctgtggaatatatgtgaatgcagtagtagagcagtgtctatattcaacaaagaagggtgtttggagattgtgttaaagtatttaagtaggtttcctaccaatgttgacctggctatttcagtagcatattgtttgcagacagtgactgaggataacccagagctgctgaagtctttcagtgctacagcattgaacatgctggaatcagcactgctttctcctgtcagttccatggaatctcttctattgaagacattggtagcaggcacaatttggaatctaaaggacattattccatgcaagagtcaagcagaaatcataaatgccttactaaagatcttatctgaagttttgggaatggatgctggtgaaatggttattcaaatgaaagaggctgaaacgcaaaggttaaaaactgctgcagaggctgaggaaatattagagaacactaatggggatgatttgattgaagatgatgaaatggaaggaatttctcataaaagaagagtcagaaggaaaactttcgtttcagatttacttccgcccactgacaaggaactgagagagactatagcattgctgacagcccaacagactgctctggaaattattgtcaacatgtgctgcaatgaagatccctctgatgacgaatgggaagagctttctagcagtgatgaaagtgacgcatttatggagaattccttcagtgagtgcgggggacagctgttttctcccctctgcctctcccatgaagttcacacggctctcaccaactacctcatcccaaagaagatttttgagaaaactgcctttccaaacagcattgcagttgacctatgttctaggaaccctacttggaaacctttgattagaaaaatgaacactattcagtgcagagccctcttctgtctccagagtcttgtgtccctcctggatgtggagcacctgggaggagccgcagcccttcagacgcttgcacagcatctgtcacagctgcttttttctcaaccagattttgctaaacatgttgactttctagaagccataagtagtgctttgagggcccttttgcaaacaatggcctccaagaacatttcccagtgcatgactcctgatcagctgatgacattatgcaaagcaggcattcatagtagtaatgtcggggttagagtgaatgtcgttagcattttaggaatcactggcagcgtccttgccaaagaagatggtacacttgaaactcttaagaacattgggtgctttctgcttgaagttaccaccaaagatccttcccttgtggtagcaggagaagctttggatgccctctttgatgtttttgcagatggtaaagaagccgaaagagcctcgattcaaattaaattattatctgctctgaaagaattccagccggtctttaaaatgaagatacgtaaagaagggagaggtaactatagcacagatcagctgtgtgttcttgacaatgtgaaaatgaatttgcgaagatttattgcttatcaagaaactgttgagaaaagactgacttcttaaacaatccaaaaaagaaaccagttcttcccccaaagtattcaatgcttagaatactaaaaggttttctttgaatgtatatgtttctgaaagtcattttttaatgattacattctgtacattctgtaaaaacttcaaaacctggccaggcatggtggctcacgcctataatcccagcaccttgggagaccgaggcgggtggatcacttgaggtcaggagtttgaggccagcctggccaacatggtgaaaccgcatgcataagcatggtggcacatgcctgtgatcccagctactcgggaggctgagggaggagagtcggttgaacctgggagacagaggttgcagtgagctgagatcacgctactgcactccagcctgggtgacagagggagaccctgtctccaaa

SEQ ID NO: 25587 - protein, 680 aa, Homo sapiens; identical to SEQ ID NO: 3395

SEQ ID NO: 25588 - DNA, 666 bp, Homo sapiens
agctacagaattaaatgtgtttggaaccacatgcacatcgtgctttgactacctcacaaaggagcagaaaggcaaattctgtttccagtaatgtgcaaagtcaagccacaaggaccttctctgaggcaaacggatggacaatgaagccggttcagaggcccagccgagacaatgatgcacagggaaactccctcgagccccagctgtcacctagtacttcgaagacactgagagaatgcatgttgcctggtgtgcaaggaaaatggtgtggattgttcattcatcagcaggagaatgtaacatgcatacattggatgcaacagcaaaggcagaaggcatctttaaaaattctgaatttgccctttcactaaagacagatttatttttttaaaaaagtacctctggaataacgttaaattgtaaaatgtggctcaacttttcaaatacttacctaattaatacacatagttagatcaagccaaagggtatattctaataatatgactcaataaagcaacttgatatgacttcttctcttcaagtccacacaagttttaagaaatcctacaccaacagttcttctcccatttctaattatttaacatgttaggtcagaagcaaattgttttaccttaagagtttcaagtgtaccatcttctttggcaa

SEQ ID NO: 25589 - protein, 118 aa, Homo sapiens
MCLEPHAHRALTTSQRSRKANSVSSNVQSQATRTFSEANGWTMKPVQRPSRDNDAQGNSLEPQLSPSTSKTLRECMLPGVQGKWCGLFIHQQENVTCIHWMQQQRQKASLKILNLPFH

SEQ ID NO: 25590 - DNA, 658 bp, Homo sapiens
catctgtggagtgctcccacgtacctgggcgtccgggagcttctgaggcgcgcgcggcttctccgcctcggcttccccggtgctgagcgtggacgaggccgcatggaggttgccgcccgccccgcagggagcgcgttgtgggagcaggatgcagtggctcatgcctgtaatcccagcactttggaagactgaggacgaatcatctatccgaaatggcaggcacccacagctgcagacctcaatctgggcaaacggatggacaatgaagccggttcagaggcccagccgagacaatgatgcacagggaaactccctcgagccccagctgtcacctagtacttcgaagacactgagagaatgcatgttgcctggtgtgcaaggaaaatggtgtggattgttcattcatcagcaggagaatgtaacatgcatacattggatgcaacagcaaaggcagaaggcatctttaaaaattctgaatttgccctttcactaaagacagatttatttttttaaaaaagtacctctggaataacgttaaattgtaaaatgtggctcaacttttcaaatacttacctaattaatacacatagttagatcaagccaaagggtatattctaataatatgactcaataaagcaacttgatatgacttcttctc

SEQ ID NO: 25591 - protein, 114 aa, Homo sapiens
MQWLMPVIPALWKTEDESSIRNGRHPQLQTSIWANGWTMKPVQRPSRDNDAQGNSLEPQLSPSTSKTLRECMLPGVQGKWCGLFIHQQENVTCIHWMQQQRQKASLKILNLPFH

SEQ ID NO: 25592 - DNA, 382 bp, Homo sapiens
acaatgtgaaaatgaatttgcgaagatttattgcttatcaagaaactgttgagaaaagactgacttcttaaacaatccaaaaaagaaaccagttcttcccccaaagtattcaatgcttagaatactaaaaggttttctttgaatgtatatgtttctgaaagtcattttttaatgattacattctgtacattctgtaaaaacttcaaaacctggccaacatggtgaaaccgcatgcataagcatggtggcacatgcctgtgatcccagctactcgggaggctgagggaggagagtcggttgaacctgggagacagaggttgcagtgagctgagatcacgctactgcactccagcctgggtgacagagggagaccctgtctcca

SEQ ID NO: 25593 - protein, 39 aa, Homo sapiens
SQLLGRLREESRLNLGDRGCSELRSRYCTPAWVTEGDPV

SEQ ID NO: 25594 - DNA, 770 bp, Homo sapiens
aatgtgaaaatgaatttgcgaagatttattgcttatcaagaaactgttgagaaaagactgacttcttaaacaatccaaaaaagaaaccagttcttcccccaaagtattcaatgcttagaatactaaaaggttttctttgaatgtatatgtttctgaaagtcattttttaatgattacattctgtacattctgtaaaaacttcaaaacctggccaggcatgtgctgggattacaggcatgagccaccgtgcctggccagaaactcttttttaagtgatgagatctgtgtggcatttctagcgctctctaaattatgtctctggcatattttaatcactggaaactcaaagagtggaagagtggaagtgcgaaggaatctcaggtagctcttaactaattcgccagcagtgaagaaacttcaaccaatcatgttttccttgaattttgcaaagaaagaaaatccaaagcattgcttggatgttcttttaaggcattttatatcagttgaaccttaaactgaaatatgaagacaagctttataaactagttttttgatatgaagtatatcaattatgtttgccttttgtgaagaagtaaatgagttgaatttctatttcacttactagattatactaatgagctaatggggtcattgccatcctccctactcatgactttgatgagttattgctgtaacatcacttcttgatttaatttgatatggaatcagaattgggagaaggtatttttaaataaacaactttttaatgg

SEQ ID NO: 25595 - protein, 71 aa, Homo sapiens
MITFCTFCKNFKTWPGMCWDYRHEPPCLARNSFLSDEICVAFLALSKLCLWHILITGNSKSGRVEVRRNLR

SEQ ID NO: 25596 - DNA, 833 bp, Homo sapiens
aatgtgaaaatgaatttgcgaagatttattgcttatcaagaaactgttgagaaaagactgacttcttaaacaatccaaaaaagaaaccagttcttcccccaaagtattcaatgcttagaatactaaaaggttttctttgaatgtatatgtttctgaaagtcattttttaatgattacattctgtacattctgtaaaaacttcaaaacctggccaggcatgtgctgggattacaggcatgagccaccgtgcctggccagaaactcttttttaagtgatgagatctgtgtggcatttctagcgctctctaaattatgtctctggcatattttaatcactggaaactcaaagagtggaagagtggaagtgcgaaggaatctcaggtagctcttaactaattcgccagcagtgaagaaacttcaaccaatcatgttttccttgaattttgcaaagaaagaaaatccaaagcattgcttggatgttcttttaaggcattttatatcagttgaaccttaaactgaaatatgaagacaagctttataaactagttttttgatatgaagtatatcaattatgtttgccttttgtgaagaagtaaatgagttgaatttctatttcacttactagattatactaatgagctaatggggtcattgccatcctccctactcatgactttgatgagttattgctgtaacatcacttcttgatttaatttgatatggaatcagaattgggagaaggtatttttaaataaacaactttttaatggaaagttttgtgtcttacaaaatcttttttaagataccaaataaagggttattagtagaaaatg

SEQ ID NO: 25597 - protein, 71 aa, Homo sapiens; identical to SEQ ID NO: 25595

SEQ ID NO: 25598 - DNA, 384 bp, Homo sapiens
atgtatgttcatgtctttgaccttgcactacgccaatgtaggctccaggcagatattcgaggtgcctttgaaaagctccagggcactgtggccagggttcacattggccaagttatcatgtccatctgcaacaagctgcagaataaggagcatgtgattgaatccctgctcagggccaagttcaagttccctggctgccagaagatccacatttcaaagaagtggggcttcaccaagttcactgcggatgaatttgaagacatggtggctgaaaagcggctcatcgcagatgactgtggggtcaagtacatccccatcatggccctctggacaagtggcgtgccctgccctcgtgagggcttccactgtgctgccccctcttaa

SEQ ID NO: 25599 - protein, 127 aa, Homo sapiens [sequence omitted]

SEQ ID NO: 25600 - DNA, 792 bp, Homo sapiens
acaaaataaaataaacatcatttgccaccataaaccttttctttagagaggaaaaatttttgcagcaggacacaagggttctattaagtcatttcaatgctgagaaaaacaaattgagtaatagaactaatcacttccctatatatggatgttaagatgacaatttagattatttttcaaactaatcctgagaaaaaatctgtttacaatttaaacagtaatgttatgtaaaaagtattattaacaaatccactattacaaatatcaatctcctatatggtcttctatatatacacacaataaaatggtaaatatatgcaaaaatatttaaaaaaaaaacatgcacagatcactttcccctttggaatctggacttcctatcagatacctttgttttccttccccacctcatcctctgatactgttttttgtttctatcaccctaccaacactgaatactattccctataactctgcataaagccaatgagaaatatatttattttacattcaagctttaaatcttaaaatgaccctgttgtagcatatgacttatcaaataagcagccttttttttccctcttttttgcttgcttttttttttgttttgttttgttttttttgcagttgtcagtcttcatgatccattctgtggcgagctgggaaaaaacgcagttgctaagtcaacgtctgaacagtgtgaggctcctgaatatctcccaggaatctgcatccacagactgttggacggtccgagctgctctggctgaaaccaggcgatcctcggatcca

SEQ ID NO: 25601 - protein, 50 aa, Homo sapiens
MIHSVASWEKTQLLSQRLNSVRLLNISQESASTDCWTVRAALAETRRSSD

SEQ ID NO: 25602 - DNA, 2233 bp, Homo sapiens
agcagcagcacggccaccggcgggagcggcagcagcaccggcagccccggcggcgcggcctcggccccggccccggccccggccggcatgtatcgctccggggagcgcctgctgggcagccacgcgctgcccgcggagcagcgggacttcctgcccctagagacgaccaacaacaacaacaaccaccaccagcccggggcctgggcccgccgggcgggctcctcggcgtcctcgcctccctcggcgtcctcgtccccgcacccttcggccgccgtccccgccgccgatccagccgattcggcctcgggcagcagcaacaagaggaagcgcgacaacaaggccagcacgtatggactcaactacagcctgctgcagcccagcggagggcgggccgcggggggcggccgagcagacggcggcggggtcgtgtacagcgggaccccgtggaaacggaggaactacaaccagggagtcgtgggtctgcatgaagaaatcagtgatttttatgaatacatgtctccaagacctgaggaggagaagatgcggatggaggtggtgaacaggatcgagagtgtaattaaggagctctggcccagcgctgacgtccagatatttggaagttttaaaactggactttatttacctactagtgacatcgacctagtggtgtttgggaagtgggagaacctacccctctggactctggaagaagctcttcggaaacacaaagtcgcagatgaggattcggtgaaagttttagacaaagcaactgtacctattattaaattaacagattcttttactgaagtgaaagttgatatcagctttaatgtacagaatggcgtgagagcagctgacctcatcaaagattttaccaagaaatatcctgtattgccatacttggttttagtattgaaacaattcctattgcagagggaccttaatgaagtatttacaggtggaattggttcttatagtctctttttaatggcagtcagtttccttcagttacatcccagggaagatgcttgcatccccaatacaaactatggtgttctcttaatagaattttttgaattatatggacgacacttcaattatttaaagactggcatccggataaaggatggtggttcatatgtggccaaagatgaagtacagaaaaatatgctagatggctacaggccatcaatgctttatatcgaagatcctttacaaccaggtaacgatgttggaaggagttcatatggggccatgcaagtgaagcaggcctttgattatgcctacgttgttttgagtcatgctgtatcaccaatagcaaagtactatcccaacaatgaaacagaaagcatactaggtagaataattagagtaacagatgaagttgccacatatagagattggatatcaaagcagtggggcttgaagaatagacctgagccttcatgcaatggaaatggtgttaccttgatagtagatactcagcagttagataaatgtaataataatctatctgaagaaaatgaagcccttggaaaatgtagaagtaaaacctcggaatctcttagtaaacactcttcaaactcttcatcaggtccagtgtcgtcctcttctgccacacagtccagctctagtgatgtagattccgatgcaacaccatgcaaaaccccgaaacagctgctttgccgtccgtccactgggaaccgagtagggtcgcaagatgtatccttggagtcctctcaggcagttgggaaaatgcaaagcacccaaaccactaacacatccaacagcaccaacaaatctcagcatggatcagcaaggctctttcgttcttccagcaaaggcttccaagcattgtcttcagtgttaagaaatgtggactcctgtgaggtgctggaggtttgaatcatcttgaaaactttccaatcttgtctagttaccactgcagagacactaaggaatttaccagaaaaagatatttgatacaagtgatttaagaaatctcaacatttcctgaggccgtatcactgggcaaccagtgatgaaaactatgaatgaattgcacacctggaagattttttaagctaatgacagtttcttcaaagatgtcaattatttgccttggaaattttataaattgcatttctatgcacatcggcctctagtgcttaccactcggtttattattcataatctgcaattcaataaaggctttgtgttttcatttatcttc

SEQ ID NO: 25603 - protein, 605 aa, Homo sapiens
MYRSGERLLGSHALPAEQRDFLPLETTNNNNNHHQPGAWARRAGSSASSPPSASSSPHPSAAVPAADPADSASGSSNKRKRDNKASTYGLNYSLLQPSGGRAAGGGRADGGGVVYSGTPWKRRNYNQGVVGLHEEISDFYEYMSPRPEEEKMRMEVVNRIESVIKELWPSADVQIFGSFKTGLYLPTSDIDLVVFGKWENLPLWTLEEALRKHKVADEDSVKVLDKATVPIIKLTDSFTEVKVDISFNVQNGVRAADLIKDFTKKYPVLPYLVLVLKQFLLQRDLNEVFTGGIGSYSLFLMAVSFLQLHPREDACIPNTNYGVLLIEFFELYGRHFNYLKTGIRIKDGGSYVAKDEVQKNMLDGYRPSMLYIEDPLQPGNDVGRSSYGAMQVKQAFDYAYVVLSHAVSPIAKYYPNNETESILGRIIRVTDEVATYRDWISKQWGLKNRPEPSCNGNGVTLIVDTQQLDKCNNNLSEENEALGKCRSKTSESLSKHSSNSSSGPVSSSSATQSSSSDVDSDATPCKTPKQLLCRPSTGNRVGSQDVSLESSQAVGKMQSTQTTNTSNSTNKSQHGSARLFRSSSKGFQALSSVLRNVDSCEVLEV

SEQ ID NO: 25604 - DNA, 3736 bp, Homo sapiens
gatatttggaagttttaaaactggactttatttacctactagtgacatcgacctagtggtgtttgggaagtgggagaacctacccctctggactctggaagaagctcttcggaaacacaaagtcgcagatgaggattcggtgaaagttttagacaaagcaactgtacctattattaaattaacagattcttttactgaagtgaaagttgatatcagctttaatgtacagaatggcgtgagagcagctgacctcatcaaagattttaccaagaaatatcctgtattgccatacttggttttagtattgaaacaattcctattgcagagggaccttaatgaagtatttacaggtggaattggttcttatagtctctttttaatggcagtcagtttccttcagttacatcccagggaagatgcttgcatccccaatacaaactatggtgttctcttaatagaattttttgaattatatggacgacacttcaattatttaaagactggcatccggataaaggatggtggttcatatgtggccaaagatgaagtacagaaaaatatgctagatggctacaggccatcaatgctttatatcgaagatcctttacaaccaggtaacgatgttggaaggagttcatatggggccatgcaagtgaagcaggcctttgattatgcctacgttgttttgagtcatgctgtatcaccaatagcaaagtactatcccaacaatgaaacagaaagcatactaggtagaataattagagtaacagatgaagttgccacatatagagattggatatcaaagcagtggggcttgaagaatagacctgagccttcatgcaatggtccagtgtcgtcctcttctgccacacagtccagctctagtgatgtagattccgatgcaacaccatgcaaaaccccgaaacagctgctttgccgtccgtccactgggaaccgagtagggtcgcaagatgtatccttggagtcctctcaggcagttgggaaaatgcaaagcacccaaaccactaacacatccaacagcaccaacaaatctcagcatggatcagcaaggctctttcgttcttccagcaaaggcttccaaggtacaactcaaacaagccatggttccttgatgacaaacaaacaacatcaaggcaaatccaataatcagtattaccatggcaaaaagaggaaacacaagagggacgcgcccctctcagacctctgtagatagtcagcgctgcgcggtggactgtcttctctgtgcaatgatctcatgctcaggacagttgcgcagggactcctgggagatattcaggagcctcacactgttcagacgttgacttagcaactgcgttttttcccagctcgccacagaatggatcatgaagactgacaactgcaaaaaaaacaaaacaaaacaaaaaaaaaagcaagcaaaaaagagggaaaaaaaaggctgcttatttgataagtcatatgctacaacagggtcattttaagatttaaagcttgaatgtaaaataaatatatttctcattggctttatgcagagttatagggaatagtattcagtgttggtagggtgatagaaacaaaaaacagtatcagaggatgaggtggggaaggaaaacaaaggtatctgataggaagtccagattccaaaggggaaagtgatctgtgcatgttttttttttaaatatttttgcatatatttaccattttattgtgtgtatatatagaagaccatataggagattgatatttgtaatagtggatttgttaataatactttttacataacattactgtttaaattgtaaacagattttttctcaggattagtttgaaaaataatctaaattgtcatcttaacatccatatatagggaagtgattagttctattactcaatttgtttttctcagcattgaaatgacttaatagaacccttgtgtcctgctgcaaaaatttttcctctctaaagaaaaggtttatggtggcaaatgatgtttattttattttgtaaaaaaaaaaaaatgtactatgtacttttgtgtaaacactgaaaaatctctggtcatctccgagaattaacttgcaactgttttctatagtgctgtcgtcttgggcaatgggcaattacatgactttgtgtttgcttcctttgcagtcttttttttttccccccatttcttcctaataggaaaaaaaaaaaaaaaaaggtcacccatgtctggtctcattcctgttgcagtgaaacttcgagttccacagactttgcatgctggcttctctaaccctgtgtgctgcgtgtgcctgtttctcatctcttattctttttaaaattcatgcttaactactgtgggagaataactgtaaacagctttaattaaatcatacttataaaaaactattttcttatattccactctatgcttttggtattgttgatctttacaaattaaatggtctttgataatggatctattttgtattgccttattaagaccaaatacttcttgtcatcccattctttatcctcttctttcatggaattgttatcgttaattaaaacttttttaaacattggcttgtttcaatcatactgtaaattttggttgtagtcagctttgagtgcaatgagatgtataattctgttatcattacctgttgagtttgaaactcagttgggaatatttaatataatagaatgtaagtgacatttctgaaaatgctttctttcagggtgaaagctcttatgtttagcatcaatgtgtatggctctgttaaatgcagccatttctgagacgagattcttttatatatatatacatataaagtactattggcttttaggagtttcttttatatacatttatgaaatactgaagaccaatcagaccattaatggacacttagtgtaactttttataaagaaaataatgctaaagtaagaccaaaactgatgtcatcactgaaattaacaattttcaatatgttcatattttaattcacaatggaaaaatgtgttccaaaactggaaactcatagtactcgtgtaaactgtggaagatttcaaatgtgatgttattttgacaatgttttaaattttagagtcacattttattctgatcagaatttttattgagatgttgagcttttgtttttgaaactagtttgtcataacattgtgcataatcacagtatttattttctaggacaattgtgaatgtgtagacttatgtttactgctaagggaacaattatttataaaataatattaaatccagtattagctgcctatttcagacacttaatacttgcagagatctatgttacatttaccacactgaagttttttttgttgttttttgtttgtttttaaagaatcaccctcattgttgaaagtaaatgtactcttagggtgcgaatattagtgttccaataagcatgtgattatattaaggtggtggtagcgggaagataattctgattccattgggaatcttaggttttcgtaaatttattgggaaaatagtttttcctgtactgctgaagtttctttttggtaaacagtatctttctaaaagaaaaaagcatgaaggagaaattgaggtgtgtatacatttcctcaaatgaccagcattgtattcgtgaatactgtgtatcttgcagtgaacagtgtggaagctgttcatttttcaatctgaagtaaaatactttcaagaactttt

SEQ ID NO: 25605 - protein, 284 aa, Homo sapiens
MAVSFLQLHPREDACIPNTNYGVLLIEFFELYGRHFNYLKTGIRIKDGGSYVAKDEVQKNMLDGYRPSMLYIEDPLQPGNDVGRSSYGAMQVKQAFDYAYVVLSHAVSPIAKYYPNNETESILGRIIRVTDEVATYRDWISKQWGLKNRPEPSCNGPVSSSSATQSSSSDVDSDATPCKTPKQLLCRPSTGNRVGSQDVSLESSQAVGKMQSTQTTNTSNSTNKSQHGSARLFRSSSKGFQGTTQTSHGSLMTNKQHQGKSNNQYYHGKKRKHKRDAPLSDLCR

SEQ ID NO: 25606 - DNA, 3834 bp, Homo sapiens
gacatcgacctagtggtgtttgggaagtgggagaacctacccctctggactctggaagaagctcttcggaaacacaaagtcgcagatgaggattcggtgaaagttttagacaaagcaactgtacctattattaaattaacagattcttttactgaagtgaaagttgatatcagctttaatgtacagaatggcgtgagagcagctgacctcatcaaagattttaccaagaaatatcctgtattgccatacttggttttagtattgaaacaattcctattgcagagggaccttaatgaagtatttacaggtggaattggttcttatagtctctttttaatggcagtcagtttccttcagttacatcccagggaagatgcttgcatccccaatacaaactatggtgttctcttaatagaattttttgaattatatggacgacacttcaattatttaaagactggcatccggataaaggatggtggttcatatgtggccaaagatgaagtacagaaaaatatgctagatggctacaggccatcaatgctttatatcgaagatcctttacaaccaggtaacgatgttggaaggagttcatatggggccatgcaagtgaagcaggcctttgattatgcctacgttgttttgagtcatgctgtatcaccaatagcaaagtactatcccaacaatgaaacagaaagcatactaggtagaataattagagtaacagatgaagttgccacatatagagattggatatcaaagcagtggggcttgaagaatagacctgagccttcatgcaatggaaatggtgttaccttgatagtagatactcagcagttagataaatgtaataataatctatctgaagaaaatgaagcccttggaaaatgtagaagtaaaacctcggaatctcttagtaaacactcttcaaactcttcatcaggtccagtgtcgtcctcttctgccacacagtccagctctagtgatgtagattccgatgcaacaccatgcaaaaccccgaaacagctgctttgccgtccgtccactgggaaccgagtagggtcgcaagatgtatccttggagtcctctcaggcagttgggaaaatgcaaagcacccaaaccactaacacatccaacagcaccaacaaatctcagcatggatcagcaaggctctttcgttcttccagcaaaggcttccaaggtacaactcaaacaagccatggttccttgatgacaaacaaacaacatcaaggcaaatccaataatcagtattaccatggcaaaaagaggaaacacaagagggacgcgcccctctcagacctctgtagatagtcagcgctgcgcggtggactgtcttctctgtgcaatgatctcatgctcaggacagttgcgcagggactcctgggagatattcaggagcctcacactgttcagacgttgacttagcaactgcgttttttcccagctcgccacagaatggatcatgaagactgacaactgcaaaaaaaacaaaacaaaacaaaaaaaaaagcaagcaaaaaagagggaaaaaaaaggctgcttatttgataagtcatatgctacaacagggtcattttaagatttaaagcttgaatgtaaaataaatatatttctcattggctttatgcagagttatagggaatagtattcagtgttggtagggtgatagaaacaaaaaacagtatcagaggatgaggtggggaaggaaaacaaaggtatctgataggaagtccagattccaaaggggaaagtgatctgtgcatgttttttttttaaatatttttgcatatatttaccattttattgtgtgtatatatagaagaccatataggagattgatatttgtaatagtggatttgttaataatactttttacataacattactgtttaaattgtaaacagattttttctcaggattagtttgaaaaataatctaaattgtcatcttaacatccatatatagggaagtgattagttctattactcaatttgtttttctcagcattgaaatgacttaatagaacccttgtgtcctgctgcaaaaatttttcctctctaaagaaaaggtttatggtggcaaatgatgtttattttattttgtaaaaaaaaaaaaatgtactatgtacttttgtgtaaacactgaaaaatctctggtcatctccgagaattaacttgcaactgttttctatagtgctgtcgtcttgggcaatgggcaattacatgactttgtgtttgcttcctttgcagtcttttttttttccccccatttcttcctaataggaaaaaaaaaaaaaaaaaggtcacccatgtctggtctcattcctgttgcagtgaaacttcgagttccacagactttgcatgctggcttctctaaccctgtgtgctgcgtgtgcctgtttctcatctcttattctttttaaaattcatgcttaactactgtgggagaataactgtaaacagctttaattaaatcatacttataaaaaactattttcttatattccactctatgcttttggtattgttgatctttacaaattaaatggtctttgataatggatctattttgtattgccttattaagaccaaatacttcttgtcatcccattctttatcctcttctttcatggaattgttatcgttaattaaaacttttttaaacattggcttgtttcaatcatactgtaaattttggttgtagtcagctttgagtgcaatgagatgtataattctgttatcattacctgttgagtttgaaactcagttgggaatatttaatataatagaatgtaagtgacatttctgaaaatgctttctttcagggtgaaagctcttatgtttagcatcaatgtgtatggctctgttaaatgcagccatttctgagacgagattcttttatatatatatacatataaagtactattggcttttaggagtttcttttatatacatttatgaaatactgaagaccaatcagaccattaatggacacttagtgtaactttttataaagaaaataatgctaaagtaagaccaaaactgatgtcatcactgaaattaacaattttcaatatgttcatattttaattcacaatggaaaaatgtgttccaaaactggaaactcatagtactcgtgtaaactgtggaagatttcaaatgtgatgttattttgacaatgttttaaattttagagtcacattttattctgatcagaatttttattgagatgttgagcttttgtttttgaaactagtttgtcataacattgtgcataatcacagtatttattttctaggacaattgtgaatgtgtagacttatgtttactgctaagggaacaattatttataaaataatattaaatccagtattagctgcctatttcagacacttaatacttgcagagatctatgttacatttaccacactgaagttttttttgttgttttttgtttgtttttaaagaatcaccctcattgttgaaagtaaatgtactcttagggtgcgaatattagtgttccaataagcatgtgattatattaaggtggtggtagcgggaagataattctgattccattgggaatcttaggttttcgtaaatttattgggaaaatagtttttcctgtactgctgaagtttctttttggtaaacagtatctttctaaaagaaaaaagcatgaaggagaaattgaggtgtgtatacatttcctcaaatgaccagcattgtattcgtgaatactgtgtatcttgcagtgaacagtgtggaagctgttcatttttcaatctgaagtaaaatactttcaagaactttt

SEQ ID NO: 25607 - protein, 331 aa, Homo sapiens
MAVSFLQLHPREDACIPNTNYGVLLIEFFELYGRHFNYLKTGIRIKDGGSYVAKDEVQKNMLDGYRPSMLYIEDPLQPGNDVGRSSYGAMQVKQAFDYAYVVLSHAVSPIAKYYPNNETESILGRIIRVTDEVATYRDWISKQWGLKNRPEPSCNGNGVTLIVDTQQLDKCNNNLSEENEALGKCRSKTSESLSKHSSNSSSGPVSSSSATQSSSSDVDSDATPCKTPKQLLCRPSTGNRVGSQDVSLESSQAVGKMQSTQTTNTSNSTNKSQHGSARLFRSSSKGFQGTTQTSHGSLMTNKQHQGKSNNQYYHGKKRKHKRDAPLSDLCR

SEQ ID NO: 25608 - DNA, 4380 bp, Homo sapiens
gacatcgacctagtggtgtttgggaagtgggagaacctacccctctggactctggaagaagctcttcggaaacacaaagtcgcagatgaggattcggtgaaagttttagacaaagcaactgtacctattattaaattaacagattcttttactgaagtgaaagttgatatcagctttaatgtacagaatggcgtgagagcagctgacctcatcaaagattttaccaagaaatatcctgtattgccatacttggttttagtattgaaacaattcctattgcagagggaccttaatgaagtatttacaggtggaattggttcttatagtctctttttaatggcagtcagtttccttcagttacatcccagggaagatgcttgcatccccaatacaaactatggtgttctcttaatagaattttttgaattatatggacgacacttcaattatttaaagactggcatccggataaaggatggtggttcatatgtggccaaagatgaagtacagaaaaatatgctagatggctacaggccatcaatgctttatatcgaagatcctttacaaccaggtaacgatgttggaaggagttcatatggggccatgcaagtgaagcaggcctttgattatgcctacgttgttttgagtcatgctgtatcaccaatagcaaagtactatcccaacaatgaaacagaaagcatactaggtagaataattagagtaacagatgaagttgccacatatagagattggatatcaaagcagtggggcttgaagaatagacctgagccttcatgcaatggaaatggtgttaccttgatagtagatactcagcagttagataaatgtaataataatctatctgaagaaaatgaagcccttggaaaatgtagaagtaaaacctcggaatctcttagtaaacactcttcaaactcttcatcaggtccagtgtcgtcctcttctgccacacagtccagctctagtgatgtagattccgatgcaacaccatgcaaaaccccgaaacagctgctttgccgtccgtccactgggaaccgagtagggtcgcaagatgtatccttggagtcctctcaggcagttgggaaaatgcaaagcacccaaaccactaacacatccaacagcaccaacaaatctcagcatggatcagcaaggctctttcgttcttccagcaaaggcttccaaggtacaactcaaacaagccatggttccttgatgacaaacaaacaacatcaaggcaaatccaataatcagtattaccatggcaaaaagaggaaacacaagagggacgcgcccctctcagacctctgtagatagtcagcgctgcgcggtggactgtcttctctgtgcaatgatctcatgctcaggacagttgcgcagggactcctgggagatattcaggagcctcacactgttcagacgttgacttagcaactgcgttttttcccagctcgccacagaatggatcatgaagactgacaactgcaaaaaaaacaaaacaaaacaaaaaaaaaagcaagcaaaaaagagggaaaaaaaaggctgcttatttgataagtcatatgctacaacagggtcattttaagatttaaagcttgaatgtaaaataaatatatttctcattggctttatgcagagttatagggaatagtattcagtgttggtagggtgatagaaacaaaaaacagtatcagaggatgaggtggggaaggaaaacaaaggtatctgataggaagtccagattccaaaggggaaagtgatctgtgcatgttttttttttaaatatttttgcatatatttaccattttattgtgtgtatatatagaagaccatataggagattgatatttgtaatagtggatttgttaataatactttttacataacattactgtttaaattgtaaacagattttttctcaggattagtttgaaaaataatctaaattgtcatcttaacatccatatatagggaagtgattagttctattactcaatttgtttttctcagcattgaaatgacttaatagaacccttgtgtcctgctgcaaaaatttttcctctctaaagaaaaggtttatggtggcaaatgatgtttattttattttgtaaaaaaaaaaaaatgtactatgtacttttgtgtaaacactgaaaaatctctggtcatctccgagaattaacttgcaactgttttctatagtgctgtcgtcttgggcaatgggcaattacatgactttgtgtttgcttcctttgcagtcttttttttttccccccatttcttcctaataggaaaaaaaaaaaaaaaaaggtcacccatgtctggtctcattcctgttgcagtgaaacttcgagttccacagactttgcatgctggcttctctaaccctgtgtgctgcgtgtgcctgtttctcatctcttattctttttaaaattcatgcttaactactgtgggagaataactgtaaacagctttaattaaatcatacttataaaaaactattttcttatattccactctatgcttttggtattgttgatctttacaaattaaatggtctttgataatggatctattttgtattgccttattaagaccaaatacttcttgtcatcccattctttatcctcttctttcatggaattgttatcgttaattaaaacttttttaaacattggcttgtttcaatcatactgtaaattttggttgtagtcagctttgagtgcaatgagatgtataattctgttatcattacctgttgagtttgaaactcagttgggaatatttaatataatagaatgtaagtgacatttctgaaaatgctttctttcagggtgaaagctcttatgtttagcatcaatgtgtatggctctgttaaatgcagccatttctgagacgagattcttttatatatatatacatataaagtactattggcttttaggagtttcttttatatacatttatgaaatactgaagaccaatcagaccattaatggacacttagtgtaactttttataaagaaaataatgctaaagtaagaccaaaactgatgtcatcactgaaattaacaattttcaatatgttcatattttaattcacaatggaaaaatgtgttccaaaactggaaactcatagtactcgtgtaaactgtggaagatttcaaatgtgatgttattttgacaatgttttaaattttagagtcacattttattctgatcagaatttttattgagatgttgagcttttgtttttgaaactagtttgtcataacattgtgcataatcacagtatttattttctaggacaattgtgaatgtgtagacttatgtttactgctaagggaacaattatttataaaataatattaaatccagtattagctgcctatttcagacacttaatacttgcagagatctatgttacatttaccacactgaagttttttttgttgttttttgtttgtttttaaagaatcaccctcattgttgaaagtaaatgtactcttagggtgcgaatattagtgttccaataagcatgtgattatattaaggtggtggtagcgggaagataattctgattccattgggaatcttaggttttcgtaaatttattgggaaaatagtttttcctgtactgctgaagtttctttttggtaaacagtatctttctaaaagaaaaaagcatgaaggagaaattgaggtgtgtatacatttcctcaaatgaccagcattgtattcgtgaatactgtgtatcttgcagtgaacagtgtggaagctgttcatttttcaatctgaagtaaaatactttcaagaacttttagtttgcctgctcatttgttttatacatttcatctatttgactcctatcttatttcttttttgagttttaatacttcctatattttgtgaatatatcagaaatgtgtcatttatatattagagtccattcatatccatgaatcataaccttcctttgctaatacttgttgaatgggattttacaaattctccctcactctggtgacatttctcaggcagtcatgtatgtgtacctggccattagaaatattaatatttaaagactgttttttagaggagctgatgggttggtgaggtgtcagcacaaaatcttactggttatgttttgatgataaaagtatatccattttttccctccagctttaaggtgactgtgaaggtgcctggttttgaatgtctttgtttggtttggagatgtcgcactcagttttcaaatctagcttggatctgtaggacctatgttttttacaagtaattgccctccagtcttcaacagttgattctgttttatttttatcctgttttgagtgtactttacctttactt

SEQ ID NO: 25609 - protein, 331 aa, Homo sapiens; identical to SEQ ID NO: 25607

SEQ ID NO: 25610 - DNA, 4239 bp, Homo sapiens
gacatcgacctagtggtgtttgggaagtgggagaacctacccctctggactctggaagaagctcttcggaaacacaaagtcgcagatgaggattcggtgaaagttttagacaaagcaactgtacctattattaaattaacagattcttttactgaagtgaaagttgatatcagctttaatgtacagaatggcgtgagagcagctgacctcatcaaagattttaccaagaaatatcctgtattgccatacttggttttagtattgaaacaattcctattgcagagggaccttaatgaagtatttacaggtggaattggttcttatagtctctttttaatggcagtcagtttccttcagttacatcccagggaagatgcttgcatccccaatacaaactatggtgttctcttaatagaattttttgaattatatggacgacacttcaattatttaaagactggcatccggataaaggatggtggttcatatgtggccaaagatgaagtacagaaaaatatgctagatggctacaggccatcaatgctttatatcgaagatcctttacaaccaggtaacgatgttggaaggagttcatatggggccatgcaagtgaagcaggcctttgattatgcctacgttgttttgagtcatgctgtatcaccaatagcaaagtactatcccaacaatgaaacagaaagcatactaggtagaataattagagtaacagatgaagttgccacatatagagattggatatcaaagcagtggggcttgaagaatagacctgagccttcatgcaatggtccagtgtcgtcctcttctgccacacagtccagctctagtgatgtagattccgatgcaacaccatgcaaaaccccgaaacagctgctttgccgtccgtccactgggaaccgagtagggtcgcaagatgtatccttggagtcctctcaggcagttgggaaaatgcaaagcacccaaaccactaacacatccaacagcaccaacaaatctcagcatggatcagcaaggctctttcgttcttccagcaaaggcttccaaggtacaactcaaacaagccatggttccttgatgacaaacaaacaacatcaaggcaaatccaataatcagtattaccatggcaaaaagaggaaacacaagagggacgcgcccctctcagacctctgtagatagtcagcgctgcgcggtggactgtcttctctgtgcaatgatctcatgctcaggacagttgcgcagggactcctgggagatattcaggagcctcacactgttcagacgttgacttagcaactgcgttttttcccagctcgccacagaatggatcatgaagactgacaactgcaaaaaaaacaaaacaaaacaaaaaaaaaagcaagcaaaaaagagggaaaaaaaaggctgcttatttgataagtcatatgctacaacagggtcattttaagatttaaagcttgaatgtaaaataaatatatttctcattggctttatgcagagttatagggaatagtattcagtgttggtagggtgatagaaacaaaaaacagtatcagaggatgaggtggggaaggaaaacaaaggtatctgataggaagtccagattccaaaggggaaagtgatctgtgcatgttttttttttaaatatttttgcatatatttaccattttattgtgtgtatatatagaagaccatataggagattgatatttgtaatagtggatttgttaataatactttttacataacattactgtttaaattgtaaacagattttttctcaggattagtttgaaaaataatctaaattgtcatcttaacatccatatatagggaagtgattagttctattactcaatttgtttttctcagcattgaaatgacttaatagaacccttgtgtcctgctgcaaaaatttttcctctctaaagaaaaggtttatggtggcaaatgatgtttattttattttgtaaaaaaaaaaaaatgtactatgtacttttgtgtaaacactgaaaaatctctggtcatctccgagaattaacttgcaactgttttctatagtgctgtcgtcttgggcaatgggcaattacatgactttgtgtttgcttcctttgcagtcttttttttttccccccatttcttcctaataggaaaaaaaaaaaaaaaaaggtcacccatgtctggtctcattcctgttgcagtgaaacttcgagttccacagactttgcatgctggcttctctaaccctgtgtgctgcgtgtgcctgtttctcatctcttattctttttaaaattcatgcttaactactgtgggagaataactgtaaacagctttaattaaatcatacttataaaaaactattttcttatattccactctatgcttttggtattgttgatctttacaaattaaatggtctttgataatggatctattttgtattgccttattaagaccaaatacttcttgtcatcccattctttatcctcttctttcatggaattgttatcgttaattaaaacttttttaaacattggcttgtttcaatcatactgtaaattttggttgtagtcagctttgagtgcaatgagatgtataattctgttatcattacctgttgagtttgaaactcagttgggaatatttaatataatagaatgtaagtgacatttctgaaaatgctttctttcagggtgaaagctcttatgtttagcatcaatgtgtatggctctgttaaatgcagccatttctgagacgagattcttttatatatatatacatataaagtactattggcttttaggagtttcttttatatacatttatgaaatactgaagaccaatcagaccattaatggacacttagtgtaactttttataaagaaaataatgctaaagtaagaccaaaactgatgtcatcactgaaattaacaattttcaatatgttcatattttaattcacaatggaaaaatgtgttccaaaactggaaactcatagtactcgtgtaaactgtggaagatttcaaatgtgatgttattttgacaatgttttaaattttagagtcacattttattctgatcagaatttttattgagatgttgagcttttgtttttgaaactagtttgtcataacattgtgcataatcacagtatttattttctaggacaattgtgaatgtgtagacttatgtttactgctaagggaacaattatttataaaataatattaaatccagtattagctgcctatttcagacacttaatacttgcagagatctatgttacatttaccacactgaagttttttttgttgttttttgtttgtttttaaagaatcaccctcattgttgaaagtaaatgtactcttagggtgcgaatattagtgttccaataagcatgtgattatattaaggtggtggtagcgggaagataattctgattccattgggaatcttaggttttcgtaaatttattgggaaaatagtttttcctgtactgctgaagtttctttttggtaaacagtatctttctaaaagaaaaaagcatgaaggagaaattgaggtgtgtatacatttcctcaaatgaccagcattgtattcgtgaatactgtgtatcttgcagtgaacagtgtggaagctgttcatttttcaatctgaagtaaaatactttcaagaacttttagtttgcctgctcatttgttttatacatttcatctatttgactcctatcttatttcttttttgagttttaatacttcctatattttgtgaatatatcagaaatgtgtcatttatatattagagtccattcatatccatgaatcataaccttcctttgctaatacttgttgaatgggattttacaaattctccctcactctggtgacatttctcaggcagtcatgtatgtgtacctggccattagaaatattaatatttaaagactgttttttagaggagctgatgggttggtgaggtgtcagcacaaaatcttactggttatgttttgatgataaaagtatatccattttttccctccagctttaaggtgactgtgaaggtgcctggttttgaatgtctttgtttggtttggagatgtcgcactcagttttcaaatctagcttggatctgtaggacctatgttttttacaagtaattgccctccagtcttcaacagttgattctgttttatttttatcctgttttgagtgtactttacctttactt

SEQ ID NO: 25611 - protein, 284 aa, Homo sapiens; identical to SEQ ID NO: 25605

SEQ ID NO: 25612 - DNA, 1609 bp, Homo sapiens
tcctttctgcccttggacgccgccgaagaagcatcgttaaagtctctcttcaccctgccgtcatgtctaagtcagagtctcctaaagagcccgaacagctgaggaagctcttcattggagggttgagctttgaaacaactgatgagagcctgaggagccattttgagcaatggggaacgctcacggactgtgtggtaatgagagatccaaacacgaagcgctccaggggctttgggtttgtcacatatgccactgtggaggaggtggatgcagctatgaatgcaaggccacacaaggtggatggaagagttgtggaaccaaagagagctgtctccagagaagattctcaaagaccagatgcccacttaactgtgaaaaagatatttgttggtggcattaaagaagacactgaagaacatcacctaagagattattttgaacagtatggaaaaattgaagtgattgaaatcatgactgacagaggcagtggcaagaaaaggggctttgcctttgtaacctttgacgaccatgactccgtggataagattgtcattcagaaataccatactgtgaatggccacaactgtgaagttagaaaagccctgtcaaagcaagagatggctagtgcttcatccagccaaagaggtcgaagtggttctggaaactttggtggtggtcgtggaggtggtttcggtgggaatgacaacttcggtcgtggaggaaacttcagtggtcgtggtggctttggtggcagccgtggtggtggtggatatggtggcagtggggatggctataatggatttggtaatgatggaagcaattttggaggtggtggaagctacaatgattttggcaattacaacaatcagtcttcaaattttggacccatgaagggaggaaattttgaaggcagaagctctggcccccatggcggtggaggccaatactttgcaaaaccacgaaaccaaggtggctatggcggttccagcagcagcagtagctatggcagtggcagaagattttaattaggaaacaaagcttagcaggagaggagagccagagaagtgacagggaagctacaggttacaacagatttgtgaactcagccaagcacagtggtggcagggcctagctgctacaaagaagacatgttttagacaaatactcatgtgtataggcaaaaaactcgaggactgtatttgtgactaattgtataacaggttattttagtttctgttctgtggaaagtgtaaagcattccaacaaagggttttaatgtagattttttttttttgcaccccatgctgttgattgctaaatgtaatagtctgatcgtgacgctggataaatgtcttttttttttaaaaaaaaaaaaaagatctttgcagaacacctattaattaattaattaattcactcattcagcaacatttttgagctgctgccctgttttcatgatgtgctacatgatagatttgtaaacacctgtctcaataaacttatagttgtgttggaataggtattattctcagttgcatcttcatgaaactcataataaattggtaataattacaatgtaagaaggattctgaggccacagaaagaatga

SEQ ID NO: 25613 - protein, 320 aa, Homo sapiens
MSKSESPKEPEQLRKLFIGGLSFETTDESLRSHFEQWGTLTDCVVMRDPNTKRSRGFGFVTYATVEEVDAAMNARPHKVDGRVVEPKRAVSREDSQRPDAHLTVKKIFVGGIKEDTEEHHLRDYFEQYGKIEVIEIMTDRGSGKKRGFAFVTFDDHDSVDKIVIQKYHTVNGHNCEVRKALSKQEMASASSSQRGRSGSGNFGGGRGGGFGGNDNFGRGGNFSGRGGFGGSRGGGGYGGSGDGYNGFGNDGSNFGGGGSYNDFGNYNNQSSNFGPMKGGNFEGRSSGPHGGGGQYFAKPRNQGGYGGSSSSSSYGSGRRF

SEQ ID NO: 25614 - DNA, 500 bp, Homo sapiens
cctttctgcccttggacgccgccgaagaagcatcgttaaagtctctcttcaccctgccgtcatgtctaagtcagagtctcctaaagagcccgaacagctgaggaagctcttcattggagggttgagctttgaaacaactgatgagagcctgaggagccattttgagcaatggggaacgctcacggactgtgtggtaatgagagatccaaacacgaagcgctccaggggctttgggtttgtcacatatgccactgtggaggaggtggatgcagctatgaatgcaagacatgttttagacaaatactcatgtgtataggcaaaaaactcgaggactgtatttgtgactaattgtataacaggttattttagtttctgttctgtggaaagtgtaaagcattccaacaaagggttttaatgtagattttttttttttgcaccccatgctgttgattgctaaatgtaatagtctgatcgtgacgctggataaatgtctttttttt

SEQ ID NO: 25615 - protein, 84 aa, Homo sapiens
MSKSESPKEPEQLRKLFIGGLSFETTDESLRSHFEQWGTLTDCVVMRDPNTKRSRGFGFVTYATVEEVDAAMNARHVLDKYSCV

SEQ ID NO: 25616 - DNA, 846 bp, Homo sapiens
cctttctgcccttggacgccgccgaagaagcatcgttaaagtctctcttcaccctgccgtcatgtctaagtcagagtctcctaaagagcccgaacagctgaggaagctcttcattggagggttgagctttgaaacaactgatgagagcctgaggagccattttgagcaatggggaacgctcacggactgtgtggtaatgagagatccaaacacgaagcgctccaggggctttgggtttgtcacatatgccactgtggaggaggtggatgcagctatgaatgcaaggccacacaaggtggatggaagactacaatgattttggcaattacaacaatcagtcttcaaattttggacccatgaagggaggaaattttgaaggcagaagctctggcccccatggcggtggaggccaatactttgcaaaaccacgaaaccaaggtggctatggcggttccagcagcagcagtagctatggcagtggcagaagattttaattaggaaacaaagcttagcaggagaggagagccagagaagtgacagggaagctacaggttacaacagatttgtgaactcagccaagcacagtggtggcagggcctagctgctacaaagaagacatgttttagacaaatactcatgtgtataggcaaaaaactcgaggactgtatttgtgactaattgtataacaggttattttagtttctgttctgtggaaagtgtaaagcattccaacaaagggttttaatgtagattttttttttttgcaccccatgctgttgattgctaaatgtaatagtctgatcgtgacgctggataaatgtcttttttttttaaaaaaaaaaaaaa

SEQ ID NO: 25617 - protein, 84 aa, Homo sapiens
MSKSESPKEPEQLRKLFIGGLSFETTDESLRSHFEQWGTLTDCVVMRDPNTKRSRGFGFVTYATVEEVDAAMNARPHKVDGRLQ

SEQ ID NO: 25618 - DNA, 435 bp, Homo sapiens
atttgttggtggcattaaagaagacactgaagaacatcacctaagagattattttgaacagtatggaaaaattgaagtgattgaaatcatgactgacagaggcagtggcaagaaaaggggctttgcctttgtaacctttgacgaccatgactccgtggataagattgtcattcagaaataccatactgtgaatggccacaactgtgaagttagaaaagccctgtcaaagcaagagatggctagtgcttcatccagccaaagaggtcgaagtggttctggaaactttggtggtggtcgtggaggaaacttcagtggtcgtggtggctttggtggcagccgtggtggtggtggatatggtggcagtggggatggctataatggatttggtaatgatggaagcaattttggaggtggtggaagctacaatgattttgg

SEQ ID NO: 25619 - protein, 114 aa, Homo sapiens
MTDRGSGKKRGFAFVTFDDHDSVDKIVIQKYHTVNGHNCEVRKALSKQEMASASSSQRGRSGSGNFGGGRGGNFSGRGGFGGSRGGGGYGGSGDGYNGFGNDGSNFGGGGSYND

SEQ ID NO: 25620 - DNA, 435 bp, Homo sapiens
tatctctggaacagtccccaaacgtcttgccaagggcacaggttttcagctttaaaggccatttcaatttaagaaaacaaaagatgatcctgtgaacactgtatcaggcatcattactggactgaaaaaaggatcacttgatggacatgcctggcgttttgtttagaagtatttcttctctggccttagaagattagttttcaaagcgatggtaaaatcattgatgtatgtcttttcaagaaaaagaaaaaaaaaagactcctaaatgccaaacatttgctctttggagcatagcaagaagaaagggagaggaccagacggccacatcctaagaacagagtattgtccaggtagctgtcgccccaaatgggatctctttccaggtctttttgttaaagcttttctttcctaaataaaacttaattttctctcgct

SEQ ID NO: 25621 - protein, 48 aa, Homo sapiens
MPNICSLEHSKKKGRGPDGHILRTEYCPGSCRPKWDLFPGLFVKAFLS

SEQ ID NO: 25622 - DNA, 814 bp, Homo sapiens
ggccatttcaatttaagaaaacaaaagatgatcctgtgaacactgtatcaggcatcattactggactgaaaaaaggatcacttgatggacatgcctggcgttttgtttagaagtatttcttctctggccttagaagattagttttcaaagcgatggtaaaatcattgatgtatgtcttttcaagaaaaagaaaaaaaaaagactcctaaatgccaaacatttgctctttggagcatagcaagaagaaagggagaggaccagacggccacatcctaagaacagagtattgtccagtgggtgtctgccgcttcctcatgccttgctataagaaagctcgtaaaaaggaagaaatctaaaactagaacaattctatattcacagtttctctgacattaaaaagtactcaagagaagagttttttttttaatttaaagaaacatctgtccaacatggatgattttgaagaagagcactcccctttgtccagagccatagaaagataatttaattacacttatcattacaccctccccaaattagactacaaatggatcttgatttctcatgattttttcactttacaaaataatcttaaagtttaggaggaagaaaagatgcttaagaataatcaagaatgcttggaaaagaggaagaaaaagggaaatttctcctactgaaccggtagtgctgggaagggaagagcgtggtccctttaaatgacagggaagtggggcagggaagtgctgggtagagaaaggcgaggtctctgtctagggctccacccccagggacctaggtgaggacaggcacttct

SEQ ID NO: 25623 - protein, 48 aa, Homo sapiens
MPNICSLEHSKKKGRGPDGHILRTEYCPVGVCRFLMPCYKKARKKEEI

SEQ ID NO: 25624 - DNA, 745 bp, Homo sapiens
ggagcccagcgagggtgcctacaagaggagtcaaagggcaaaggatgaaaaaattgaggctcaaagaagtccaccaaattgagagtgaagtaggggaaacagcatttaacgcttacattctaatgatttgtgtaagagcagcaggacaagctatacaaagaaaaaggtggaattatcaggatggaattaaagatgcttccaaacagaggggatatctcaagccatgactcagaggtaagagtaagagactatgatgtgcacaggagctgtttaaaaagttcactcacctctactcattcatagagacacatttcaaataccacctcctatcagaagcccccataaattatcaccataacattctctccattcctccttgagggaggtaaaatgtaacaattatcagataaaaagatctttaggaacctaaaactcaaaagatagttcattttaggaatgaaaatgggtctgcagcctgtgtgaacccataaatcatggtattataggaccagtgctcttcctgccaacattttccctaactgccagcttgtgggtgccaagcactctcttgcattataggatttaacacaggacctgacttaatatagcaatgttttcttatcatgtctcatcatttcttctttcttctggatacaccaacgttttgtcctccttttttttttttctgttgtaaatgggaaaaagcttgaaaaagactcgatggctatcatttcaatacatagaa

SEQ ID NO: 25625 - protein, 60 aa, Homo sapiens
MKKLRLKEVHQIESEVGETAFNAYILMICVRAAGQAIQRKRWNYQDGIKDASKQRGYLKP

SEQ ID NO: 25626 - DNA, 552 bp, Homo sapiens
gctatctgcagtggagccgccaccaaaatgcagattttcgtgaaaacccttacggggaagaccatcaccctcgaggttgaaccctcggatacgatagaaaatgtaaaggccaagatccagggtaaggaaggaattcctcctgatcagcagagactgatctttgctggcaagcagctggaagatggacgtactttgtctgactacaatattcaaaaggagtctactcttcatcttgtgttgagacttctggtggtgctaagaaaaggaagaagaagtcttacaccactcccaagaagaataagcacaagagaaagaaggttaagctggctgtcctgaaatactataaggtggatgagaatggcaaaattagtcgccttcgtcgagagtgcccttctgatgaatgtggtgctggggtgtttatggcaagccactttgacagacattattgtggcaaatgttgtctgacttactgcttcaacaaaccagaagacaagtaactgtatgagttaataaaagacatgaactaaaaaaaaaaaaaaaaaagaagaagaa

SEQ ID NO: 25627 - protein, 102 aa, Homo sapiens [sequence omitted]

SEQ ID NO: 25628 - DNA, 525 bp, Homo sapiens
gctatctgcagtggagccgccaccaaaatgcagattttcgtgaaaacccttacggggaagaccatcaccctcgaggttgaaccctcggatacgatagaaaatgtaaaggccaagatccagggtaaggaaggaattcctcctgatcagcagagactgatctttgctggcaagcagctggaagatggacgtactttgtctgactacaatattcaaaaggagtctactcttcatcttgtgttgagacttctggtggtgctaagaaaaggaagaagaagtcttacaccactcccaagaagaataagcacaagagaaagaaggttaagctggctgtcctgaaatactataaggtggatgagaatggcaaaattagtcgccttcgtcgagagtgcccttctgatgaatgtggtgctggggtgtttatggcaagccactttgacagacattattgtggcaaatgttgtctgacttactgcttcaacaaaccagaagacaagtaactgtatgagttaataaaagacatgaact

SEQ ID NO: 25629 - protein, 102 aa, Homo sapiens [sequence omitted]

SEQ ID NO: 25630 - DNA, 2099 bp, Homo sapiens
ttcaaattcacttattctagtagtttgtagattcctttgaattttttatgtctgtaatcatagaagcattctatgcttgtgcagataaagcatttttcagtgttaaaagttttattgacttctttttctggagtttccatcttctcattttgtcttctccttttggtatcaagtgctaagaatagcaccacttggaaatatgacaggactgcagccagtgtggataattatcattttcaactacagatctctctcagccttgtctgcttatcacactggcttgatcgcgcccatgaagatccgcacagaggcccctgggaaccttcgtttatacagtgggagccccactcgcagcgagaaagagcaggtctccatcagctccttctactacaaggagcggaaatcaagacgatggaaaagtaagcgtgagggatcagactctggcaatcgacagatcaaggctgctgggaaagtcatcatccaggatattgcttgcctcctgcctgttcacaaatcgctgggagagctgtacatattgaatgtgaatgatattcaggaaacatgtcagaagaatgccgcctctgccttgctcgttggaagaaaggatcttgtccaggtttggtcgctggctacggtagctacagatctttgccttggtccgaaatctgacccagatttggaaacaccctgggctcgacatccatttgggcggcagctgctggagtccctgttggctcactattgccggctccgggatgttcagacactggcgatgctctgtagcgtgtttgaagcccagtctcggcctcaggggctaccaaacccctttgggccttttcctaaccgttcttctaatcttgtggtgtcccatagtcgatatcctagctttacctcttctggttcctgctccagtatgtcagacccagggctcaacactggcggctggaacatagcgggaagagaggcagagcacttgtcctccccttggggagaatcctcaccagaagagctccgctttgggagtctgacctacagtgatccccgtgagcgagaacgcgaccagcatgataaaaataaaaggctcctggaccccgccaatacccagcaatttgatgactttaagaaatgctatggggaaatcctctaccgttggggtctgagagagaagcgagctgaagtgttgaagtttgtctcctgtcctcctgaccctcacaaagggatcgagttcggcgtgtactgcagccactgccggagtgaggtccgtggcacgcagtgtgccatctgcaaaggcttcacgttccagtgtgccatctgtcacgtggctgtgcggggatcgtccaatttctgcctgacctgtgggcacggtggccacaccagccacatgatggagtggtttcggacccaggaggtgtgtcccaccgggtgtgggtgccactgcctgcttgaaagcactttctgaacctacagaagttgggtattgtctgaaatcccagaggacccataagtgccggtgacaagctgtctgtcaggggagaggctccagaacctgggttcgtccccagtgagaccggaggatgatcccccaaggactgcgcagcatcagctcttggtgggcctctgccttctcttctgtttggccacctggtgtggatgtcactgtgtgaagataaggacagaagtgcagagctgcgctttgtgtgttgtctatgtcggctgagctaccaaggtggaagttttcatggagaaaagcacctggctccagggccagtgttacagtgttaccctgtaaggtgttagccttaaaccaccgagcagcgttctcttgatgccagtgcagagaccagagtcagatgcccgaggacagtgggtaggaatttcatcaacaaatggacctatggcatcatggctttagaagctggtacatttactgagctgatggacagtggccttctaaaatatgacacttaaattgtaaatatgcactgtacttaaggattcttaagatgtatttttttgttatttctcctccagctgctatcccttggctaataaaattctagtaatttgaaaaaaaaaaaaaagagagaaagttaaacaac

SEQ ID NO: 25631 - protein, 419 aa, Homo sapiens
MTGLQPVWIIIIFNYRSLSALSAYHTGLIAPMKIRTEAPGNLRLYSGSPTRSEKEQVSISSFYYKERKSRRWKSKREGSDSGNRQIKAAGKVIIQDIACLLPVHKSLGELYILNVNDIQETCQKNAASALLVGRKDLVQVWSLATVATDLCLGPKSDPDLETPWARHPFGRQLLESLLAHYCRLRDVQTLAMLCSVFEAQSRPQGLPNPFGPFPNRSSNLVVSHSRYPSFTSSGSCSSMSDPGLNTGGWNIAGREAEHLSSPWGESSPEELRFGSLTYSDPRERERDQHDKNKRLLDPANTQQFDDFKKCYGEILYRWGLREKRAEVLKFVSCPPDPHKGIEFGVYCSHCRSEVRGTQCAICKGFTFQCAICHVAVRGSSNFCLTCGHGGHTSHMMEWFRTQEVCPTGCGCHCLLESTF

SEQ ID NO: 25632 - DNA, 2652 bp, Homo sapiens
tgcacactgaagatacagatcaccagcacactgcaagccatggggaggaagaaggtaatttgtcaaactgatgtctcaggtaaggtgccactctacgcattgcagagttgtggcagataccccagacctgttctctgtttcattttcaaaaatgctttccaacattgaacttctctctcctgctagccctaaaagaagatccccctagaaatctcctggaagagaggaaatcagatcaactggggctgcctcagaccttgcagcaggaattctccctgatcaatgtgcaaatccggaatgtcaatgtggagatggatgcggcagacaggagctgcacagtgtctgtgcactgcagcaaccatcgtgtcaagatgctggtgaagttccctgcacagtacccaaacaacgccgccccttccttccagtttattaaccccacaaccatcacatccaccatgaaagctaagctgctgaagatcctgaaggacacagccctgcagaaagtgaagcgtggccagagctgcctggagccctgcctgcgccagctcgtctcctgccttgagtcctttgtgaaccaggaagacagcgcttccagcaacccgtttgcactccccaactctgtcactccccccttaccgacgtttgcgcgggtgaccacggcttacgggtcgtaccaggacgccaacattccctttcctaggacttctggggccaggttctgcggagcaggttacctggtatatttcacaaggcccatgacaatgcatcgggcggtgtctcccacagagcctactccgagatctctctcagccttgtctgcttatcacactggcttgatcgcgcccatgaagatccgcacagaggcccctgggaaccttcgtttatacagtgggagccccactcgcagcgagaaagagcaggtctccatcagctccttctactacaaggagcggaaatcaagacgatggaaaagtaagcgtgagggatcagactctggcaatcgacagatcaaggctgctgggaaagtcatcatccaggatattgcttgcctcctgcctgttcacaaatcgctgggagagctgtacatattgaatgtgaatgatattcaggaaacatgtcagaagaatgccgcctctgccttgctcgttggaagaaaggatcttgtccaggtttggtcgctggctacggtagctacagatctttgccttggtccgaaatctgacccagatttggaaacaccctgggctcgacatccatttgggcggcagctgctggagtccctgttggctcactattgccggctccgggatgttcagacactggcgatgctctgtagcgtgtttgaagcccagtctcggcctcaggggctaccaaacccctttgggccttttcctaaccgttcttctaatcttgtggtgtcccatagtcgatatcctagctttacctcttctggttcctgctccagtatgtcagacccagggctcaacactggcggctggaacatagcgggaagagaggcagagcacttgtcctccccttggggagaatcctcaccagaagagctccgctttgggagtctgacctacagtgatccccgtgagcgagaacgcgaccagcatgataaaaataaaaggctcctggaccccgccaatacccagcaatttgatgactttaagaaatgctatggggaaatcctctaccgttggggtctgagagagaagcgagctgaagtgttgaagtttgtctcctgtcctcctgaccctcacaaagggatcgagttcggcgtgtactgcagccactgccggagtgaggtccgtggcacgcagtgtgccatctgcaaaggcttcacgttccagtgtgccatctgtcacgtggctgtgcggggatcgtccaatttctgcctgacctgtgggcacggtggccacaccagccacatgatggagtggtttcggacccaggaggtgtgtcccaccgggtgtgggtgccactgcctgcttgaaagcactttctgaacctacagaagttgggtattgtctgaaatcccagaggacccataagtgccggtgacaagctgtctgtcaggggagaggctccagaacctgggttcgtccccagtgagaccggaggatgatcccccaaggactgcgcagcatcagctcttggtgggcctctgccttctcttctgtttggccacctggtgtggatgtcactgtgtgaagataaggacagaagtgcagagctgcgctttgtgtgttgtctatgtcggctgagctaccaaggtggaagttttcatggagaaaagcacctggctccagggccagtgttacagtgttaccctgtaaggtgttagccttaaaccaccgagcagcgttctcttgatgccagtgcagagaccagagtcagatgcccgaggacagtgggtaggaatttcatcaacaaatggacctatggcatcatggctttagaagctggtacatttactgagctgatggacagtggccttctaaaatatgacacttaaattgtaaatatgcactgtacttaaggattcttaagatgtatttttttgttatttctcctccagctgctatcccttggctaataaaattctagtaatttgaaaaaaaaaaaaaagagagaaagttaaacaac

SEQ ID NO: 25633 - protein, 566 aa, Homo sapiens
MDAADRSCTVSVHCSNHRVKMLVKFPAQYPNNAAPSFQFINPTTITSTMKAKLLKILKDTALQKVKRGQSCLEPCLRQLVSCLESFVNQEDSASSNPFALPNSVTPPLPTFARVTTAYGSYQDANIPFPRTSGARFCGAGYLVYFTRPMTMHRAVSPTEPTPRSLSALSAYHTGLIAPMKIRTEAPGNLRLYSGSPTRSEKEQVSISSFYYKERKSRRWKSKREGSDSGNRQIKAAGKVIIQDIACLLPVHKSLGELYILNVNDIQETCQKNAASALLVGRKDLVQVWSLATVATDLCLGPKSDPDLETPWARHPFGRQLLESLLAHYCRLRDVQTLAMLCSVFEAQSRPQGLPNPFGPFPNRSSNLVVSHSRYPSFTSSGSCSSMSDPGLNTGGWNIAGREAEHLSSPWGESSPEELRFGSLTYSDPRERERDQHDKNKRLLDPANTQQFDDFKKCYGEILYRWGLREKRAEVLKFVSCPPDPHKGIEFGVYCSHCRSEVRGTQCAICKGFTFQCAICHVAVRGSSNFCLTCGHGGHTSHMMEWFRTQEVCPTGCGCHCLLESTF

SEQ ID NO: 25634 - DNA, 3694 bp, Homo sapiens
caggagcaaccagggcacggggcgtgtcggggctgattctctggctgtgtggggcgcacggtcccgggatactggggacggcggggtgggagggcgccgtcctggggccgcggcggccgggcgggggagatggcggcgcgatggagcagcgaaaacgtggttgtagagttccgtgactcccaggcaactgcgatgtctgtggactgtcttgggcagcatgcagtgctttctggccgcagattcttatacatcgtcaatctagatgcccctttcgaaggtcaccgaaagatctctcgccagagcaaatgggacattggagctgtgcagtggaatcctcatgacagctttgcacactattttgcggcttcgagtaaccaacgagtagacctttacaagtggaaagacggcagtggggaagttggcacaaccttacaaggccacactcgtgtcatcagcgacttggactgggcggtgtttgagcctgacctcctggttaccagctctgtggacacctacatctacatttgggatatcaaagacacaaggaaacctactgttgcactgtctgctgttgcgggtgcctcccaggtcaaatggaataaaaaaaatgctaactgccttgccaccagccatgacggcgatgtgcggatatgggataagaggaaacccagtacagcagtggaatatctagccgcccacctctccaaaatccatggcctggactggcacccagacagcgagcacattcttgctacctccagtcaagacaattctgtgaagttctgggattaccgccagcctcggaaatacctcaatattcttccttgccaggtgcctgtctggaaggccagatacacacctttcagcaatggattggtgactgtgatggttccccagctgcggagggaaaacagccttctcctgtggaatgtctttgacttgaacaccccagtccacaccttcgtggggcatgatgatgtggtcctggagttccagtggaggaagcagaaggaagggtccaaggactatcaactggtgacgtggtcccgggatcagaccttgagaatgtggcgggtggattcccagatgcagaggctttgtgcaaatgacatattagatggtgttgatgagttcattgagagtatttcccttctgccggaacctgagaagaccctgcacactgaagatacagatcaccagcacactgcaagccatggggaggaagaagccctaaaagaagatccccctagaaatctcctggaagagaggaaatcagatcaactggggctgcctcagaccttgcagcaggaattctccctgatcaatgtgcaaatccggaatgtcaatgtggagatggatgcggcagacaggagctgcacagtgtctgtgcactgcagcaaccatcgtgtcaagatgctggtgaagttccctgcacagtacccaaacaacgccgccccttccttccagtttattaaccccacaaccatcacatccaccatgaaagctaagctgctgaagatcctgaaggacacagccctgcagaaagtgaagcgtggccagagctgcctggagccctgcctgcgccagctcgtctcctgccttgagtcctttgtgaaccaggaagacagcgcttccagcaacccgtttgcactccccaactctgtcactccccccttaccgacgtttgcgcgggtgaccacggcttacgggtcgtaccaggacgccaacattccctttcctaggacttctggggccaggttctgcggagcaggttacctggtatatttcacaaggcccatgacaatgcatcgggcggtgtctcccacagagcctactccgagatctctctcagccttgtctgcttatcacactggcttgatcgcgcccatgaagatccgcacagaggcccctgggaaccttcgtttatacagtgggagccccactcgcagcgagaaagagcaggtctccatcagctccttctactacaaggagcggaaatcaagacgatggaaaagtaagcgtgagggatcagactctggcaatcgacagatcaaggctgctgggaaagtcatcatccaggatattgcttgcctcctgcctgttcacaaatcgctgggagagctgtacatattgaatgtgaatgatattcaggaaacatgtcagaagaatgccgcctctgccttgctcgttggaagaaaggatcttgtccaggtttggtcgctggctacggtagctacagatctttgccttggtccgaaatctgacccagatttggaaacaccctgggctcgacatccatttgggcggcagctgctggagtccctgttggctcactattgccggctccgggatgttcagacactggcgatgctctgtagcgtgtttgaagcccagtctcggcctcaggggctaccaaacccctttgggccttttcctaaccgttcttctaatcttgtggtgtcccatagtcgatatcctagctttacctcttctggttcctgctccagtatgtcagacccagggctcaacactggcggctggaacatagcgggaagagaggcagagcacttgtcctccccttggggagaatcctcaccagaagagctccgctttgggagtctgacctacagtgatccccgtgagcgagaacgcgaccagcatgataaaaataaaaggctcctggaccccgccaatacccagcaatttgatgactttaagaaatgctatggggaaatcctctaccgttggggtctgagagagaagcgagctgaagtgttgaagtttgtctcctgtcctcctgaccctcacaaagggatcgagttcggcgtgtactgcagccactgccggagtgaggtccgtggcacgcagtgtgccatctgcaaaggcttcacgttccagtgtgccatctgtcacgtggctgtgcggggatcgtccaatttctgcctgacctgtgggcacggtggccacaccagccacatgatggagtggtttcggacccaggaggtgtgtcccaccgggtgtgggtgccactgcctgcttgaaagcactttctgaacctacagaagttgggtattgtctgaaatcccagaggacccataagtgccggtgacaagctgtctgtcaggggagaggctccagaacctgggttcgtccccagtgagaccggaggatgatcccccaaggactgcgcagcatcagctcttggtgggcctctgccttctcttctgtttggccacctggtgtggatgtcactgtgtgaagataaggacagaagtgcagagctgcgctttgtgtgttgtctatgtcggctgagctaccaaggtggaagttttcatggagaaaagcacctggctccagggccagtgttacagtgttaccctgtaaggtgttagccttaaaccaccgagcagcgttctcttgatgccagtgcagagaccagagtcagatgcccgaggacagtgggtaggaatttcatcaacaaatggacctatggcatcatggctttagaagctggtacatttactgagctgatggacagtggccttctaaaatatgacacttaaattgtaaatatgcactgtacttaaggattcttaagatgtatttttttgttatttctcctccagctgctatcccttggctaataaaattctagtaatttgaaaaaaaaaaaaaagagagaaagttaaacaac

SEQ ID NO: 25635 - protein, 974 aa, Homo sapiens; identical to SEQ ID NO: 3403

SEQ ID NO: 25636 - DNA, 2015 bp, Homo sapiens
caggagcaaccagggcacggggcgtgtcggggctgattctctggctgtgtggggcgcacggtcccgggatactggggacggcggggtgggagggcgccgtcctggggccgcggcggccgggcgggggagatggcggcgcgatggagcagcgaaaacgtggttgtagagttccgtgactcccaggcaactgcgatgtctgtggactgtcttgggcagcatgcagtgctttctggccgcagattcttatacatcgtcaatctagatgcccctttcgaaggtcaccgaaagatctctcgccagagcaaatgggacattggagctgtgcagtggaatcctcatgacagctttgcacactattttgcggcttcgagtaaccaacgagtagacctttacaagtggaaagacggcagtggggaagttggcacaaccttacaaggccacactcgtgtcatcagcgacttggactgggcggtgtttgagcctgacctcctggttaccagctctgtggacacctacatctacatttgggatatcaaagacacaaggaaacctactgttgcactgtctgctgttgcgggtgcctcccaggtcaaatggaataaaaaaaatgctaactgccttgccaccagccatgacggcgatgtgcggatatgggataagaggaaacccagtacagcagtggaatatctagccgcccacctctccaaaatccatggcctggactggcacccagacagcgagcacattcttgctacctccagtcaagacaattctgtgaagttctgggattaccgccagcctcggaaatacctcaatattcttccttgccaggtgcctgtctggaaggccagatacacacctttcagcaatggattggtgactgtgatggttccccagctgcggagggaaaacagccttctcctgtggaatgtctttgacttgaacaccccagtccacaccttcgtggggcatgatgatgtggtcctggagttccagtggaggaagcagaaggaagggtccaaggactatcaactggtgacgtggtcccgggatcagaccttgagaatgtggcgggtggattcccagatgcagaggctttgtgcaaatgacatattagatggtgttgatgagttcattgagagtatttcccttctgccggaacctgagaagaccctgcacactgaagatacagatcaccagcacactgcaagccatggggaggaagaagccctaaaagaagatccccctagaaatctcctggaagagaggaaatcagatcaactggggctgcctcagaccttgcagcaggaattctccctgatcaatgtgcaaatccggaatgtcaatgtggagatggatgcggcagacaggagctgcacagtgtctgtgcactgcagcaaccatcgtgtcaagatgctggtgaagttccctgcacagtacccaaacaacgccgccccttccttccagtttattaaccccacaaccatcacatccaccatgaaagctaagctgctgaagatcctgaaggacacagccctgcagaaagtgaagcgtggccagagctgcctggagccctgcctgcgccagctcgtctcctgccttgagtcctttgtgaaccaggaagacagcgcttccagcaacccgtttgcactccccaactctgtcactccccccttaccgacgtttgcgcgggtgaccacggcttacgggtcgtaccaggacgccaacattccctttcctaggacttctggggccaggttctgcggagcaggttacctggtatatttcacaaggcccatgacaatgcatcgggcggtgtctcccacagagcctactccgaggtgagtcagggagatgcagaagccgctctacgttcccggggccagaagtggccagagacctgggaaggaccactgagtttgcttttggacagtgcatttcagttcttcagtaaactcccattataagatttatttgagaaagattgaagtcaattaaattgcaaaaaagctgtg

SEQ ID NO: 25637 - protein, 571 aa, Homo sapiens
MAARWSSENVVVEFRDSQATAMSVDCLGQHAVLSGRRFLYIVNLDAPFEGHRKISRQSKWDIGAVQWNPHDSFAHYFAASSNQRVDLYKWKDGSGEVGTTLQGHTRVISDLDWAVFEPDLLVTSSVDTYIYIWDIKDTRKPTVALSAVAGASQVKWNKKNANCLATSHDGDVRIWDKRKPSTAVEYLAAHLSKIHGLDWHPDSEHILATSSQDNSVKFWDYRQPRKYLNILPCQVPVWKARYTPFSNGLVTVMVPQLRRENSLLLWNVFDLNTPVHTFVGHDDVVLEFQWRKQKEGSKDYQLVTWSRDQTLRMWRVDSQMQRLCANDILDGVDEFIESISLLPEPEKTLHTEDTDHQHTASHGEEEALKEDPPRNLLEERKSDQLGLPQTLQQEFSLINVQIRNVNVEMDAADRSCTVSVHCSNHRVKMLVKFPAQYPNNAAPSFQFINPTTITSTMKAKLLKILKDTALQKVKRGQSCLEPCLRQLVSCLESFVNQEDSASSNPFALPNSVTPPLPTFARVTTAYGSYQDANIPFPRTSGARFCGAGYLVYFTRPMTMHRAVSPTEPTPR

SEQ ID NO: 25638 - DNA, 556 bp, Homo sapiens
tgcacactgaagatacagatcaccagcacactgcaagccatggggaggaagaaggtaatttgtcaaactgatgtctcaggtaaggtgccactctacgcattgcagagttgtggcagataccccagacctgttctctgtttcattttcaaaaatgctttccaacattgaacttctctctcctgctagccctaaaagaagatccccctagaaatctcctggaagagaggaaatcagatcaactggggctgcctcagaccttgcagcaggaattctccctgatcaatgtgcaaatccggaatgtcaatgtggagatggatgcggcagacaggagctgcacagtgtctgtgcactgcagcaaccatcgtgtcaagatgctggtgaagttccctgcacagtacccaaacaacgccgccccttccttccagtttattaaccccacaaccatcacatccaccatgaaagctaagctgctgaaggtgggggtctgggttcccaaattctccttgctgttctgcatcattgtctagatggattagtaaagaagaatgaaaactcc

SEQ ID NO: 25639 - protein, 71 aa, Homo sapiens [sequence omitted]

SEQ ID NO: 25640 - DNA, 1681 bp, Homo sapiens
gccgccctccattgtctccacggcggcgaggagcgccggcgagcgcagcccgggaccgagcggggcggcgcggctggcggggccggcggcggctgaagcgagagcgcgacgcgacgcgaccgcggcttcccgagctgcgcctggccgcccagcgccgcggcccgcccgaggcctggaggggtccgggccgccgtccatggtcgcggcgtcctgaggcgggggacgcgcccggcgcccccggccctcctccgcctcctcccgcggggcgggcggcctcctccggcgcctccccgcgcccgcccgccgctcgccgccgcctccctccctccttccctgcggctcccccggctttcggagcccgggggcggcctgtggcgcgcggagcccgcgccggactgcgcctctttggaccttgaggggaaacatgcgtttgccttggatcgtttgaaattctgagtttgggatccccgcccgcccgcctgcctcttccgccccgcgggttttttccttttttccttttgctttttttccttttctccctccgggtctcctttttgactccctccccctttatgctcgcccagccctccccctgctgctgagaagtgggggagggtctcggcctccaggttcccgccccaccggggcccgggcgagcatggggggcaagcagagcacggcggcccgctcccggggccccttcccgggggtctccaccgatgacagcgccgtgccgccgccgggaggggcgccccatttcgggcactaccggacgggcggcggggccatggggctgcgcagccgctcggtcagctcggtggcaggcatgggcatggaccccagcacggccgggggggtgccctttggcctctacacccccgcctcccggggcaccggcgactccgagagggcgcccggcggcggagggtctgcgtccgactccacctatgcccatggcaatggttaccaggagacgggcggcggtcaccatagagacgggatgctgtacctgggctcccgagcctcgctggcggatgctctacctctgcacatcgcacccaggtggttcagctcgcatagtggtttcaagtgccccatttgctccaagtctgtggcttctgacgagatggaaatgcactttataatgtgtttgagcaaacctcgcctctcctacaacgatgatgtgctgactaaagacgcgggtgagtgtgtgatctgcctggaggagctgctgcagggggacacgatagccaggctgccctgcctgtgcatctatcacaaaagctgcatagactcgtggtttgaagtgaacagatcttgtccggaacaccctgcggactgacctgcgggcttgcttgctgactcctctcaaagggacagagcgcccctgctccagggaggaggctcaccggaccctggggcagagctgagcttgggacaccagcgggaacagggcaccccttctgcactgacttccagatcatggttctcccttcctccctgaggacaccaaattggatgagagcaagtttgagagaagaatgaatcaactgctatccttcccctcacccctcagcccaggagggaaagggcattttctttttcatctttgaaaggcattgtgggtctgtctttaaagtgtttacaaaaaaaaattatataaaaaaaaagtctagtgtcg

SEQ ID NO: 25641 - protein, 227 aa, Homo sapiens; identical to SEQ ID NO: 3405

SEQ ID NO: 25642 - DNA, 1576 bp, Homo sapiens
gccgccctccattgtctccacggcggcgaggagcgccggcgagcgcagcccgggaccgagcggggcggcgcggctggcggggccggcggcggctgaagcgagagcgcgacgcgacgcgaccgcggcttcccgagctgcgcctggccgcccagcgccgcggcccgcccgaggcctggaggggtccgggccgccgtccatggtcgcggcgtcctgaggcgggggacgcgcccggcgcccccggccctcctccgcctcctcccgcggggcgggcggcctcctccggcgcctccccgcgcccgcccgccgctcgccgccgcctccctccctccttccctgcggctcccccggctttcggagcccgggggcggcctgtggcgcgcggagcccgcgccggactgcgcctctttggaccttgaggggaaacatgcgtttgccttggatcgtttgaaattctgagtttgggatccccgcccgcccgcctgcctcttccgccccgcgggttttttccttttttccttttgctttttttccttttctccctccgggtctcctttttgactccctccccctttatgctcgcccagccctccccctgctgctgagaagtgggggagggtctcggcctccaggttcccgccccaccggggcccgggcgagcatggggggcaagcagagcacggcggcccgctcccggggccccttcccgggggtctccaccgatgacagcgccgtgccgccgccgggaggggcgccccatttcgggcactaccggacgggcggcggggccatggggctgcgcagccgctcggtcagctcggtggcaggcatgggcatggaccccagcacggccgggggggtgccctttggcctctacacccccgcctcccggggcaccggcgactccgagagggcgcccggcggcggagggtctgcgtccgactccacctatgcccatggcaatggttaccaggagacgggcggcggtcaccatagagacgggatgctgtacctgggctcccgagcctcgctggcggatgctctacctctgcacatcgcacccaggtggttcagctcgcatagtggtttcaagtgccccatttgctccaagtctgtggcttctgacgagatggaaatgcactttataatgtgtttgagcaaacctcgcctctcctacaacgatgatgtgctgactaaagacgcgggtgagtgtgtgatctgcctggaggagctgctgcagggggacacgatagccaggctgccctgcctgtgcatctatcacaaaagctgcatagactcgtggtttgaagtgaacagatcttgtccggaacaccctgcggactgacctgcgggcttgcttgctgactcctctcaaagatcatggttctcccttcctccctgaggacaccaaattggatgagagcaagtttgagagaagaatgaatcaactgctatccttcccctcacccctcagcccaggagggaaagggcattttctttttcatctttgaaaggcattgtgggtctgtctttaaagtgtttacaaaaaaaaattatataaaaaaaaagtctagtgtcg

SEQ ID NO: 25643 - protein, 227 aa, Homo sapiens; identical to SEQ ID NO: 3405

SEQ ID NO: 25644 - DNA, 2353 bp, Homo sapiens
gccgccctccattgtctccacggcggcgaggagcgccggcgagcgcagcccgggaccgagcggggcggcgcggctggcggggccggcggcggctgaagcgagagcgcgacgcgacgcgaccgcggcttcccgagctgcgcctggccgcccagcgccgcggcccgcccgaggcctggaggggtccgggccgccgtccatggtcgcggcgtcctgaggcgggggacgcgcccggcgcccccggccctcctccgcctcctcccgcggggcgggcggcctcctccggcgcctccccgcgcccgcccgccgctcgccgccgcctccctccctccttccctgcggctcccccggctttcggagcccgggggcggcctgtggcgcgcggagcccgcgccggactgcgcctctttggaccttgaggggaaacatgcgtttgccttggatcgtttgaaattctgagtttgggatccccgcccgcccgcctgcctcttccgccccgcgggttttttccttttttccttttgctttttttccttttctccctccgggtctcctttttgactccctccccctttatgctcgcccagccctccccctgctgctgagaagtgggggagggtctcggcctccaggttcccgccccaccggggcccgggcgagcatggggggcaagcagagcacggcggcccgctcccggggccccttcccgggggtctccaccgatgacagcgccgtgccgccgccgggaggggcgccccatttcgggcactaccggacgggcggcggggccatggggctgcgcagccgctcggtcagctcggtggcaggcatgggcatggaccccagcacggccgggggggtgccctttggcctctacacccccgcctcccggggcaccggcgactccgagagggcgcccggcggcggagggtctgcgtccgactccacctatgcccatggcaatggttaccaggagacgggcggcggtcaccatagagacgggatgctgtacctgggctcccgagcctcgctggcggatgctctacctctgcacatcgcacccaggtggttcagctcgcatagtggtttcaagtgccccatttgctccaagtctgtggcttctgacgagatggaaatgcactttataatgtgtttgagcaaacctcgcctctcctacaacgatgatgtgctgactaaagacgcgggtgagtgtgtgatctgcctggaggagctgctgcagggggacacgatagccaggctgccctgcctgtgcatctatcacaaaagctgcatagactcgtggtttgaagtgaacagatcttgtccggaacaccctgcggactgacctgcgggcttgcttgctgactcctctcaaagggacagagcgcccctgctccagggaggaggctcaccggaccctggggcagagctgagcttgggacaccagcgggaacagggcaccccttctgcactgacttccagatcatggttctcccttcctccctgaggacaccaaattggatgagagcaagtttgagagaagaatgaatcaactgctatccttcccctcacccctcagcccaggagggaaagggcattttctttttcatctttgaaaggcattgtgggtctgtctttaaagtgtttacaaaaaaaaattatataaaaaaaaagtctagtgtcgactggtgttttccctcgtgatgtttacagcttgctgtttgctgcccagccataacccactcagtgacagacgaacacagctaaggcctcgctgccagccttctgacggcgggcgagcacacggtctcttcccctgccccaactggccctctccaccaccaacttctctactttgggtttgtttggttttttccctctatttttctggctggttttttgctcttttctccccttgagaccctaatatcttgacttcattgccaaaaaacaacccattgagaactttcttcctactgatcccatctcttttcccttctttcctcctggttccggtcagttcagaggatttaacaatcacaagtgtcctgcaaaaatgcctgaacattattcttaggccctcgtggattttttttttcagaaaacttaaacaaaaaaagacttactaagaaatatgtacagctacccctgttttcaggcactatgtttgagaacattttagccattgatgttcacacgtggcatcagcccatgcaagataggtttctgtatttatatattaaaatacaaaaaaaaacttataaaatgtttaaaaaaatgttcaaagcttgggagaaaagctttcttcattagtcaaggtgttttgatatggtattaaaatgtctaataaaagatg

SEQ ID NO: 25645 - protein, 227 aa, Homo sapiens; identical to SEQ ID NO: 3405

SEQ ID NO: 25646 - DNA, 4354 bp, Homo sapiens
gccgccctccattgtctccacggcggcgaggagcgccggcgagcgcagcccgggaccgagcggggcggcgcggctggcggggccggcggcggctgaagcgagagcgcgacgcgacgcgaccgcggcttcccgagctgcgcctggccgcccagcgccgcggcccgcccgaggcctggaggggtccgggccgccgtccatggtcgcggcgtcctgaggcgggggacgcgcccggcgcccccggccctcctccgcctcctcccgcggggcgggcggcctcctccggcgcctccccgcgcccgcccgccgctcgccgccgcctccctccctccttccctgcggctcccccggctttcggagcccgggggcggcctgtggcgcgcggagcccgcgccggactgcgcctctttggaccttgaggggaaacatgcgtttgccttggatcgtttgaaattctgagtttgggatccccgcccgcccgcctgcctcttccgccccgcgggttttttccttttttccttttgctttttttccttttctccctccgggtctcctttttgactccctccccctttatgctcgcccagccctccccctgctgctgagaagtgggggagggtctcggcctccaggttcccgccccaccggggcccgggcgagcatggggggcaagcagagcacggcggcccgctcccggggccccttcccgggggtctccaccgatgacagcgccgtgccgccgccgggaggggcgccccatttcgggcactaccggacgggcggcggggccatggggctgcgcagccgctcggtcagctcggtggcaggcatgggcatggaccccagcacggccgggggggtgccctttggcctctacacccccgcctcccggggcaccggcgactccgagagggcgcccggcggcggagggtctgcgtccgactccacctatgcccatggcaatggttaccaggagacgggcggcggtcaccatagagacgggatgctgtacctgggctcccgagcctcgctggcggatgctctacctctgcacatcgcacccaggtggttcagctcgcatagtggtttcaagtgccccatttgctccaagtctgtggcttctgacgagatggaaatgcactttataatgtgtttgagcaaacctcgcctctcctacaacgatgatgtgctgactaaagacgcgggtgagtgtgtgatctgcctggaggagctgctgcagggggacacgatagccaggctgccctgcctgtgcatctatcacaaaagctgcatagactcgtggtttgaagtgaacagatcttgtccggaacaccctgcggactgacctgcgggcttgcttgctgactcctctcaaagggacagagcgcccctgctccagggaggaggctcaccggaccctggggcagagctgagcttgggacaccagcgggaacagggcaccccttctgcactgacttccagatcatggttctcccttcctccctgaggacaccaaattggatgagagcaagtttgagagaagaatgaatcaactgctatccttcccctcacccctcagcccaggagggaaagggcattttctttttcatctttgaaaggcattgtgggtctgtctttaaagtgtttacaaaaaaaaattatataaaaaaaaagtctagtgtcgactggtgttttccctcgtgatgtttacagcttgctgtttgctgcccagccataacccactcagtgacagacgaacacagctaaggcctcgctgccagccttctgacggcgggcgagcacacggtctcttcccctgccccaactggccctctccaccaccaacttctctactttgggtttgtttggttttttccctctatttttctggctggttttttgctcttttctccccttgagaccctaatatcttgacttcattgccaaaaaacaacccattgagaactttcttcctactgatcccatctcttttcccttctttcctcctggttccggtcagttcagaggatttaacaatcacaagtgtcctgcaaaaatgcctgaacattattcttaggccctcgtggattttttttttcagaaaacttaaacaaaaaaagacttactaagaaatatgtacagctacccctgttttcaggcactatgtttgagaacattttagccattgatgttcacacgtggcatcagcccatgcaagataggtttctgtatttatatattaaaatacaaaaaaaaacttataaaatgtttaaaaaaatgttcaaagcttgggagaaaagctttcttcattagtcaaggtgttttgatatggtattaaaatgtctaataaaagatggcactgcgtgattttattttaatgaagtgttatacaatcaagaaatgggggcaagggcctgccccccactccctcacctacctccttagcattccttcaggctgctactcggggctccaggtgtgtgaattggtcctcagatagtcaggcctgggtggagggagtggcaagtcaggcgtgcctcctacaagcttcctaacctcttaagcatcatggaaccagtcagccctctgtggagtcattgtgctggacctctgaaaagatctgcaggggccaagatgttgcagccaccggaggctgcaaggatgtgggttcttccaggtgtgggcccagcccccctccttccagcctttgctccccatcccacgttccactcgccctgcctgttgttcagtttgcgtctcagtgctgactcacgggcatgcttcattgaggcccaggaagaggccctggtttggggctgtgccagctcagagcccttgaaccagaaccaactgctcaggctcacaaaagttggcaaaatgcgggctgggcaggcagctcggggcagggagcagcagtgcaggcctggcctgtgtccccgtgcccagcgggctcccggagcagcattccagagcctcctgcagagccagcgaaggaaagctctagagggagacgactccaccgcctctctgctctgacccttctcaggcccgcctgatgtgctggaccatccccctgctgccacggcccctggctccgcagtcaccctccatcagatgcttccagaagcacctactctgtgcaagggcattcacaacaggccagtgggcaaacgtgagccagggccagcggagaaacactaaagaagactcggtggttcagagcctgggtctcagcgcgggacccgtctggggtgaagaccttggggctgttgtgagtcggtggcaggaacgtgggctctagactgtgcattcaggctctcctacttggcagaatgatcttggggaaacgacttcatctgaacttcagatatttcacatgtgaagcggggacaaaaccatgcagctcagaggtccctgtgggggctgggggagctgccctgcaggtcttggcacatgcacagcaggctccccatagctttgtcaccacaaagggcactgttctattcacagcacctcctgcttctgcctggcaactgtgtctccctgtgctatatttaattccaccagcaaagctggcgaggcagggcccagccctgaaggagatctccttgcctgacccctggacctggaaatggaggcttcatgtgcccgccttggcggcttaagcctgctgctttggcagtgccatgggtgagccgagcagctgtgaggtgggtggggcagggctgtagcccacgccgggtgctattccaggctctaggggctggtgctcatccccacccccagcgacttccgtcctacctggcatgctgcagccctctgccggctgtggtgtcctctgaatttggacccaggttgcctgctcttgttgtgggggtgggattggggctgtctgtgtttcccaggtggagctcatgtttgtgatcctctatctggacagctctccagaatcctgtgttgcccctgttctgcctttctgggatgggagagaaggtgagggagccggcgagcaggttctaccctctctgctaagggcctagcacactttgatgaggttcctggacgtgagaccctcacaaagaccaaccattcctctaatagccatttaacggtactgcagttcatgggaaaatgtcctcattcttaggagatagatgctggattatataggtgaatgccttcaagaaatgtgtaatttaattccaaatagttccccccaaaatacacaaagcaaataaggccaaaatgttcattgttgaatctgcagtggctggtatttcagtgaacagtgtacttgttctttcaacttttctgtatgtttggaatttttcttaataaaagattgtgggaaatggtc

SEQ ID NO: 25647 - protein, 227 aa, Homo sapiens; identical to SEQ ID NO: 3405

SEQ ID NO: 25648 - DNA, 4636 bp, Homo sapiens
gccgccctccattgtctccacggcggcgaggagcgccggcgagcgcagcccgggaccgagcggggcggcgcggctggcggggccggcggcggctgaagcgagagcgcgacgcgacgcgaccgcggcttcccgagctgcgcctggccgcccagcgccgcggcccgcccgaggcctggaggggtccgggccgccgtccatggtcgcggcgtcctgaggcgggggacgcgcccggcgcccccggccctcctccgcctcctcccgcggggcgggcggcctcctccggcgcctccccgcgcccgcccgccgctcgccgccgcctccctccctccttccctgcggctcccccggctttcggagcccgggggcggcctgtggcgcgcggagcccgcgccggactgcgcctctttggaccttgaggggaaacatgcgtttgccttggatcgtttgaaattctgagtttgggatccccgcccgcccgcctgcctcttccgccccgcgggttttttccttttttccttttgctttttttccttttctccctccgggtctcctttttgactccctccccctttatgctcgcccagccctccccctgctgctgagaagtgggggagggtctcggcctccaggttcccgccccaccggggcccgggcgagcatggggggcaagcagagcacggcggcccgctcccggggccccttcccgggggtctccaccgatgacagcgccgtgccgccgccgggaggggcgccccatttcgggcactaccggacgggcggcggggccatggggctgcgcagccgctcggtcagctcggtggcaggcatgggcatggaccccagcacggccgggggggtgccctttggcctctacacccccgcctcccggggcaccggcgactccgagagggcgcccggcggcggagggtctgcgtccgactccacctatgcccatggcaatggttaccaggagacgggcggcggtcaccatagagacgggatgctgtacctgggctcccgagcctcgctggcggatgctctacctctgcacatcgcacccaggtggttcagctcgcatagtggtttcaagtgccccatttgctccaagtctgtggcttctgacgagatggaaatgcactttataatgtgtttgagcaaacctcgcctctcctacaacgatgatgtgctgactaaagacgcgggtgagtgtgtgatctgcctggaggagctgctgcagggggacacgatagccaggctgccctgcctgtgcatctatcacaaaagctgcatagactcgtggtttgaagtgaacagatcttgtccggaacaccctgcggactgacctgcgggcttgcttgctgactcctctcaaagggacagagcgcccctgctccagggaggaggctcaccggaccctggggcagagctgagcttgggacaccagcgggaacagggcaccccttctgcactgacttccagatcatggttctcccttcctccctgaggacaccaaattggatgagagcaagtttgagagaagaatgaatcaactgctatccttcccctcacccctcagcccaggagggaaagggcattttctttttcatctttgaaaggcattgtgggtctgtctttaaagtgtttacaaaaaaaaattatataaaaaaaaagtctagtgtcgactggtgttttccctcgtgatgtttacagcttgctgtttgctgcccagccataacccactcagtgacagacgaacacagctaaggcctcgctgccagccttctgacggcgggcgagcacacggtctcttcccctgccccaactggccctctccaccaccaacttctctactttgggtttgtttggttttttccctctatttttctggctggttttttgctcttttctccccttgagaccctaatatcttgacttcattgccaaaaaacaacccattgagaactttcttcctactgatcccatctcttttcccttctttcctcctggttccggtcagttcagaggatttaacaatcacaagtgtcctgcaaaaatgcctgaacattattcttaggccctcgtggattttttttttcagaaaacttaaacaaaaaaagacttactaagaaatatgtacagctacccctgttttcaggcactatgtttgagaacattttagccattgatgttcacacgtggcatcagcccatgcaagataggtttctgtatttatatattaaaatacaaaaaaaaacttataaaatgtttaaaaaaatgttcaaagcttgggagaaaagctttcttcattagtcaaggtgttttgatatggtattaaaatgtctaataaaagatggcactgcgtgattttattttaatgaagtgttatacaatcaagaaatgggggcaagggcctgccccccactccctcacctacctccttagcattccttcaggctgctactcggggctccaggtgtgtgaattggtcctcagatagtcaggcctgggtggagggagtggcaagtcaggcgtgcctcctacaagcttcctaacctcttaagcatcatggaaccagtcagccctctgtggagtcattgtgctggacctctgaaaagatctgcaggggccaagatgttgcagccaccggaggctgcaaggatgtgggttcttccaggtgtgggcccagcccccctccttccagcctttgctccccatcccacgttccactcgccctgcctgttgttcagtttgcgtctcagtgctgactcacgggcatgcttcattgaggcccaggaagaggccctggtttggggctgtgccagctcagagcccttgaaccagaaccaactgctcaggctcacaaaagttggcaaaatgcgggctgggcaggcagctcggggcagggagcagcagtgcaggcctggcctgtgtccccgtgcccagcgggctcccggagcagcattccagagcctcctgcagagccagcgaaggaaagctctagagggagacgactccaccgcctctctgctctgacccttctcaggcccgcctgatgtgctggaccatccccctgctgccacggcccctggctccgcagtcaccctccatcagatgcttccagaagcacctactctgtgcaagggcattcacaacaggccagtgggcaaacgtgagccagggccagcggagaaacactaaagaagactcggtggttcagagcctgggtctcagcgcgggacccgtctggggtgaagaccttggggctgttgtgagtcggtggcaggaacgtgggctctagactgtgcattcaggctctcctacttggcagaatgatcttggggaaacgacttcatctgaacttcagatatttcacatgtgaagcggggacaaaaccatgcagctcagaggtccctgtgggggctgggggagctgccctgcaggtcttggcacatgcacagcaggctccccatagctttgtcaccacaaagggcactgttctattcacagcacctcctgcttctgcctggcaactgtgtctccctgtgctatatttaattccaccagcaaagctggcgaggcagggcccagccctgaaggagatctccttgcctgacccctggacctggaaatggaggcttcatgtgcccgccttggcggcttaagcctgctgctttggcagtgccatgggtgagccgagcagctgtgaggtgggtggggcagggctgtagcccacgccgggtgctattccaggctctaggggctggtgctcatccccacccccagcgacttccgtcctacctggcatgctgcagccctctgccggctgtggtgtcctctgaatttggacccaggttgcctgctcttgttgtgggggtgggattggggctgtctgtgtttcccaggtggagctcatgtttgtgatcctctatctggacagctctccagaatcctgtgttgcccctgttctgcctttctgggatgggagagaaggtgagggagccggcgagcaggttctaccctctctgctaagggcctagcacactttgatgaggttcctggacgtgagaccctcacaaagaccaaccattcctctaatagccatttaacggtactgcagttcatgggaaaatgtcctcattcttaggagatagatgctggattatataggtgaatgccttcaagaaatgtgtaatttaattccaaatagttccccccaaaatacacaaagcaaataaggccaaaatgttcattgttgaatctgcagtggctggtatttcagtgaacagtgtacttgttctttcaacttttctgtatgtttggaatttttcttaataaaagattgtgggaaatggtcatttgctgagcgcctcctagttgccaggcactggagggcgcatcaaagaagagtcctacccaggagggagagcgcagctgctgcaggattctcgcctggaagagtgggtggctggctggctggctggaaggggaggggcgagagggctgtctcggtgatgagcacacgcgtgctggggtggtttggggagagggctgagatttgtcaccagtgagcccttggcacggtctctgctccccaccagggcagcacgggacagaaacgtcacggaggagtagcctc

SEQ ID NO: 25649 - protein, 227 aa, Homo sapiens; identical to SEQ ID NO: 3405

SEQ ID NO: 25650 - DNA, 2483 bp, Homo sapiens
cggcgaggagcgccggcgagcgcagcccgggaccgagcggggcggcgcggctggcggggccggcggcggctgaagcgagagcgcgacgcgacgcgaccgcggcttcccgagctgcgcctggccgcccagcgccgcggcccgcccgaggcctggaggggtccgggccgccgtccatggtcgcggcgtcctgaggcgggggacgcgcccggcgcccccggccctcctccgcctcctcccgcggggcgggcggcctcctccggcgcctccccgcgcccgcccgccgctcgccgccgcctccctccctccttccctgcggctcccccggctttcggagcccgggggcggcctgtggcgcgcggagcccgcgccggactgcgcctctttggaccttgaggggaaacatgcgtttgccttggatcgtttgaaattctgagtttgggatccccgcccgcccgcctgcctcttccgccccgcgggttttttccttttttccttttgctttttttccttttctccctccgggtctcctttttgactccctccccctttatgctcgcccagccctccccctgctgctgagaagtgggggagggtctcggcctccaggttcccgccccaccggggcccgggcgagcatggggggcaagcagagcacggcggcccgctcccggggccccttcccgggggtctccaccgatgacagcgccgtgccgccgccgggaggggcgccccatttcgggcactaccggacgggcggcggggccatggggctgcgcagccgctcggtcagctcggtggcaggcatgggcatggaccccagcacggccgggggggtgccctttggcctctacacccccgcctcccggggcaccggcgactccgagagggcgcccggcggcggagggtctgcgtccgactccacctatgcccatggcaatggttaccaggagacgggcggcggtcaccatagagacgggatgctgtacctgggctcccgagcctcgctggcggatgctctacctctgcacatcgcacccaggtggttcagctcgcatagtggtttcaagtgccccatttgctccaagtctgtggcttctgacgagatggaaatgcactttataatgtgtttgagcaaacctcgcctctcctacaacggaagaatacaaagaagcctcagaggggctcagcctgagaaaacctggctctcaggaagaactttgcaagagcagccgtggaggacagagtgctcttgggcccccatggcccaaatgcagagttacccccactgccctgtggagaaccgggaagatgatgtgctgactaaagacgcgggtgagtgtgtgatctgcctggaggagctgctgcagggggacacgatagccaggctgccctgcctgtgcatctatcacaaaagctgcatagactcgtggtttgaagtgaacagatcttgtccggaacaccctgcggactgacctgcgggcttgcttgctgactcctctcaaagggacagagcgcccctgctccagggaggaggctcaccggaccctggggcagagctgagcttgggacaccagcgggaacagggcaccccttctgcactgacttccagatcatggttctcccttcctccctgaggacaccaaattggatgagagcaagtttgagagaagaatgaatcaactgctatccttcccctcacccctcagcccaggagggaaagggcattttctttttcatctttgaaaggcattgtgggtctgtctttaaagtgtttacaaaaaaaaattatataaaaaaaaagtctagtgtcgactggtgttttccctcgtgatgtttacagcttgctgtttgctgcccagccataacccactcagtgacagacgaacacagctaaggcctcgctgccagccttctgacggcgggcgagcacacggtctcttcccctgccccaactggccctctccaccaccaacttctctactttgggtttgtttggttttttccctctatttttctggctggttttttgctcttttctccccttgagaccctaatatcttgacttcattgccaaaaaacaacccattgagaactttcttcctactgatcccatctcttttcccttctttcctcctggttccggtcagttcagaggatttaacaatcacaagtgtcctgcaaaaatgcctgaacattattcttaggccctcgtggattttttttttcagaaaacttaaacaaaaaaagacttactaagaaatatgtacagctacccctgttttcaggcactatgtttgagaacattttagccattgatgttcacacgtggcatcagcccatgcaagataggtttctgtatttatatattaaaatacaaaaaaaaacttataaaatgtttaaaaaaatgttcaaagcttgggagaaaagctttcttcattagtcaaggtgttttgatatggtattaaaatgtctaataaaagatg

SEQ ID NO: 25651 - protein, 278 aa, Homo sapiens
MGGKQSTAARSRGPFPGVSTDDSAVPPPGGAPHFGHYRTGGGAMGLRSRSVSSVAGMGMDPSTAGGVPFGLYTPASRGTGDSERAPGGGGSASDSTYAHGNGYQETGGGHHRDGMLYLGSRASLADALPLHIAPRWFSSHSGFKCPICSKSVASDEMEMHFIMCLSKPRLSYNGRIQRSLRGAQPEKTWLSGRTLQEQPWRTECSWAPMAQMQSYPHCPVENREDDVLTKDAGECVICLEELLQGDTIARLPCLCIYHKSCIDSWFEVNRSCPEHPAD

SEQ ID NO: 25652 - DNA, 449 bp, Homo sapiens
tcgcacccaggtggttcagctcgcatagtggtctgtgcatctatcacaaaagctgcatagactcgtggtttgaagtgaacagatcttgtccggaacaccctgcggactgacctgcgggcttgcttgctgactcctctcaaagggacagagcgcccctgctccagggaggaggctcaccggaccctggggcagagctgagcttgggacaccagcgggaacagggcaccccttctgcactgacttccagatcatggttctcccttcctccctgaggacaccaaattggatgagagcaagtttgagagaagaatgaatcaactgctatccttcccctcacccctcagcccaggagggaaagggcattttctttttcatctttgaaaggcattgtgggtctgtctttaaagtgtttacaaaaaaaaattatataaaaaaaaagtctagtgtcg

SEQ ID NO: 25653 - protein, 53 aa, Homo sapiens
PAGLLADSSQRDRAPLLQGGGSPDPGAELSLGHQREQGTPSALTSRSWFSLPP

SEQ ID NO: 25654 - DNA, 872 bp, Homo sapiens
atacctaccgtctggaaactaggctttctgcgaggctgcggagcctggcgatttagggactcacggcgtgtgttcacttgtggaagggcagagcgaagcctacctattggagttccatttattggcatcaccctcctcagagaagagagacggggtttcaccgtgttagccaggatggtcttgatctcctgacctcatgatcagcccacctcggcctcccaaagtgctgggattacaggtgtgagccaccacgcccggaatgaagtatttcaggtttcaagtgccccatttgctccaagtctgtggcttctgacgagatggaaatgcactttataatgtgtttgagcaaacctcgcctctcctacaacgatgatgtgctgactaaagacgcgggtgagtgtgtgatctgcctggaggagctgctgcagggggacacgatagccaggctgccctgcctgtgcatctatcacaaaagctgcatagactcgtggtttgaagtgaacagatcttgtccggaacaccctgcggactgacctgcgggcttgcttgctgactcctctcaaagggacagagcgcccctgctccagggaggaggctcaccggaccctggggcagagctgagcttgggacaccagcgggaacagggcaccccttctgcactgacttccagatcatggttctcccttcctccctgaggacaccaaattggatgagagcaagtttgagagaagaatgaatcaactgctatccttcccctcacccctcagcccaggagggaaagggcattttctttttcatctttgaaaggcattgtgggtctgtctttaaagtgtttacaaaaaaaaattatataaaaaaaaagtctagtgtcg

SEQ ID NO: 25655 - protein, 71 aa, Homo sapiens
MEMHFIMCLSKPRLSYNDDVLTKDAGECVICLEELLQGDTIARLPCLCIYHKSCIDSWFEVNRSCPEHPAD

SEQ ID NO: 25656 - DNA, 1544 bp, Homo sapiens
atacctaccgtctggaaactaggctttctgcgaggctgcggagcctggcgatttagggactcacggcgtgtgttcacttgtggaagggcagagcgaagcctacctattggagttccatttattggcatcaccctcctcagagaagagagacggggtttcaccgtgttagccaggatggtcttgatctcctgacctcatgatcagcccacctcggcctcccaaagtgctgggattacaggtgtgagccaccacgcccggaatgaagtatttcaggtttcaagtgccccatttgctccaagtctgtggcttctgacgagatggaaatgcactttataatgtgtttgagcaaacctcgcctctcctacaacgatgatgtgctgactaaagacgcgggtgagtgtgtgatctgcctggaggagctgctgcagggggacacgatagccaggctgccctgcctgtgcatctatcacaaaagctgcatagactcgtggtttgaagtgaacagatcttgtccggaacaccctgcggactgacctgcgggcttgcttgctgactcctctcaaagggacagagcgcccctgctccagggaggaggctcaccggaccctggggcagagctgagcttgggacaccagcgggaacagggcaccccttctgcactgacttccagatcatggttctcccttcctccctgaggacaccaaattggatgagagcaagtttgagagaagaatgaatcaactgctatccttcccctcacccctcagcccaggagggaaagggcattttctttttcatctttgaaaggcattgtgggtctgtctttaaagtgtttacaaaaaaaaattatataaaaaaaaagtctagtgtcgactggtgttttccctcgtgatgtttacagcttgctgtttgctgcccagccataacccactcagtgacagacgaacacagctaaggcctcgctgccagccttctgacggcgggcgagcacacggtctcttcccctgccccaactggccctctccaccaccaacttctctactttgggtttgtttggttttttccctctatttttctggctggttttttgctcttttctccccttgagaccctaatatcttgacttcattgccaaaaaacaacccattgagaactttcttcctactgatcccatctcttttcccttctttcctcctggttccggtcagttcagaggatttaacaatcacaagtgtcctgcaaaaatgcctgaacattattcttaggccctcgtggattttttttttcagaaaacttaaacaaaaaaagacttactaagaaatatgtacagctacccctgttttcaggcactatgtttgagaacattttagccattgatgttcacacgtggcatcagcccatgcaagataggtttctgtatttatatattaaaatacaaaaaaaaacttataaaatgtttaaaaaaatgttcaaagcttgggagaaaagctttcttcattagtcaaggtgttttgatatggtattaaaatgtctaataaaagatg

SEQ ID NO: 25657 - protein, 71 aa, Homo sapiens; identical to SEQ ID NO: 25655

SEQ ID NO: 25658 - DNA, 3545 bp, Homo sapiens
atacctaccgtctggaaactaggctttctgcgaggctgcggagcctggcgatttagggactcacggcgtgtgttcacttgtggaagggcagagcgaagcctacctattggagttccatttattggcatcaccctcctcagagaagagagacggggtttcaccgtgttagccaggatggtcttgatctcctgacctcatgatcagcccacctcggcctcccaaagtgctgggattacaggtgtgagccaccacgcccggaatgaagtatttcaggtttcaagtgccccatttgctccaagtctgtggcttctgacgagatggaaatgcactttataatgtgtttgagcaaacctcgcctctcctacaacgatgatgtgctgactaaagacgcgggtgagtgtgtgatctgcctggaggagctgctgcagggggacacgatagccaggctgccctgcctgtgcatctatcacaaaagctgcatagactcgtggtttgaagtgaacagatcttgtccggaacaccctgcggactgacctgcgggcttgcttgctgactcctctcaaagggacagagcgcccctgctccagggaggaggctcaccggaccctggggcagagctgagcttgggacaccagcgggaacagggcaccccttctgcactgacttccagatcatggttctcccttcctccctgaggacaccaaattggatgagagcaagtttgagagaagaatgaatcaactgctatccttcccctcacccctcagcccaggagggaaagggcattttctttttcatctttgaaaggcattgtgggtctgtctttaaagtgtttacaaaaaaaaattatataaaaaaaaagtctagtgtcgactggtgttttccctcgtgatgtttacagcttgctgtttgctgcccagccataacccactcagtgacagacgaacacagctaaggcctcgctgccagccttctgacggcgggcgagcacacggtctcttcccctgccccaactggccctctccaccaccaacttctctactttgggtttgtttggttttttccctctatttttctggctggttttttgctcttttctccccttgagaccctaatatcttgacttcattgccaaaaaacaacccattgagaactttcttcctactgatcccatctcttttcccttctttcctcctggttccggtcagttcagaggatttaacaatcacaagtgtcctgcaaaaatgcctgaacattattcttaggccctcgtggattttttttttcagaaaacttaaacaaaaaaagacttactaagaaatatgtacagctacccctgttttcaggcactatgtttgagaacattttagccattgatgttcacacgtggcatcagcccatgcaagataggtttctgtatttatatattaaaatacaaaaaaaaacttataaaatgtttaaaaaaatgttcaaagcttgggagaaaagctttcttcattagtcaaggtgttttgatatggtattaaaatgtctaataaaagatggcactgcgtgattttattttaatgaagtgttatacaatcaagaaatgggggcaagggcctgccccccactccctcacctacctccttagcattccttcaggctgctactcggggctccaggtgtgtgaattggtcctcagatagtcaggcctgggtggagggagtggcaagtcaggcgtgcctcctacaagcttcctaacctcttaagcatcatggaaccagtcagccctctgtggagtcattgtgctggacctctgaaaagatctgcaggggccaagatgttgcagccaccggaggctgcaaggatgtgggttcttccaggtgtgggcccagcccccctccttccagcctttgctccccatcccacgttccactcgccctgcctgttgttcagtttgcgtctcagtgctgactcacgggcatgcttcattgaggcccaggaagaggccctggtttggggctgtgccagctcagagcccttgaaccagaaccaactgctcaggctcacaaaagttggcaaaatgcgggctgggcaggcagctcggggcagggagcagcagtgcaggcctggcctgtgtccccgtgcccagcgggctcccggagcagcattccagagcctcctgcagagccagcgaaggaaagctctagagggagacgactccaccgcctctctgctctgacccttctcaggcccgcctgatgtgctggaccatccccctgctgccacggcccctggctccgcagtcaccctccatcagatgcttccagaagcacctactctgtgcaagggcattcacaacaggccagtgggcaaacgtgagccagggccagcggagaaacactaaagaagactcggtggttcagagcctgggtctcagcgcgggacccgtctggggtgaagaccttggggctgttgtgagtcggtggcaggaacgtgggctctagactgtgcattcaggctctcctacttggcagaatgatcttggggaaacgacttcatctgaacttcagatatttcacatgtgaagcggggacaaaaccatgcagctcagaggtccctgtgggggctgggggagctgccctgcaggtcttggcacatgcacagcaggctccccatagctttgtcaccacaaagggcactgttctattcacagcacctcctgcttctgcctggcaactgtgtctccctgtgctatatttaattccaccagcaaagctggcgaggcagggcccagccctgaaggagatctccttgcctgacccctggacctggaaatggaggcttcatgtgcccgccttggcggcttaagcctgctgctttggcagtgccatgggtgagccgagcagctgtgaggtgggtggggcagggctgtagcccacgccgggtgctattccaggctctaggggctggtgctcatccccacccccagcgacttccgtcctacctggcatgctgcagccctctgccggctgtggtgtcctctgaatttggacccaggttgcctgctcttgttgtgggggtgggattggggctgtctgtgtttcccaggtggagctcatgtttgtgatcctctatctggacagctctccagaatcctgtgttgcccctgttctgcctttctgggatgggagagaaggtgagggagccggcgagcaggttctaccctctctgctaagggcctagcacactttgatgaggttcctggacgtgagaccctcacaaagaccaaccattcctctaatagccatttaacggtactgcagttcatgggaaaatgtcctcattcttaggagatagatgctggattatataggtgaatgccttcaagaaatgtgtaatttaattccaaatagttccccccaaaatacacaaagcaaataaggccaaaatgttcattgttgaatctgcagtggctggtatttcagtgaacagtgtacttgttctttcaacttttctgtatgtttggaatttttcttaataaaagattgtgggaaatggtc

SEQ ID NO: 25659 - protein, 71 aa, Homo sapiens; identical to SEQ ID NO: 25655

SEQ ID NO: 25660 - DNA, 3823 bp, Homo sapiens
atacctaccgtctggaaactaggctttctgcgaggctgcggagcctggcgatttagggactcacggcgtgtgttcacttgtggaagggcagagcgaagcctacctattggagttccatttattggcatcaccctcctcagagaagagagacggggtttcaccgtgttagccaggatggtcttgatctcctgacctcatgatcagcccacctcggcctcccaaagtgctgggattacaggtgtgagccaccacgcccggaatgaagtatttcaggtttcaagtgccccatttgctccaagtctgtggcttctgacgagatggaaatgcactttataatgtgtttgagcaaacctcgcctctcctacaacgatgatgtgctgactaaagacgcgggtgagtgtgtgatctgcctggaggagctgctgcagggggacacgatagccaggctgccctgcctgtgcatctatcacaaaagctgcatagactcgtggtttgaagtgaacagatcttgtccggaacaccctgcggactgacctgcgggcttgcttgctgactcctctcaaagggacagagcgcccctgctccagggaggaggctcaccggaccctggggcagagctgagcttgggacaccagcgggaacagggcaccccttctgcactgacttccagatcatggttctcccttcctccctgaggacaccaaattggatgagagcaagtttgagagaagaatgaatcaactgctatccttcccctcacccctcagcccaggagggaaagggcattttctttttcatctttgaaaggcattgtgggtctgtctttaaagtgtttacaaaaaaaaattatataaaaaaaaagtctagtgtcgactggtgttttccctcgtgatgtttacagcttgctgtttgctgcccagccataacccactcagtgacagacgaacacagctaaggcctcgctgccagccttctgacggcgggcgagcacacggtctcttcccctgccccaactggccctctccaccaccaacttctctactttgggtttgtttggttttttccctctatttttctggctggttttttgctcttttctccccttgagaccctaatatcttgacttcattgccaaaaaacaacccattgagaactttcttcctactgatcccatctcttttcccttctttcctcctggttccggtcagttcagaggatttaacaatcacaagtgtcctgcaaaaatgcctgaacattattcttaggccctcgtggattttttttttcagaaaacttaaacaaaaaaagacttactaagaaatatgtacagctacccctgttttcaggcactatgtttgagaacattttagccattgatgttcacacgtggcatcagcccatgcaagataggtttctgtatttatatattaaaatacaaaaaaaaacttataaaatgtttaaaaaaatgttcaaagcttgggagaaaagctttcttcattagtcaaggtgttttgatatggtattaaaatgtctaataaaagatggcactgcgtgattttattttaatgaagtgttatacaatcaagaaatgggggcaagggcctgccccccactccctcacctacctccttagcattccttcaggctgctactcggggctccaggtgtgtgaattggtcctcagatagtcaggcctgggtggagggagtggcaagtcaggcgtgcctcctacaagcttcctaacctcttaagcatcatggaaccagtcagccctctgtggagtcattgtgctggacctctgaaaagatctgcaggggccaagatgttgcagccaccggaggctgcaaggatgtgggttcttccaggtgtgggcccagcccccctccttccagcctttgctccccatcccacgttccactcgccctgcctgttgttcagtttgcgtctcagtgctgactcacgggcatgcttcattgaggcccaggaagaggccctggtttggggctgtgccagctcagagcccttgaaccagaaccaactgctcaggctcacaaaagttggcaaaatgcgggctgggcaggcagctcggggcagggagcagcagtgcaggcctggcctgtgtccccgtgcccagcgggctcccggagcagcattccagagcctcctgcagagccagcgaaggaaagctctagagggagacgactccaccgcctctctgctctgacccttctcaggcccgcctgatgtgctggaccatccccctgctgccacggcccctggctccgcagtcaccctccatcagatgcttccagaagcacctactctgtgcaagggcattcacaacaggccagtgggcaaacgtgagccagggccagcggagaaacactaaagaagactcggtggttcagagcctgggtctcagcgcgggacccgtctggggtgaagaccttggggctgttgtgagtcggtggcaggaacgtgggctctagactgtgcattcaggctctcctacttggcagaatgatcttggggaaacgacttcatctgaacttcagatatttcacatgtgaagcggggacaaaaccatgcagctcagaggtccctgtgggggctgggggagctgccctgcaggtcttggcacatgcacagcaggctccccatagctttgtcaccacaaagggcactgttctattcacagcacctcctgcttctgcctggcaactgtgtctccctgtgctatatttaattccaccagcaaagctggcgaggcagggcccagccctgaaggagatctccttgcctgacccctggacctggaaatggaggcttcatgtgcccgccttggcggcttaagcctgctgctttggcagtgccatgggtgagccgagcagctgtgaggtgggtggggcagggctgtagcccacgccgggtgctattccaggctctaggggctggtgctcatccccacccccagcgacttccgtcctacctggcatgctgcagccctctgccggctgtggtgtcctctgaatttggacccaggttgcctgctcttgttgtgggggtgggattggggctgtctgtgtttcccaggtggagctcatgtttgtgatcctctatctggacagctctccagaatcctgtgttgcccctgttctgcctttctgggatgggagagaaggtgagggagccggcgagcaggttctaccctctctgctaagggcctagcacactttgatgaggttcctggacgtgagaccctcacaaagaccaaccattcctctaatagccatttaacggtactgcagttcatgggaaaatgtcctcattcttaggagatagatgctggattatataggtgaatgccttcaagaaatgtgtaatttaattccaaatagttccccccaaaatacacaaagcaaataaggccaaaatgttcattgttgaatctgcagtggctggtatttcagtgaacagtgtacttgttctttcaacttttctgtatgtttggaatttttcttaataaaagattgtgggaaatggtcatttgctgagcgcctcctagttgccaggcactggagggcgcatcaaagaagagtcctacccaggagggagagcgcagctgctgcaggattctcgcctggaagagtgggtggctggctggctggctggaaggggaggggcgagagggctgtctcggtgatgagcacacgcgtgctggggtggtttggggagagggctgagatttgtcaccagtgagcccttggcacggtctctgctccccaccagggcagcacgggacagaaacgtcacggaggagtag

SEQ ID NO: 25661 - protein, 71 aa, Homo sapiens; identical to SEQ ID NO: 25655

SEQ ID NO: 25662 - DNA, 627 bp, Homo sapiens
cttcagtggtacatcctacataattacagtgcaatagcaaaatgaggcaattggcatgggtgctgttagtaccatccatagaccatattcagatctcatcactttcacatgcacccatttgtgtgtgtgtgtgtgtgtgtgtgtggtttagtgcagtttcatcatacatatgggtttatgtatccaacatcacaatcaagataactgttccactacctcacagatccctaatgctgcccattatagtcatacccatctctcttccctcctccccatccctaataccagtcagccactagtctcttctccagctctagaatttcatcatttcagtaatgctatataaatggaatcatagggcatgtaatccttgggattggctttcttcacttagcataattctccaaactcttgtgtatttcaatagtctattcctttttattgctaagtagtagtccatggtatggatggaccacggtttgtttaatccatccgaggacgtttgtttaatcatcacaaatctattcatctatccactcctttatttatctatccacctcttattttgtacacatttcaaagtaaactatagacatctgtatacttatctttaaatatttcaatatg

SEQ ID NO: 25663 - protein, 51 aa, Homo sapiens
MVWMDHGLFNPSEDVCLIITNLFIYPLLYLSIHLLFCTHFKVNYRHLYTYL

SEQ ID NO: 25664 - DNA, 837 bp, Homo sapiens
tggtctcgaactcctgacctcatgatccacccacctcagcttcccgaagtgctgtgattacaggcatgagccacagcacacagcccatctttttttaaactatgtttgtttaatcatcacaaatctattcatctatccactcctttatttatctatccacctcttattttgtacacatttcaaagtaaactatagacatctgtatacttatctttaaatatttcaatatgtacatcattaactggtgttaagtatttctttatagcttttcctcttggtggaaagtttacatacaaagaaatgtacacattttaagtacatgttcactgggttttgacaagtacatgcatcagcaaaacccaaaaccctatcaagatagagaatgtgcccgggcgtggtggctcacgcctgtttttccagcactttgggaggccaaggctggaggattgcttgaacccagaagttcgagaccaacttgggcaacatggtgaaaccccatcctgtctcaaaaaaaaaaaaaagaaaagaaaaagataatgttatgttaccccacctgcctcacattgtgagtcagtagactcatagttgggtccaaacataagatgtttgtaaaaaggtccctgattttgaccactacccttttaaataaagaagcttggggatgtgaaagtcctcctccaggtcagcaggcttgtttaaggtgagaccatgtcctctgacctcagggctatgactgccattctcacttcttcaaggccacctccatttccagcaggcaggtgtgtcagacagtaaaattgagagaactgttcagtgaacacccatataaccaccacc

SEQ ID NO: 25665 - protein, 30 aa, Homo sapiens [sequence omitted]

SEQ ID NO: 25666 - DNA, 1075 bp, Homo sapiens
gagagtcaagtccagtcttgtcataaagcgcctaagccttatcctcatacctgcctctcccttccctgaatccatcacctcctggggggcgatgagggagaccacatgtgccctcctggagctgacacagatggggagagaacacacctggtgtgggaagctgtatgggacccagagaattctaactagtcccttgggctcacagttgagttaccaatcagtaggagaaaatgcaaagataaactacttaggaatcagtaattgccatgttcccaggaaatcctccttaagtatggaggggaaggaatgctttagaggaaactaagggctatagcccatacgctcatgtcatagatgaggtgtccaagacaaagagagtggggaatacaggtccaagaatgtctgcatgacgactctgccctcactaagctatgctgtttttcctcccatctctgttgaggtttttccctctgttttattatgaaaaatgtcaaacacacagcaaagtttttatgtttttttgagacagagtctcgttctgtcacccaggctggagtacagtggcacaatcttggctcactgtaatctctgcctcccgggttcaaatgattctcctgcctcagctacttagtaggctgaggcaggagaaactcttgaggcggaggttgcagtgagctgagatcatgccactgcactccatcctggcgatagagcgagactccatgtcaaaaaaaaaagagagagaacgcccctattacatagcacatgcaccacctggagtctgcagtgtactagacccgtttatccatccaccaacccatcttatccttctgatgcatttcatagtaaaatgcaaacaccagtatgcttccttatcagggtttttaactaaagtagtgcacattcgaacgctacagaaatacataaaaggatttttctccaagtcctcctttcctctaccactgtgaaagtgtgtgcatccttccagactttgatctgtgcctacacatgcatttgaatatgtatggtagctagtgctttcaagcagggggatcacacccatgtgttcatccac

SEQ ID NO: 25667 - protein, 47 aa, Homo sapiens
MSNTQQSFYVFLRQSLVLSPRLEYSGTILAHCNLCLPGSNDSPASAT

SEQ ID NO: 25668 - DNA, 2081 bp, Homo sapiens
aaagacgcgggtgagtgtgtgatctgcctggaggagctgctgcagggggacacgatagccaggctgccctgcctgtgcatctatcacaaaaggtaggaggggttggcaaggtagcttagtgcaccccacctcccagaggggcggacccccatctccagccattctgtctcctttggttatgggatgacctctcccccgacctctggctccgagcgggtaagggcagaggccatcagacaggtgtccactgtgccggcgggaaggtgcgagcatcccaagtgcagagcagagtggagttgccagaggtgtgctctggtttgagggctcaggtggtgggagctgatggggagacccgtagagcctcacaggttggaggagcttcggatcccactgggaaggttggttctccgtctgtctccctgcctcttcttcctctacgggtccctctgctccacaggggtagaacatcaatctgtgcgaggaaggccaggcggagggtgtacccactgccttgcactggccttctccctagagggccgggaggcaggaagagccatttcctgtggggccacagcactgggcacagttaaaagtagcagggcccagatatgccttgggactccagtgtgagcctcgtccttgtttccagctggaaggaaggcaccctcttgcccaagacaggacactgtgctgcctggggccagcacctgttgaatcctcgagcccagagcttcttcctgacactcaggcctttcaaagcctgactctcagggccactgctgcacagggtgacaaccgggcatggcacgcagtgtggctggtgcagaggaggcttaaggctggcctgggagagattcttggtctagctcccagcacggagccttgcttgtgtcccagggcggcactaaccagaaccagaaaaggaaatctttggccctcggggagaattatgccaattatctgtctggttcctgtctttgaaaatgcccagatgttggtttacaaatcaggaagctgtcttggggcaatctctgttccctctttgatgcagagagcctttctctgtaaacactggagagcagggcttcactgtctggctcccctcccgcctcttgcaggaaggactagatgctgctgatcagctgatcatggctgagccgggtagagcttggggctctcctaagaggtcacccactgggagggagcttcacagctgttcttttgacccaggaaggagctctttcaggactgtggcacccagagccgtggccctcctgccatgccattgttcccacttccctgcccttgggagtcttggagacagctgactagctgccctgaggggtccaccgctctcaccttctcactggtggctgctgccattctcctgggctctgcacagaaagctttggtccttctgaaagccactctgccccttcctgcagcaccagatccccctgagccggtactgctgcctccacctgggccaagactagtcttggtgttcacccttcttcgtgcttcagaaagtagggatatctggggacatgactgtgtttccctggggtcctttcagaagagacttaggaagctcctgctcaggaatctggccctctgaaagagccccttcaaagcagcctgggcagcaggtaacgtggtttcccttgcggccccctcctcccagctgcatagactcgtggtttgaagtgaacagatcttgtccggaacaccctgcggactgacctgcgggcttgcttgctgactcctctcaaagggacagagcgcccctgctccagggaggaggctcaccggaccctggggcagagctgagcttgggacaccagcgggaacagggcaccccttctgcactgacttccagatcatggttctcccttcctccctgaggacaccaaattggatgagagcaagtttgagagaagaatgaatcaactgctatccttcccctcacccctcagcccaggagggaaagggcattttctttttcatctttgaaaggcattgtgggtctgtctttaaagtgtttacaaaaaaaaattatataaaaaaaaagtctagtgtcg

SEQ ID NO: 25669 - protein, 112 aa, Homo sapiens [sequence omitted]

SEQ ID NO: 25670 - DNA, 2753 bp, Homo sapiens
aaagacgcgggtgagtgtgtgatctgcctggaggagctgctgcagggggacacgatagccaggctgccctgcctgtgcatctatcacaaaaggtaggaggggttggcaaggtagcttagtgcaccccacctcccagaggggcggacccccatctccagccattctgtctcctttggttatgggatgacctctcccccgacctctggctccgagcgggtaagggcagaggccatcagacaggtgtccactgtgccggcgggaaggtgcgagcatcccaagtgcagagcagagtggagttgccagaggtgtgctctggtttgagggctcaggtggtgggagctgatggggagacccgtagagcctcacaggttggaggagcttcggatcccactgggaaggttggttctccgtctgtctccctgcctcttcttcctctacgggtccctctgctccacaggggtagaacatcaatctgtgcgaggaaggccaggcggagggtgtacccactgccttgcactggccttctccctagagggccgggaggcaggaagagccatttcctgtggggccacagcactgggcacagttaaaagtagcagggcccagatatgccttgggactccagtgtgagcctcgtccttgtttccagctggaaggaaggcaccctcttgcccaagacaggacactgtgctgcctggggccagcacctgttgaatcctcgagcccagagcttcttcctgacactcaggcctttcaaagcctgactctcagggccactgctgcacagggtgacaaccgggcatggcacgcagtgtggctggtgcagaggaggcttaaggctggcctgggagagattcttggtctagctcccagcacggagccttgcttgtgtcccagggcggcactaaccagaaccagaaaaggaaatctttggccctcggggagaattatgccaattatctgtctggttcctgtctttgaaaatgcccagatgttggtttacaaatcaggaagctgtcttggggcaatctctgttccctctttgatgcagagagcctttctctgtaaacactggagagcagggcttcactgtctggctcccctcccgcctcttgcaggaaggactagatgctgctgatcagctgatcatggctgagccgggtagagcttggggctctcctaagaggtcacccactgggagggagcttcacagctgttcttttgacccaggaaggagctctttcaggactgtggcacccagagccgtggccctcctgccatgccattgttcccacttccctgcccttgggagtcttggagacagctgactagctgccctgaggggtccaccgctctcaccttctcactggtggctgctgccattctcctgggctctgcacagaaagctttggtccttctgaaagccactctgccccttcctgcagcaccagatccccctgagccggtactgctgcctccacctgggccaagactagtcttggtgttcacccttcttcgtgcttcagaaagtagggatatctggggacatgactgtgtttccctggggtcctttcagaagagacttaggaagctcctgctcaggaatctggccctctgaaagagccccttcaaagcagcctgggcagcaggtaacgtggtttcccttgcggccccctcctcccagctgcatagactcgtggtttgaagtgaacagatcttgtccggaacaccctgcggactgacctgcgggcttgcttgctgactcctctcaaagggacagagcgcccctgctccagggaggaggctcaccggaccctggggcagagctgagcttgggacaccagcgggaacagggcaccccttctgcactgacttccagatcatggttctcccttcctccctgaggacaccaaattggatgagagcaagtttgagagaagaatgaatcaactgctatccttcccctcacccctcagcccaggagggaaagggcattttctttttcatctttgaaaggcattgtgggtctgtctttaaagtgtttacaaaaaaaaattatataaaaaaaaagtctagtgtcgactggtgttttccctcgtgatgtttacagcttgctgtttgctgcccagccataacccactcagtgacagacgaacacagctaaggcctcgctgccagccttctgacggcgggcgagcacacggtctcttcccctgccccaactggccctctccaccaccaacttctctactttgggtttgtttggttttttccctctatttttctggctggttttttgctcttttctccccttgagaccctaatatcttgacttcattgccaaaaaacaacccattgagaactttcttcctactgatcccatctcttttcccttctttcctcctggttccggtcagttcagaggatttaacaatcacaagtgtcctgcaaaaatgcctgaacattattcttaggccctcgtggattttttttttcagaaaacttaaacaaaaaaagacttactaagaaatatgtacagctacccctgttttcaggcactatgtttgagaacattttagccattgatgttcacacgtggcatcagcccatgcaagataggtttctgtatttatatattaaaatacaaaaaaaaacttataaaatgtttaaaaaaatgttcaaagcttgggagaaaagctttcttcattagtcaaggtgttttgatatggtattaaaatgtctaataaaagatg

SEQ ID NO: 25671 - protein, 112 aa, Homo sapiens [sequence omitted]

SEQ ID NO: 25672 - DNA, 4754 bp, Homo sapiens
aaagacgcgggtgagtgtgtgatctgcctggaggagctgctgcagggggacacgatagccaggctgccctgcctgtgcatctatcacaaaaggtaggaggggttggcaaggtagcttagtgcaccccacctcccagaggggcggacccccatctccagccattctgtctcctttggttatgggatgacctctcccccgacctctggctccgagcgggtaagggcagaggccatcagacaggtgtccactgtgccggcgggaaggtgcgagcatcccaagtgcagagcagagtggagttgccagaggtgtgctctggtttgagggctcaggtggtgggagctgatggggagacccgtagagcctcacaggttggaggagcttcggatcccactgggaaggttggttctccgtctgtctccctgcctcttcttcctctacgggtccctctgctccacaggggtagaacatcaatctgtgcgaggaaggccaggcggagggtgtacccactgccttgcactggccttctccctagagggccgggaggcaggaagagccatttcctgtggggccacagcactgggcacagttaaaagtagcagggcccagatatgccttgggactccagtgtgagcctcgtccttgtttccagctggaaggaaggcaccctcttgcccaagacaggacactgtgctgcctggggccagcacctgttgaatcctcgagcccagagcttcttcctgacactcaggcctttcaaagcctgactctcagggccactgctgcacagggtgacaaccgggcatggcacgcagtgtggctggtgcagaggaggcttaaggctggcctgggagagattcttggtctagctcccagcacggagccttgcttgtgtcccagggcggcactaaccagaaccagaaaaggaaatctttggccctcggggagaattatgccaattatctgtctggttcctgtctttgaaaatgcccagatgttggtttacaaatcaggaagctgtcttggggcaatctctgttccctctttgatgcagagagcctttctctgtaaacactggagagcagggcttcactgtctggctcccctcccgcctcttgcaggaaggactagatgctgctgatcagctgatcatggctgagccgggtagagcttggggctctcctaagaggtcacccactgggagggagcttcacagctgttcttttgacccaggaaggagctctttcaggactgtggcacccagagccgtggccctcctgccatgccattgttcccacttccctgcccttgggagtcttggagacagctgactagctgccctgaggggtccaccgctctcaccttctcactggtggctgctgccattctcctgggctctgcacagaaagctttggtccttctgaaagccactctgccccttcctgcagcaccagatccccctgagccggtactgctgcctccacctgggccaagactagtcttggtgttcacccttcttcgtgcttcagaaagtagggatatctggggacatgactgtgtttccctggggtcctttcagaagagacttaggaagctcctgctcaggaatctggccctctgaaagagccccttcaaagcagcctgggcagcaggtaacgtggtttcccttgcggccccctcctcccagctgcatagactcgtggtttgaagtgaacagatcttgtccggaacaccctgcggactgacctgcgggcttgcttgctgactcctctcaaagggacagagcgcccctgctccagggaggaggctcaccggaccctggggcagagctgagcttgggacaccagcgggaacagggcaccccttctgcactgacttccagatcatggttctcccttcctccctgaggacaccaaattggatgagagcaagtttgagagaagaatgaatcaactgctatccttcccctcacccctcagcccaggagggaaagggcattttctttttcatctttgaaaggcattgtgggtctgtctttaaagtgtttacaaaaaaaaattatataaaaaaaaagtctagtgtcgactggtgttttccctcgtgatgtttacagcttgctgtttgctgcccagccataacccactcagtgacagacgaacacagctaaggcctcgctgccagccttctgacggcgggcgagcacacggtctcttcccctgccccaactggccctctccaccaccaacttctctactttgggtttgtttggttttttccctctatttttctggctggttttttgctcttttctccccttgagaccctaatatcttgacttcattgccaaaaaacaacccattgagaactttcttcctactgatcccatctcttttcccttctttcctcctggttccggtcagttcagaggatttaacaatcacaagtgtcctgcaaaaatgcctgaacattattcttaggccctcgtggattttttttttcagaaaacttaaacaaaaaaagacttactaagaaatatgtacagctacccctgttttcaggcactatgtttgagaacattttagccattgatgttcacacgtggcatcagcccatgcaagataggtttctgtatttatatattaaaatacaaaaaaaaacttataaaatgtttaaaaaaatgttcaaagcttgggagaaaagctttcttcattagtcaaggtgttttgatatggtattaaaatgtctaataaaagatggcactgcgtgattttattttaatgaagtgttatacaatcaagaaatgggggcaagggcctgccccccactccctcacctacctccttagcattccttcaggctgctactcggggctccaggtgtgtgaattggtcctcagatagtcaggcctgggtggagggagtggcaagtcaggcgtgcctcctacaagcttcctaacctcttaagcatcatggaaccagtcagccctctgtggagtcattgtgctggacctctgaaaagatctgcaggggccaagatgttgcagccaccggaggctgcaaggatgtgggttcttccaggtgtgggcccagcccccctccttccagcctttgctccccatcccacgttccactcgccctgcctgttgttcagtttgcgtctcagtgctgactcacgggcatgcttcattgaggcccaggaagaggccctggtttggggctgtgccagctcagagcccttgaaccagaaccaactgctcaggctcacaaaagttggcaaaatgcgggctgggcaggcagctcggggcagggagcagcagtgcaggcctggcctgtgtccccgtgcccagcgggctcccggagcagcattccagagcctcctgcagagccagcgaaggaaagctctagagggagacgactccaccgcctctctgctctgacccttctcaggcccgcctgatgtgctggaccatccccctgctgccacggcccctggctccgcagtcaccctccatcagatgcttccagaagcacctactctgtgcaagggcattcacaacaggccagtgggcaaacgtgagccagggccagcggagaaacactaaagaagactcggtggttcagagcctgggtctcagcgcgggacccgtctggggtgaagaccttggggctgttgtgagtcggtggcaggaacgtgggctctagactgtgcattcaggctctcctacttggcagaatgatcttggggaaacgacttcatctgaacttcagatatttcacatgtgaagcggggacaaaaccatgcagctcagaggtccctgtgggggctgggggagctgccctgcaggtcttggcacatgcacagcaggctccccatagctttgtcaccacaaagggcactgttctattcacagcacctcctgcttctgcctggcaactgtgtctccctgtgctatatttaattccaccagcaaagctggcgaggcagggcccagccctgaaggagatctccttgcctgacccctggacctggaaatggaggcttcatgtgcccgccttggcggcttaagcctgctgctttggcagtgccatgggtgagccgagcagctgtgaggtgggtggggcagggctgtagcccacgccgggtgctattccaggctctaggggctggtgctcatccccacccccagcgacttccgtcctacctggcatgctgcagccctctgccggctgtggtgtcctctgaatttggacccaggttgcctgctcttgttgtgggggtgggattggggctgtctgtgtttcccaggtggagctcatgtttgtgatcctctatctggacagctctccagaatcctgtgttgcccctgttctgcctttctgggatgggagagaaggtgagggagccggcgagcaggttctaccctctctgctaagggcctagcacactttgatgaggttcctggacgtgagaccctcacaaagaccaaccattcctctaatagccatttaacggtactgcagttcatgggaaaatgtcctcattcttaggagatagatgctggattatataggtgaatgccttcaagaaatgtgtaatttaattccaaatagttccccccaaaatacacaaagcaaataaggccaaaatgttcattgttgaatctgcagtggctggtatttcagtgaacagtgtacttgttctttcaacttttctgtatgtttggaatttttcttaataaaagattgtgggaaatggtc

SEQ ID NO: 25673 - protein, 155 aa, Homo sapiens
MEPVSPLWSHCAGPLKRSAGAKMLQPPEAARMWVLPGVGPAPLLPAFAPHPTFHSPCLLFSLRLSADSRACFIEAQEEALVWGCASSEPLNQNQLLRLTKVGKMRAGQAARGREQQCRPGLCPRAQRAPGAAFQSLLQSQRRKALEGDDSTASLL

SEQ ID NO: 25674 - DNA, 5032 bp, Homo sapiens
aaagacgcgggtgagtgtgtgatctgcctggaggagctgctgcagggggacacgatagccaggctgccctgcctgtgcatctatcacaaaaggtaggaggggttggcaaggtagcttagtgcaccccacctcccagaggggcggacccccatctccagccattctgtctcctttggttatgggatgacctctcccccgacctctggctccgagcgggtaagggcagaggccatcagacaggtgtccactgtgccggcgggaaggtgcgagcatcccaagtgcagagcagagtggagttgccagaggtgtgctctggtttgagggctcaggtggtgggagctgatggggagacccgtagagcctcacaggttggaggagcttcggatcccactgggaaggttggttctccgtctgtctccctgcctcttcttcctctacgggtccctctgctccacaggggtagaacatcaatctgtgcgaggaaggccaggcggagggtgtacccactgccttgcactggccttctccctagagggccgggaggcaggaagagccatttcctgtggggccacagcactgggcacagttaaaagtagcagggcccagatatgccttgggactccagtgtgagcctcgtccttgtttccagctggaaggaaggcaccctcttgcccaagacaggacactgtgctgcctggggccagcacctgttgaatcctcgagcccagagcttcttcctgacactcaggcctttcaaagcctgactctcagggccactgctgcacagggtgacaaccgggcatggcacgcagtgtggctggtgcagaggaggcttaaggctggcctgggagagattcttggtctagctcccagcacggagccttgcttgtgtcccagggcggcactaaccagaaccagaaaaggaaatctttggccctcggggagaattatgccaattatctgtctggttcctgtctttgaaaatgcccagatgttggtttacaaatcaggaagctgtcttggggcaatctctgttccctctttgatgcagagagcctttctctgtaaacactggagagcagggcttcactgtctggctcccctcccgcctcttgcaggaaggactagatgctgctgatcagctgatcatggctgagccgggtagagcttggggctctcctaagaggtcacccactgggagggagcttcacagctgttcttttgacccaggaaggagctctttcaggactgtggcacccagagccgtggccctcctgccatgccattgttcccacttccctgcccttgggagtcttggagacagctgactagctgccctgaggggtccaccgctctcaccttctcactggtggctgctgccattctcctgggctctgcacagaaagctttggtccttctgaaagccactctgccccttcctgcagcaccagatccccctgagccggtactgctgcctccacctgggccaagactagtcttggtgttcacccttcttcgtgcttcagaaagtagggatatctggggacatgactgtgtttccctggggtcctttcagaagagacttaggaagctcctgctcaggaatctggccctctgaaagagccccttcaaagcagcctgggcagcaggtaacgtggtttcccttgcggccccctcctcccagctgcatagactcgtggtttgaagtgaacagatcttgtccggaacaccctgcggactgacctgcgggcttgcttgctgactcctctcaaagggacagagcgcccctgctccagggaggaggctcaccggaccctggggcagagctgagcttgggacaccagcgggaacagggcaccccttctgcactgacttccagatcatggttctcccttcctccctgaggacaccaaattggatgagagcaagtttgagagaagaatgaatcaactgctatccttcccctcacccctcagcccaggagggaaagggcattttctttttcatctttgaaaggcattgtgggtctgtctttaaagtgtttacaaaaaaaaattatataaaaaaaaagtctagtgtcgactggtgttttccctcgtgatgtttacagcttgctgtttgctgcccagccataacccactcagtgacagacgaacacagctaaggcctcgctgccagccttctgacggcgggcgagcacacggtctcttcccctgccccaactggccctctccaccaccaacttctctactttgggtttgtttggttttttccctctatttttctggctggttttttgctcttttctccccttgagaccctaatatcttgacttcattgccaaaaaacaacccattgagaactttcttcctactgatcccatctcttttcccttctttcctcctggttccggtcagttcagaggatttaacaatcacaagtgtcctgcaaaaatgcctgaacattattcttaggccctcgtggattttttttttcagaaaacttaaacaaaaaaagacttactaagaaatatgtacagctacccctgttttcaggcactatgtttgagaacattttagccattgatgttcacacgtggcatcagcccatgcaagataggtttctgtatttatatattaaaatacaaaaaaaaacttataaaatgtttaaaaaaatgttcaaagcttgggagaaaagctttcttcattagtcaaggtgttttgatatggtattaaaatgtctaataaaagatggcactgcgtgattttattttaatgaagtgttatacaatcaagaaatgggggcaagggcctgccccccactccctcacctacctccttagcattccttcaggctgctactcggggctccaggtgtgtgaattggtcctcagatagtcaggcctgggtggagggagtggcaagtcaggcgtgcctcctacaagcttcctaacctcttaagcatcatggaaccagtcagccctctgtggagtcattgtgctggacctctgaaaagatctgcaggggccaagatgttgcagccaccggaggctgcaaggatgtgggttcttccaggtgtgggcccagcccccctccttccagcctttgctccccatcccacgttccactcgccctgcctgttgttcagtttgcgtctcagtgctgactcacgggcatgcttcattgaggcccaggaagaggccctggtttggggctgtgccagctcagagcccttgaaccagaaccaactgctcaggctcacaaaagttggcaaaatgcgggctgggcaggcagctcggggcagggagcagcagtgcaggcctggcctgtgtccccgtgcccagcgggctcccggagcagcattccagagcctcctgcagagccagcgaaggaaagctctagagggagacgactccaccgcctctctgctctgacccttctcaggcccgcctgatgtgctggaccatccccctgctgccacggcccctggctccgcagtcaccctccatcagatgcttccagaagcacctactctgtgcaagggcattcacaacaggccagtgggcaaacgtgagccagggccagcggagaaacactaaagaagactcggtggttcagagcctgggtctcagcgcgggacccgtctggggtgaagaccttggggctgttgtgagtcggtggcaggaacgtgggctctagactgtgcattcaggctctcctacttggcagaatgatcttggggaaacgacttcatctgaacttcagatatttcacatgtgaagcggggacaaaaccatgcagctcagaggtccctgtgggggctgggggagctgccctgcaggtcttggcacatgcacagcaggctccccatagctttgtcaccacaaagggcactgttctattcacagcacctcctgcttctgcctggcaactgtgtctccctgtgctatatttaattccaccagcaaagctggcgaggcagggcccagccctgaaggagatctccttgcctgacccctggacctggaaatggaggcttcatgtgcccgccttggcggcttaagcctgctgctttggcagtgccatgggtgagccgagcagctgtgaggtgggtggggcagggctgtagcccacgccgggtgctattccaggctctaggggctggtgctcatccccacccccagcgacttccgtcctacctggcatgctgcagccctctgccggctgtggtgtcctctgaatttggacccaggttgcctgctcttgttgtgggggtgggattggggctgtctgtgtttcccaggtggagctcatgtttgtgatcctctatctggacagctctccagaatcctgtgttgcccctgttctgcctttctgggatgggagagaaggtgagggagccggcgagcaggttctaccctctctgctaagggcctagcacactttgatgaggttcctggacgtgagaccctcacaaagaccaaccattcctctaatagccatttaacggtactgcagttcatgggaaaatgtcctcattcttaggagatagatgctggattatataggtgaatgccttcaagaaatgtgtaatttaattccaaatagttccccccaaaatacacaaagcaaataaggccaaaatgttcattgttgaatctgcagtggctggtatttcagtgaacagtgtacttgttctttcaacttttctgtatgtttggaatttttcttaataaaagattgtgggaaatggtcatttgctgagcgcctcctagttgccaggcactggagggcgcatcaaagaagagtcctacccaggagggagagcgcagctgctgcaggattctcgcctggaagagtgggtggctggctggctggctggaaggggaggggcgagagggctgtctcggtgatgagcacacgcgtgctggggtggtttggggagagggctgagatttgtcaccagtgagcccttggcacggtctctgctccccaccagggcagcacgggacagaaacgtcacggaggagtag

SEQ ID NO: 25675 - protein, 155 aa, Homo sapiens; identical to SEQ ID NO: 25673

SEQ ID NO: 25676 - DNA, 2814 bp, Homo sapiens
agggacagagcgcccctgctccagggaggaggctcaccggaccctggggcagagctgagcttgggacaccagcgggaacagggcaccccttctgcactgacttccagatcatggttctcccttcctccctgaggacaccaaattggatgagagcaagtttgagagaagaatgaatcaactgctatccttcccctcacccctcagcccaggagggaaagggcattttctttttcatctttgaaaggcattgtgggtctgtctttaaagtgtttacaaaaaaaaattatataaaaaaaaagtctagtgtcgactggtgttttccctcgtgatgtttacagcttgctgtttgctgcccagccataacccactcagtgacagacgaacacagctaaggcctcgctgccagccttctgacggcgggcgagcacacggtctcttcccctgccccaactggccctctccaccaccaacttctctactttgggtttgtttggttttttccctctatttttctggctggttttttgctcttttctccccttgagaccctaatatcttgacttcattgccaaaaaacaacccattgagaactttcttcctactgatcccatctcttttcccttctttcctcctggttccggtcagttcagaggatttaacaatcacaagtgtcctgcaaaaatgcctgaacattattcttaggccctcgtggattttttttttcagaaaacttaaacaaaaaaagacttactaagaaatatgtacagctacccctgttttcaggcactatgtttgagaacattttagccattgatgttcacacgtggcatcagcccatgcaagataggtttctgtatttatatattaaaatacaaaaaaaaacttataaaatgtttaaaaaaatgttcaaagcttgggagaaaagctttcttcattagtcaaggtgttttgatatggtattaaaatgtctaataaaagatggcactgcgtgattttattttaatgaagtgttatacaatcaagaaatgggggcaagggcctgccccccactccctcacctacctccttagcattccttcaggctgctactcggggctccaggtgtgtgaattggtcctcagatagtcaggcctgggtggagggagtggcaagtcaggcgtgcctcctacaagcttcctaacctcttaagcatcatggaaccagtcagccctctgtggagtcattgtgctggacctctgaaaagatctgcaggggccaagatgttgcagccaccggaggctgcaaggatgtgggttcttccaggtgtgggcccagcccccctccttccagcctttgctccccatcccacgttccactcgccctgcctgttgttcagtttgcgtctcagtgctgactcacgggcatgcttcattgaggcccaggaagaggccctggtttggggctgtgccagctcagagcccttgaaccagaaccaactgctcaggctcacaaaagttggcaaaatgcgggctgggcaggcagctcggggcagggagcagcagtgcaggcctggcctgtgtccccgtgcccagcgggctcccggagcagcattccagagcctcctgcagagccagcgaaggaaagctctagagggagacgactccaccgcctctctgctctgacccttctcaggcccgcctgatgtgctggaccatccccctgctgccacggcccctggctccgcagtcaccctccatcagatgcttccagaagcacctactctgtgcaagggcattcacaacaggccagtgggcaaacgtgagccagggccagcggagaaacactaaagaagactcggtggttcagagcctgggtctcagcgcgggacccgtctggggtgaagaccttggggctgttgtgagtcggtggcaggaacgtgggctctagactgtgcattcaggctctcctacttggcagaatgatcttggggaaacgacttcatctgaacttcagatatttcacatgtgaagcggggacaaaaccatgcagctcagaggtccctgtgggggctgggggagctgccctgcaggtcttggcacatgcacagcaggctccccatagctttgtcaccacaaagggcactgttctattcacagcacctcctgcttctgcctttctgggatgggagagaaggtgagggagccggcgagcaggttctaccctctctgctaagggcctagcacactttgatgaggttcctggacgtgagaccctcacaaagaccaaccattcctctaatagccatttaacggtactgcagttcatgggaaaatgtcctcattcttaggagatagatgctggattatataggtgaatgccttcaagaaatgtgtaatttaattccaaatagttccccccaaaatacacaaagcaaataaggccaaaatgttcattgttgaatctgcagtggctggtatttcagtgaacagtgtacttgttctttcaacttttctgtatgtttggaatttttcttaataaaagattgtgggaaatggtcatttgctgagcgcctcctagttgccaggcactggagggcgcatcaaagaagagtcctacccaggagggagagcgcagctgctgcaggattctcgcctggaagagtgggtggctggctggctggctggaaggggaggggcgagagggctgtctcggtgatgagcacacgcgtgctggggtggtttggggagagggctgagatttgtcaccagtgagcccttggcacggtctctgctccccaccagggcagcacgggacagaaacgtcacggaggagtag

SEQ ID NO: 25677 - protein, 72 aa, Homo sapiens
MILGKRLHLNFRYFTCEAGTKPCSSEVPVGAGGAALQVLAHAQQAPHSFVTTKGTVLFTAPPASAFLGWERR

SEQ ID NO: 25678 - DNA, 2068 bp, Homo sapiens
tggtcaccctgccacccagtgctcacaccctctggccagtgcctggctatggcccgactgctcaggtctgcaacctgggagctgttcccctggaggggctactgctcccagaaggcaaagggagagctctgcagggacttcgtagaggctctgaaggccgtggtgggcggctcccacgtgtccactgccgcggtggtccgagagcagcacgggcgcgatgagtcggtgcacaggtgcgaacctcctgatgctgtggtgtggccccagaacgtggagcaggtcagccggctggcagccctgtgctatcgccaaggtgtgcccatcatcccattcggcaccggcaccgggcttgagggtggcgtctgtgctgtgcagggcggcgtctgcgttaacctgacgcatatggaccgaatcctggagctgaaccaggaggacttctctgtggtggtggagccaggtgtcacccgcaaagccctcaacgcccacctgcgggacagcggcctctggtttcccgtggacccaggcgcggacgcctctctctgtggcatggcggccaccggggcgtcggggaccaacgcggtccgctacggcaccatgcgggacaacgtgctcaacctggaggtggtgctgcccgacgggcggctgctgcacacggcgggccgaggccggcatttccgcttcggcttctggccagaaatccctcatcacacagcctggtactcaccttgtgtgtccctgggacgtaggaagagtgcagccggctacaacctcacggggctcttcgtgggctccgaggggacgctgggcctcatcacagccaccaccctgcgcctgcaccctgcccctgaggccacagtggccgccacgtgtgcgttccccagtgtccaggctgctgtggacagcactgtacacatcctccaggctgcagtgcccgtagcccgcattgagttcctggatgaagtcatgatggatgcctgcaacaggtacagcaagctgaattgcttagtggcgcccacactcttcctggagttccatggctcccagcaggcactggaggagcagctgcagcgcacagaggagatagtccagcagaacggagcctctgacttctcctgggccaaggaggccgaggagcgcagccggctttggacagcacggcacaatgcctggtacgcagccctggccacgcggccaggctgcaagggctactccacggatgtgtgtgtgcccatctcccggctgccggagatcgtggtgcagaccaaggaggatctgaatgcctcaggactcacaggaagcattgtcgggcatgtgggtgacggcaacttccactgcatcctgctggtcaaccctgatgacgccgaggaactgggcagggtcaaggcttttgcagaacagctgggcaggcgggcactggctctccacggaacgtgcacgggggagcatggcatcggaatgggcaagcggcagctgctgcaggaggaggtgggcgccgtgggcgtggagaccatgcggcagctcaaggccgtgctagacccccaaggcctcatgaatccaggcaaagtgctgtgaagggggtctgagcacttagcccacaagttccctgactacggagccggttctggaacttttcttcatgccacggcccctgcaaggaaatagatgctgaggcagtcttcctgccagcgagcccactgtatctgggcccaaggccagagggcccagagagaagcctgagcaccgtgttacctccctggccctctggctggccccaggagcctttggttcagtaaacgacccagggtggttcccagcaaagctgcttcctctctgctcctacgcatcctgtcctggcgggaagagagcgtctgggtccattcaagactctgatgacacccctccccgaggcctcccactgccggggtcccaggacccttcccccttcacctggtgacaggaacactcctttcctggtatggaacgtgagctcccgtgacatgatgataggtcttctccttggggcctcccccaataaatctgtaataaacctgaaacccacctacagcta

SEQ ID NO: 25679 - protein, 507 aa, Homo sapiens; identical to SEQ ID NO: 3407

SEQ ID NO: 25680 - DNA, 2001 bp, Homo sapiens
actggtcaccctgccacccagtgctcacaccctctggccagtgcctggctatggcccgactgctcaggtctgcaacctgggagctgttcccctggaggggctactgctcccagaaggcaaagggagagctctgcagggacttcgtagaggctctgaaggccgtggtgggcggctcccacgtgtccactgccgcggtggtccgagagcagcacgggcgcgatgagtcggtgcacaggtgcgaacctcctgatgctgtggtgtggccccagaacgtggagcaggtcagccggctggcagccctgtgctatcgccaaggtgtgcccatcatcccattcggcaccggcaccgggcttgagggtggcgtctgtgctgtgcagggcggcgtctgcgttaacctgacgcatatggaccgaatcctggagctgaaccaggaggacttctctgtggtggtggagccaggtgtcacccgcaaagccctcaacgcccacctgcgggacagcggcctctggtttcccgtggacccaggcgcggacgcctctctctgtggcatggcggccaccggggcgtcggggaccaacgcggtccgctacggcaccatgcgggacaacgtgctcaacctggaggtggtgctgcccgacgggcggctgctgcacacggcgggccgaggccggcatttccggaagagtgcagccggctacaacctcacggggctcttcgtgggctccgaggggacgctgggcctcatcacagccaccaccctgcgcctgcaccctgcccctgaggccacagtggccgccacgtgtgcgttccccagtgtccaggctgctgtggacagcactgtacacatcctccaggctgcagtgcccgtagcccgcattgagttcctggatgaagtcatgatggatgcctgcaacaggtacagcaagctgaattgcttagtggcgcccacactcttcctggagttccatggctcccagcaggcactggaggagcagctgcagcgcacagaggagatagtccagcagaacggagcctctgacttctcctgggccaaggaggccgaggagcgcagccggctttggacagcacggcacaatgcctggtacgcagccctggccacgcggccaggctgcaagggctactccacggatgtgtgtgtgcccatctcccggctgccggagatcgtggtgcagaccaaggaggatctgaatgcctcaggactcacaggaagcattgtcgggcatgtgggtgacggcaacttccactgcatcctgctggtcaaccctgatgacgccgaggaactgggcagggtcaaggcttttgcagaacagctgggcaggcgggcactggctctccacggaacgtgcacgggggagcatggcatcggaatgggcaagcggcagctgctgcaggaggaggtgggcgccgtgggcgtggagaccatgcggcagctcaaggccgtgctagacccccaaggcctcatgaatccaggcaaagtgctgtgaagggggtctgagcacttagcccacaagttccctgactacggagccggttctggaacttttcttcatgccacggcccctgcaaggaaatagatgctgaggcagtcttcctgccagcgagcccactgtatctgggcccaaggccagagggcccagagagaagcctgagcaccgtgttacctccctggccctctggctggccccaggagcctttggttcagtaaacgacccagggtggttcccagcaaagctgcttcctctctgctcctacgcatcctgtcctggcgggaagagagcgtctgggtccattcaagactctgatgacacccctccccgaggcctcccactgccggggtcccaggacccttcccccttcacctggtgacaggaacactcctttcctggtatggaacgtgagctcccgtgacatgatgataggtcttctccttggggcctcccccaataaatctgtaataaacctgaaacccacctacagcta

SEQ ID NO: 25681 - protein, 484 aa, Homo sapiens; identical to SEQ ID NO: 3409

SEQ ID NO: 25682 - DNA, 1822 bp, Homo sapiens
tggtcaccctgccacccagtgctcacaccctctggccagtgcctggctatggcccgactgctcaggtctgcaacctgggagctgttcccctggaggggctactgctcccagaaggcaaagggagagctctgcagggacttcgtagaggctctgaaggccgtggtgggcggctcccacgtgtccactgccgcggtggtccgagagcagcacgggcgcgatgagtcggtgcacaggtgcgaacctcctgatgctgtggtgtggccccagaacgtggagcaggtcagccggctggcagccctgtgctatcgccaaggtgtgcccatcatcccattcggcaccggcaccgggcttgagggtggcgtctgtgctgtgcagggcggcgtctgcgttaacctgacgcatatggaccgaatcctggagctgaaccaggaggacttctctgtggtggtggagccaggtgtcacccgcaaagccctcaacgcccacctgcgggacagcggcctctggtttcccgtggacccaggcgcggacgcctctctctgtggcatggcggccaccggggcgtcggggaccaacgcggtccgctacggcaccatgcgggacaacgtgctcaacctggaggtggtgctgcccgacgggcggctgctgcacacggcgggccgaggccggcatttccgcttcggcttctggccagaaatccctcatcacacagcctggtactcaccttgtgtgtccctgggacgtaggaagagtgcagccggctacaacctcacggggctcttcgtgggctccgaggggacgctgggcctcatcacagccaccaccctgcgcctgcaccctgcccctgaggccacagtggccgccacgtgtgcgttccccagtgtccaggctgctgtggacagcactgtacacatcctccaggctgcagtgcccgtagcccgcattgagttcctggatgaagtcatgatggatgcctgcaacaggtacagcaagctgaattgcttagtggcgcccacactcttcctggagttccatggctcccagcaggcactggaggagcagctgcagcgcacagaggagatagtccagcagaacggagcctctgacttctcctgggccaaggaggccgaggagcgcagccggctttggacagcacggcacaatgcctggtacgcagccctggccacgcggccaggctgcaagggctactccacggatgtgtgtgtgcccatctcccggctgccggagatcgtggtgcagaccaaggaggatctgaatgcctcaggactcacaggaagcattgtcgggcatgtgggtgacggcaacttccactgcatcctgctggtcaaccctgatgacgccgaggaactgggcagggtcaaggcttttgcagaacagctgggcaggcgggcactggctctccacggaacgtgcacgggggagcatggcatcggaatgggcaagcggcagctgctgcaggaggaggtgggcgccgtgggcgtggagaccatgcggcagctcaaggccgtgctagacccccaaggcctcatgaatccaggcaaagtgctgtgaagggggtctgagcacttagcccacaagttccctgactacggagccggttctggaacttttcttcatgccacggcccctgcaaggaaatagatgctgaggcagtcttcctgccagcgagcccactgtatctgggcccaaggccagagggcccagagagaagcctgagcaccgtgttacctccctggccctctggctggccccaggagcctttggttcagtaaacgacccagggtggttcccagcaaagctg

SEQ ID NO: 25683 - protein, 507 aa, Homo sapiens; identical to SEQ ID NO: 3407

SEQ ID NO: 25684 - DNA, 779 bp, Homo sapiens
ccagtgctcacaccctctggccagtgcctggctatggcccgactgctcaggtctgcaacctgggagctgttcccctggaggggctactgctcccagaaggcaaaggtaccgggagagaagagaagtcctctggagggatgagggagagctctgcagggacttcgtagaggctctgaaggccgtggtgggcggctcccacgtgtccactgccgcggtggtccgagagcagcacgggcgcgatgagtcggtgcacaggtgcgaacctcctgatgctgtggtgtggccccagaacgtggagcaggtcagccggctggcagccctgtgctatcgccaaggtgtgcccatcatcccattcggcaccggcaccgggcttgagggtggcgtctgtgctgtgcagggcggcgtctgcgttaacctgacgcatatggaccgaatcctggagctgaaccaggaggacttctctgtggtggtggagccaggtgtcacccgcaaagccctcaacgcccacctgcgggacagcggcctctggtttcccgtggacccaggcgcggacgcctctctctgtggcatggcggccaccggggcgtcggggaccaacgcggtccgctacggcaccatgcgggacaacgtgctcaacctggaggtggtgctgcccgacgggcggctgctgcacacggcgggccgaggccggcatttccggaagagtgcagccggctacaacctcacggggctcttcgtgggctccgaggggacgctgggcctcatcacagccaccaccc

SEQ ID NO: 25685 - protein, 117 aa, Homo sapiens
MDRILELNQEDFSVVVEPGVTRKALNAHLRDSGLWFPVDPGADASLCGMAATGASGTNAVRYGTMRDNVLNLEVVLPDGRLLHTAGRGRHFRKSAAGYNLTGLFVGSEGTLGLITAT

SEQ ID NO: 25686 - DNA, 605 bp, Homo sapiens
agtgctcacaccctctggccagtgcctggctatggcccgactgctcaggtctgcaacctgggagctgttcccctggaggggctactgctcccagaaggcaaagggagagctctgcagggacttcgtagaggctctgaaggccgtggtgggcggctcccacgtgtccactgccgcggtggtccgagagcagcacgggcgcgatgagtcggtgcacaggtgcgaacctcctgatgctgtggtgtggccccagaacgtggagcaggtcagccggctggcagccctgtgctatcgccaagggcggcgtctgcgttaacctgacgcatatggaccgaatcctggagctgaaccaggaggacttctctgtggtggtggagccaggtgtcacccgcaaagccctcaacgcccacctgcgggacagcggcctctggtttcccgtggacccaggcgcggacgcctctctctgtggcatggcggccaccggggcgtcggggaccaacgcggtccgctacggcaccatgcgggacaacgtgctcaacctggaggtggtgctgcccgacgggcggctgctgcacacggcgggccgaggccggcatttccggaagagt

SEQ ID NO: 25687 - protein, 134 aa, Homo sapiens
MSRCTGANLLMLWCGPRTWSRSAGWQPCAIAKGGVCVNLTHMDRILELNQEDFSVVVEPGVTRKALNAHLRDSGLWFPVDPGADASLCGMAATGASGTNAVRYGTMRDNVLNLEVVLPDGRLLHTAGRGRHFRK

SEQ ID NO: 25688 - DNA, 740 bp, Homo sapiens
cgcggtggtccgagagcagcacgggcgcgatgagtcggtgcacaggtgcgaacctcctgatgctgtggtgtggccccagaacgtggagcaggtcagccggctggcagccctgtgctatcgccaaggtgtgcccatcatcccattcggcaccggcaccgggcttgagggtggcgtctgtgctgtgcaggtacagtggggctccctcgcccggcccgaggatggtcccagcacaccttggcacacctgtggctgcctcccccgccacacacggcaccttgggtctgctcccgcccgtgggctgcctgcctctgggggtctggtctggctgctggggggacacccgcggggtgtggtccggggacgtggccaggtcagagacccaggtctgcagtggtcttagcacctgccccaaccagggcggcgtctgcgttaacctgacgcatatggaccgaatcctggagctgaaccaggaggacttctctgtggtggtggagccaggtgtcacccgcaaagccctcaacgcccacctgcgggacagcggcctctggtttcccgtggacccaggcgcggacgcctctctctgtggcatggcggccaccggggcgtcggggaccaacgcggtccgctacggcaccatgcgggacaacgtgctcaacctggaggtggtgctgcccgacgggcggctgctgcacacggcgggccgaggccggcatttccggtgagcgccctctgcggggggc

SEQ ID NO: 25689 - protein, 230 aa, Homo sapiens
MSRCTGANLLMLWCGPRTWSRSAGWQPCAIAKVCPSSHSAPAPGLRVASVLCRYSGAPSPGPRMVPAHLGTPVAASPATHGTLGLLPPVGCLPLGVWSGCWGDTRGVWSGDVARSETQVCSGLSTCPNQGGVCVNLTHMDRILELNQEDFSVVVEPGVTRKALNAHLRDSGLWFPVDPGADASLCGMAATGASGTNAVRYGTMRDNVLNLEVVLPDGRLLHTAGRGRHFR

SEQ ID NO: 25690 - DNA, 261 bp, Homo sapiens
gcgcgccggtggccgcccttcccccaccaccagcggcgagtgggtgacagagcccccgtctccgcgcgtcttcgccgccctgcgccgtgacccgctgtggcactgggccacgagtggaggctgcgcccctccaggtacgagaggggcttccaggagatgcgcctcagacgggcggcgaagggctcgggccgcgcgggagcgagttctggagccccggcgggcgcgcgcgcgcgggacgaggccccgccggggcgtggtggg

SEQ ID NO: 25691 - protein, 34 aa, Homo sapiens
MRLRRAAKGSGRAGASSGAPAGARARDEAPPGRG

SEQ ID NO: 25692 - DNA, 3131 bp, Homo sapiens
cttcccccaccaccagcggcgagtgggtgacagagcccccgtctccgcgcgtcttcgccgccctgcgccgtgacccgctgtggcactgggccacgagtggaggctgcgcccctccagttctgccttcatagttctctgcctttgcccaaaactgcagaaaatgaacaaatcccagggatcagtttcattcacggatgtgactgtggactttacccaggaggaatgggaacaactggacccctctcagaggatcctatacatggatgtgatgctggagaattatagcaacttactttcagtggaagtgtggaaggctgatgaccagatggagagagaccacagaaacccagacgagcaggcgaggcaatttttaattcttaagaaccaaaccccaattgaggaaagaggcgatctctttggaaaagcacttaatctgaacacagactttgtttctttaagacaagtaccttataaatatgacttatatgaaaaaactttgaaatataattcagacttgcttaatagtaatagaagctatgcaggaaagcagactgatgagtgtaatgaatttggaaaagcacttctctacctgaagcaagagaaaacccacagtggagtagaatattctgaatacaataaaagtggaaaagccctcagccataaagcagccatttttaaacatcagaaaataaaaaacttggttcaacctttcatttgtacttactgtgacaaggctttctcctttaagtcactcctcattagtcataagagaatacatactggagaaaagccatatgaatgcaatgtatgtaagaaaaccttctcccataaggccaacctcatcaaacatcagagaattcacactggggagaaacctttcgagtgtccggaatgtggaaaagctttcacccaccagtcaaacctcattgtacaccagagagcacatatggagaagaagccctatgagtgcagtgaatgtggaaagacatttgcccaaaagtttgaactcaccacacaccagagaattcatacaggagagcgaccctatgagtgtaacgaatgtgcaaaaaccttctttaagaagtcaaaccttatcatacatcagaagattcacacgggggagaaacgctatgagtgcagtgaatgtggaaaatcctttatccagaactcacagctcatcatacacatgagaactcatacaggagagaaaccctatgaatgtactgagtgcggcaaaactttcagccagaggtcaactcttagattacacttgcgaatccacacaggagagaaaccatatgagtgttccgaatgtgggaaggcctttagcaggaagtcccgactcagtgtccatcagagagttcacatcggggagaaaccctgaaactccagccaggtcttactgtggaaaactcctgccagaactcttcaagcgggtgaaaaacctcatgacagtattgagggaacatgggaattcatactgagatgcaatctctcaactcaaaaatgtattaaaaataggatcccatgagaacattatactggaagttacatgtgatacccagctaaagaatacatatcagaatatatccagttgtaaatagccatacccagttgtactacaatgagctttttaaaatcttgaatgaattgagtattctagacagcagcataagaaatatacaaacagtatcctatgaatttagtggttttatgtggatatgccacaaaacacaagtggtatgctttagatctgcacatgtgaatttagcataatcactgggaatttgaaattcttgtcctctgtgataattaggacataacaagattttccatactaaacatcacatgtgtttttcagtatctctgcaatccagtatgcattccaaatgaaatgtgtaacatttaaagtagcatggaacctacgtctttccctactgcttgctggcatatatcagttggtatgaacattgttcttgagctgcctcttaggaaacagaagacagtgttgaagttttccctgcttctggtttgctgaagattttctagaagcactatttacacaaatatgcaaatgtgaaataaccgatctataacgtgaaggaggcagacatgagctgtactactcagtatgcaccacagaataagagtttgccgtgtaaagacaatatccccattcgtcatgctcttattttcccgtgggatatttgcatacaaatgcatgtctgttaccaaaatattgtgtaacacagacagaaaccacctgtttttgtctttccttgtttcccttaatatttcatgaattgtctagcaaaaatggtaggatgcttctgtagttcacaaatgttacatttcagagactttagaggaaaaattattttaaataactgtcaactgtttcattgctttttaaatttttcacgtgcataaccccctttagaagtaaatttttacactattttgttgtttaaaggaggcatttctacttccttgagttttgctgttgccaacctaaaacatttccctttggaacatgagttataagttattacttttcctttacatgtttacacttttataaaaatcagatttttcagtggtctctccagatattaacaagaattgttgtgtaactcaaagatttgcttttatagacttgatttcaaattcttaagttcagcctttccctatcaatcacaaatcatgtattggaaattataaatggcaaccaaaaactggcttttaaaaaatatttttggatatcattgatgtgctgtcacactatatattgagtgactttctgaacaaatttatccagaacatccatagcccaataagcttttgtctaagttgtcatcttacttactcacaaaggaggggaaaacgttattttcatagctgcttttagaaatgtaaattgtaacagcctccttggacaacattgtgagtctgttttaacattaatatactcttacaacctaggaatctcctgggaatctatccctaaggaataaaaagcgccagcacttaagattatatgtttactaatgtatattgtattttttggtaaggaccaaaaaaacaaacaaaaaaaagaccatcagtaagggaatggatgaataaattgtggt

SEQ ID NO: 25693 - protein, 407 aa, Homo sapiens
MNKSQGSVSFTDVTVDFTQEEWEQLDPSQRILYMDVMLENYSNLLSVEVWKADDQMERDHRNPDEQARQFLILKNQTPIEERGDLFGKALNLNTDFVSLRQVPYKYDLYEKTLKYNSDLLNSNRSYAGKQTDECNEFGKALLYLKQEKTHSGVEYSEYNKSGKALSHKAAIFKHQKIKNLVQPFICTYCDKAFSFKSLLISHKRIHTGEKPYECNVCKKTFSHKANLIKHQRIHTGEKPFECPECGKAFTHQSNLIVHQRAHMEKKPYECSECGKTFAQKFELTTHQRIHTGERPYECNECAKTFFKKSNLIIHQKIHTGEKRYECSECGKSFIQNSQLIIHMRTHTGEKPYECTECGKTFSQRSTLRLHLRIHTGEKPYECSECGKAFSRKSRLSVHQRVHIGEKP

SEQ ID NO: 25694 - DNA, 3284 bp, Homo sapiens
cttcccccaccaccagcggcgagtgggtgacagagcccccgtctccgcgcgtcttcgccgccctgcgccgtgacccgctgtggcactgggccacgagtggaggctgcgcccctccagttctgccttcatagttctctgcctttgcccaaaactgcagaaaatgaacaaatcccagggatcagtttcattcacggatgtgactgtggactttacccaggaggaatgggaacaactggacccctctcagaggatcctatacatggatgtgatgctggagaattatagcaacttactttcagtggaagtgtggaaggctgatgaccagatggagagagaccacagaaacccagacgagcaggcgaggcaatttttaattcttaagaaccaaaccccaattgaggaaagaggcgatctctttggaaaagcacttaatctgaacacagactttgtttctttaagacaagtaccttataaatatgacttatatgaaaaaactttgaaatataattcagacttgcttaatagtaatagaagctatgcaggaaagcagactgatgagtgtaatgaatttggaaaagcacttctctacctgaagcaagagaaaacccacagtggagtagaatattctgaatacaataaaagtggaaaagccctcagccataaagcagccatttttaaacatcagaaaataaaaaacttggttcaacctttcatttgtacttactgtgacaaggctttctcctttaagtcactcctcattagtcataagagaatacatactggagaaaagccatatgaatgcaatgtatgtaagaaaaccttctcccataaggccaacctcatcaaacatcagagaattcacactggggagaaacctttcgagtgtccggaatgtggaaaagctttcacccaccagtcaaacctcattgtacaccagagagcacatatggagaagaagccctatgagtgcagtgaatgtggaaagacatttgcccaaaagtttgaactcaccacacaccagagaattcatacaggagagcgaccctatgagtgtaacgaatgtgcaaaaaccttctttaagaagtcaaaccttatcatacatcagaagattcacacgggggagaaacgctatgagtgcagtgaatgtggaaaatcctttatccagaactcacagctcatcatacacatgagaactcatacaggagagaaaccctatgaatgtactgagtgcggcaaaactttcagccagaggtcaactcttagattacacttgcgaatccacacaggagagaaaccatatgagtgttccgaatgtgggaaggcctttagcaggaagtcccgactcagtgtccatcagagagttcacatcggggagaaaccctgaaactccagccaggtcttactgtggaaaactcctgccagaactcttcaagcgggtgaaaaacctcatgacagtattgagggaacatgggaattcatactgagatgcaatctctcaactcaaaaatgtattaaaaataggatcccatgagaacattatactggaagttacatgtgatacccagctaaagaatacatatcagaatatatccagttgtaaatagccatacccagttgtactacaatgagctttttaaaatcttgaatgaattgagtattctagacagcagcataagaaatatacaaacagtatcctatgaatttagtggttttatgtggatatgccacaaaacacaagtggtatgctttagatctgcacatgtgaatttagcataatcactgggaatttgaaattcttgtcctctgtgataattaggacataacaagattttccatactaaacatcacatgtgtttttcagtatctctgcaatccagtatgcattccaaatgaaatgtgtaacatttaaagtagcatggaacctacgtctttccctactgcttgctggcatatatcagttggtatgaacattgttcttgagctgcctcttaggaaacagaagacagtgttgaagttttccctgcttctggtttgctgaagattttctagaagcactatttacacaaatatgcaaatgtgaaataaccgatctataacgtgaaggaggcagacatgagctgtactactcagtatgcaccacagaataagagtttgccgtgtaaagacaatatccccattcgtcatgctcttattttcccgtgggatatttgcatacaaatgcatgtctgttaccaaaatattgtgtaacacagacagaaaccacctgtttttgtctttccttgtttcccttaatatttcatgaattgtctagcaaaaatggtaggatgcttctgtagttcacaaatgttacatttcagagactttagaggaaaaattattttaaataactgtcaactgtttcattgctttttaaatttttcacgtgcataaccccctttagaagtaaatttttacactattttgttgtttaaaggaggcatttctacttccttgagttttgctgttgccaacctaaaacatttccctttggaacatgagttataagttattacttttcctttacatgtttacacttttataaaaatcagatttttcagtggtctctccagatattaacaagaattgttgtgtaactcaaagatttgcttttatagacttgatttcaaattcttaagttcagcctttccctatcaatcacaaatcatgtattggaaattataaatggcaaccaaaaactggcttttaaaaaatatttttggatatcattgatgtgctgtcacactatatattgagtgactttctgaacaaatttatccagaacatccatagcccaataagcttttgtctaagttgtcatcttacttactcacaaaggaggggaaaacgttattttcatagctgcttttagaaatgtaaattgtaacagcctccttggacaacattgtgagtctgttttaacattaatatactcttacaacctaggaatctcctgggaatctatccctaaggaataaaaagcgccagcacttaagattatatgtttactaatgtatattgtattttttggtaaggaccaaaaaaacaaacaaaaaaaagaccatcagtaagggaatggatgaataaattgtggtaaaaacataccatggctgaatggtatttccttgaaaagaatgtgtgggaacaaactccaaacttctctaggtcaaatgaggaaagcaagaggggagagagagagtgtatgtgtgtgtgtagcagtttttataaaataaagataaacccttata

SEQ ID NO: 25695 - protein, 407 aa, Homo sapiens; identical to SEQ ID NO: 25693

SEQ ID NO: 25696 - DNA, 903 bp, Homo sapiens
cggggaccggcagacaggcgtcctacacccctgccagcggcaccatggctttcctctggctcctctcctgctgggccctcctgggtaccaccttcggctgcggggtccccgccatccaccctgtgctcagcggcctgtccaggatcgtgaatggggaggacgccgtccccggctcctggccctggcaggtgtccctgcaggacaaaaccggcttccacttctgcgggggctccctcatcagcgaggactgggtggtcaccgctgcccactgcggggtcaggacctccgacgtggtcgtggctggggagtttgaccagggctctgacgaggagaacatccaggtcctgaagatcgccaaggtcttcaagaaccccaagttcagcattctgaccgtgaacaatgacatcaccctgctgaagctggccacacctgcccgcttctcccagacagtgtccgccgtgtgcctgcccagcgccgacgacgacttccccgcggggacactgtgtgccaccacaggctggggcaagaccaagtacaacgccaacaagacccctgacaagctgcagcaggcagccctgcccctcctgtccaatgccgaatgcaagaagtcctggggcaggaggatcaccgacgtgatgatctgtgccggggccagtggcgtctcctcctgcatgggtgactctggaggccccctggtctgccagaaggacggagcctggaccctggtgggcattgtgtcctggggcagccgcacctgctctaccaccacgcccgctgtgtacgcccgtgtcgccaagctcataccctgggtgcagaagatcctggccgccaactgagcccgcagctcctgccacccctgccttaagatttcccattaaatgcatctgtttagaagccctgact

SEQ ID NO: 25697 - protein, 263 aa, Homo sapiens
MAFLWLLSCWALLGTTFGCGVPAIHPVLSGLSRIVNGEDAVPGSWPWQVSLQDKTGFHFCGGSLISEDWVVTAAHCGVRTSDVVVAGEFDQGSDEENIQVLKIAKVFKNPKFSILTVNNDITLLKLATPARFSQTVSAVCLPSADDDFPAGTLCATTGWGKTKYNANKTPDKLQQAALPLLSNAECKKSWGRRITDVMICAGASGVSSCMGDSGGPLVCQKDGAWTLVGIVSWGSRTCSTTTPAVYARVAKLIPWVQKILAAN

SEQ ID NO: 25698 - DNA, 477 bp, Homo sapiens
accgtgaacaatgacatcaccctgagtgtccgccgtgtgcctgcccagcgccgacgacgacttccccgcggggacactgtgtgccaccacaggctggggcaagaccaagtacaacgccaacaagacccctgacaagctgcagcaggcagccctgcccctcctgtccaatgccgaatgcaagaagtcctggggcaggaggatcaccgacgtgatgatctgtgccggggccagtggcgtctcctcctgcatgggtgactctggaggccccctggtctgccagaaggacggagcctggaccctggtgggcattgtgtcctggggcagccgcacctgctctaccaccacgcccgctgtgtacgcccgtgtcgccaagctcataccctgggtgcagaagatcctggccgccaactgagcccgcagctcctgccacccctgccttaagatttcccattaaatgcatctgtttagaagccctga

SEQ ID NO: 25699 - protein, 66 aa, Homo sapiens
MICAGASGVSSCMGDSGGPLVCQKDGAWTLVGIVSWGSRTCSTTTPAVYARVAKLIPWVQKILAAN

SEQ ID NO: 25700 - DNA, 406 bp, Homo sapiens
cttcaagaaccccaagttcagcattctgaccgtgaacaatgacatcaccctgctgaagctggccacacctgcccgcttctcccagacagtgtccgccgtgtgcctgcccagcgccgacgacgacttccccgcggggacactgtgtgccaccacaggctggggcaagaccaagtacaacgggtgactctggaggccccctggtctgccagaaggacggagcctggaccctggtgggcattgtgtcctggggcagccgcacctgctctaccaccacgcccgctgtgtacgcccgtgtcgccaagctcataccctgggtgcagaagatcctggccgccaactgagcccgcagctcctgccacccctgccttaagatttcccattaaatgcatctgtttagaagccctga

SEQ ID NO: 25701 - protein, 120 aa, Homo sapiens [sequence omitted]

SEQ ID NO: 25702 - DNA, 856 bp, Homo sapiens
ggcatggcttccctctggctcctctcctgcttctcccttgtgggggccgcctttggctgcggggtccccgccatccaccctgtgctcagcggcctgtccaggatcgtgaatggggaggacgccgtccccggctcctggccctggcaggtgtccctgcaggacaaaaccggcttccacttctgcgggggctccctcatcagcgaggactgggtggtcaccgctgcccactgcggggtcaggacctccgacgtggtcgtggctggggagtttgaccagggctctgacgaggagaacatccaggtcctgaagatcgccaaggtcttcaagaaccccaagttcagcattctgaccgtgaacaatgacatcaccctgctgaagctggccacacctgcccgcttctcccagacagtgtccgccgtgtgcctgcccagcgccgacgacgacttccccgcggggacactgtgtgccaccacaggctggggcaagaccaagtacaacgccaacaagacccctgacaagctgcagcaggcagccctgcccctcctgtccaatgccgaatgcaagaagtcctggggcaggaggatcaccgacgtgatgatctgtgccggggccagtggcgtctcctcctgcatgggcgactctggcggccccctggtctgccaaaaggatggagcctggaccctggtgggcattgtgtcctggggcagcgacacctgctccacctccagccctggcgtgtacgcccgtgtcaccaagctcataccttgggtgcagaagatcctggctgccaactgagcccgcggctccctccgaccctgctccccacagagcctcagtaaacccatggaacacacgt

SEQ ID NO: 25703 - protein, 263 aa, Homo sapiens
MASLWLLSCFSLVGAAFGCGVPAIHPVLSGLSRIVNGEDAVPGSWPWQVSLQDKTGFHFCGGSLISEDWVVTAAHCGVRTSDVVVAGEFDQGSDEENIQVLKIAKVFKNPKFSILTVNNDITLLKLATPARFSQTVSAVCLPSADDDFPAGTLCATTGWGKTKYNANKTPDKLQQAALPLLSNAECKKSWGRRITDVMICAGASGVSSCMGDSGGPLVCQKDGAWTLVGIVSWGSDTCSTSSPGVYARVTKLIPWVQKILAAN

SEQ ID NO: 25704 - DNA, 1326 bp, Homo sapiens
ggcatggcttccctctggctcctctcctgcttctcccttgtgggggccgcctttggctgcggggtccccgccatccaccctgtgctcagcggcctgtccaggatcgtgaatggggaggacgccgtccccggctcctggccctggcaggtgtccctgcaggacaaaaccggcttccacttctgcgggggctccctcatcagcgaggactgggtggtcaccgctgcccactgcggggtcaggacctccgacgtggtcgtggctggggagtttgaccagggctctgacgaggagaacatccaggtcctgaagatcgccaaggtcttcaagaaccccaagttcagcattctgaccgtgaacaatgacatcaccctgctgaagctggccacacctgcccgcttctcccagacagtgtccgccgtgtgcctgcccagcgccgacgacgacttccccgcggggacactgtgtgccaccacaggctggggcaagaccaagtacaacgccaacaagacccctgacaagctgcagcaggcagccctgcccctcctgtccaatgccgaatgcaagaagtcctggggcaggaggatcaccgacgtgatgatctgtgccggggccagtggcgtctcctcctgcatgggcgactctggcggccccctggtctgccaaaaggatggagcctggaccctggtgggcattgtgtcctggggcagcgacacctgctccacctccagccctggcgtgtacgcccgtgtcaccaagctcataccttgggtgcagaagatcctggctgccaactgagcccgcggctccctccgaccctgctccccacagagcctcagtaaacccatggaacacacgtcggcgctgtccgtcttctgttttggggcctccaaggcctcactccactccggaacctgggcccccactgggctggactgggctgggctaggcatgggcggcctctgggaggacccttccttagtcccctctcccaccactcaggctcctgcttcccagagagtggccaggaacacacgggcagatgaaaaggggtgcagagacagacgggggatctggctggtggggaccgggtggaccttggcccccatcctcagcacctgcccccaggcgacaggttcttgccacccacccttgctctcttgctctgggccctgcaggagggcgtgggcagcgtgggggctgtggggggatgagctcactctggccccacagacctgtggctccaaggaatcttcccacggccactcctagggctgccagacatacgctggagccaggagcgttatcaacgcaaggactggtgatgag

SEQ ID NO: 25705 - protein, 263 aa, Homo sapiens; identical to SEQ ID NO: 25703

SEQ ID NO: 25706 - DNA, 590 bp, Homo sapiens
gcttagaagcaagtcacgggtcctaactcacactcaagaggagggagccacacaaagcaatgaccatcaggggaagagattaggggtgccaccttagagtttgccacacggtcttcctaagaaaaccaagatctagaatttctagtagaattttcttttgttcgtctaagaatcaattgattcttaattctaagcttgaagtgtaactgcatttttatgggcaaaacaatcctggacctggccagtaacccaaccaaaccaggggcagaggagatgctggtcagccagaggatacaggggaagaacagaaaaggcataacaagagggaagaagaggtgactggagaaagagagacatattcacgccacagaaagaaaacaataaaaagtcatctgatttcctcatactgagtagctccccatgtgattcgggtgttgtgggtactcatgtcctggtgactgtacctcccagctcaagctgccaatcacggtattttccctaaaatgttcccttcccaaaatggaaacctcatgttcgttgtcaagataataaaagttgcacattagcggcacatttataatcttgctaaa

SEQ ID NO: 25707 - protein, 40 aa, Homo sapiens
MGKTILDLASNPTKPGAEEMLVSQRIQGKNRKGITRGKKR

SEQ ID NO: 25708 - DNA, 4893 bp, Homo sapiens
gcggagctcgagcgctgttgtgtgtttggaaggaaggatgctgctgccaatttgtgggaccgctgctgcgaggagtgggcgtggcctcggcggtgtggatgcttgttaggaaagatgctgagtgcttttcagtgaggagtcagggaggtgtgtgtgagagagagagagaaaagagagagacagagacggggagagagagagggagagagaagagagggaggagggaagaagaaaagacggagggaggtgaggaggaagggagggggagagacagagacctagaggggctgaagacccagacagagctggcagagctactgagaagaggactggagcgctctgagagcctctcaagatcttttgggggagcccaataaatgtgaacatgggatctgtcacgggagctgtcctcaagacgctacttctgtatctactcaaaattggaacagagtcgaagctgggaattcctatgactgtgatgatcctcttgtgtctgccttgcctcaggcatccttcagcagttcttccgagctctccagcagtcatggtcctggatttgcaaggctgaatagaagagatggagctggtggctggtctccacttgtgtctaacaaataccagtggttgcagattgaccttggagagagaatggaggtcaccgctgtggccactcaagggggatatggtagctccaactgggtgaccagctacctcctgatgttcagtgatagtggctggaactggaaacaatatcgccaagaggacagcatctggggtttttcaggaaatgcaaatgcagacagtgttgtgtactatagactccagccttctatcaaagccagatttctgcgcttcatccctttggaatggaaccccaagggcagaattggaatgcgaatcgaagtgttcggatgtgcatacagatcagaagtggttgatcttgatggaaaaagttcccttctctacagatttgatcaaaaatccctgagcccaataaaagacattatttctttgaaattcaaaaccatgcagagtgatgggattctactccacagggaagggccaaatggagatcacatcacactgcaattaagaagagcaagactctttttacttattaattcaggtgaagctaaactgccttccacttccaccctggtcaatctcaccctgggcagcctgctagatgatcagcattggcattcagtgctcatccagcgtttgggcaaacaagtcaacttcacagtggacgaacacaggcatcatttccatgcacggggagaattcaatctcatgaatcttgattatgagatcagctttggagggattccagcacctggaaaatcagtgtcattcccacatagaaattttcatggatgtttagaaaatctctattataatggagtggatatcattgatttggccaagcagcaaaaaccacagatcattgctatgggaaatgtgtcattttcttgttcacaaccacaatctatgcccgtgacttttctgagctccaggagttatttagcactgccagacttctctggagaggaggaggtttctgccacttttcaatttcgaacttggaataaggcagggcttctgctgttcagtgaacttcagctgatttcagggggtatcctcctctttctgagtgatggaaaacttaagtcgaatctctaccagccaggaaaattacccagtgacatcacagcaggtgtcgaattaaatgatgggcagtggcattctgtctctttatctgctaaaaagaatcacttgagtgtggcggtggacggccagatggcttctgctgctcctctgctggggcctgagcagatttattcgggtggcacctattattttggaggttgtcctgacaaaagctttggatccaaatgtaaaagtccacttggtggatttcagggatgtatgaggctcatttctatcagcggcaaagtggtagatctgatttcagttcagcaggggtcccttgggaacttcagtgaccttcagatagactcatgtggcatctcagacaggtgtttgcccaactattgtgaacacggtggggagtgttcccagtcctggagcacctttcattgtaactgtaccaacactggttacagaggagctacttgccataactctatctatgagcagtcatgtgaagcctataagcacagaggaaatacttcagggttttactatatagattcagatggaagtggtcccctggaaccatttcttctatattgcaatatgaccgaaactgcatggaccatcatacagcacaacggctctgacttaacaagagtcagaaatactaatccagagaacccatatgctgggtttttcgagtatgtggccagcatggagcaacttcaggccactattaaccgtgcagagcactgtgaacaggagtttacttattactgcaagaagtcacggctggtcaataagcaagatggaacccctctgagttggtgggtaggaagaaccaatgaaacgcaaacctactggggaggttcttcgcctgatcttcaaaaatgtacttgtggattagagggaaactgcattgattctcagtattactgcaattgtgatgctgaccggaatgaatggaccaatgacactggattgcttgcttataaagaacatcttccagtaactaagatcgtgattacagacacaggccgactgcattcagaagcagcttataaactggggcctctgctctgccagggagacagatcattttggaattcagcttcctttgataccgaggcttcatatcttcattttcctaccttccacggagaacttagcgcggatgtatctttcttttttaagacaacagcttcatctggggtatttttagagaacttggggattgctgattttatacggatagagcttcgctctccgacagtagtgactttttcatttgatgtggggaatgggccttttgaaatctcagtgcagtcacccacccacttcaacgacaaccagtggcaccatgtgagggttgaaaggaacatgaaggaggcctcccttcaagtggatcagctgacaccaaagacacagcccgcccccgctgatgggcatgtcctgttacagctcaacagtcagctcttcgtgggtggaacggccaccagacagagaggctttctgggctgcattcggtctctgcagttgaatgggatgaccctggatttggaagaaagagcccaggtgactccagaagtgcagccaggttgtaggggacattgcagcagctatgggaagttatgccgcaatggagggaaatgcagagaaagacccattgggttcttttgtgactgcactttctctgcatacacagggccattctgctcaaatgagatttctgcatattttggatctggctcatccgtgatatacaattttcaagaaaattatcttttaagtaaaaactccagctcccacgctgcttcatttcatggtgatatgaagctgagcagagaaatgatcaaatttagtttccgaacaacacgaacaccaagcttgctgctttttgtgagctccttttacaaagaatacctttctgtgatcattgccaaaaatggaagtttgcagatcaggtacaagttaaataaatatcaagagcctgatgttgttaactttgattttaaaaacatggctgatggacaacttcaccacataatgattaacagagaagaaggagtggtctttatagagattgacgataatagaaggagacaagttcacctgtcatcaggcacagaattcagtgcagtcaaatctctggtattgggcaggattttagaacacagtgatgtggaccaggatactgcactggcaggtgcgcagggcttcacaggctgcctctctgcagtgcagctcagccacgtggcccctctgaaggcagctctgcaccccagccacccagaccctgtcactgttacaggacacgtgactgagtccagctgtatggcccagcctggcactgatgccacatcaagggaaaggacacactcgtttgcagatcattctggaacaatagatgacagagagccccttgctaatgcaatcaaaagtgactctgcagtaattggaggtctgatagctgttgtgatttttatcttgctttgcatcactgccatagctgttcgcatttatcagcagaaaaggttatataaaagaagtgaggcaaaaaggtcagagaatgtagacagtgctgaggctgttctgaaaagtgagcttaatatacaaaatgcagtcaatgaaaatcagaaagagtacttcttctgattggcagctatgatttaacataaaattatgatagtttgttttaatagccaggggttctcaatggaaaaacgaatgctcttacactgaatgtacaggcagtgggcttgcagcactgccatcttgccatgtacaggcttggggtggctccaggaagcctcgtccagtgatatatttctcatagcattcattctatggaacaagaaattagatattgctgttaattttcaactgttctggtatgatctaaaacaagtttaacctgcttaatggctacagtttttacatgtgaaaactgtagccttggtctcttaaccatgtaatacataagttttgttagaggtaaaaattaaatttggactataatgtccttgctttatttgagaacatttgctgtgtttgcttttgtctcctcgtggtgttattcatagacctggaaatgcttctcagatcctgtgtggccggtgtttgcatcttcagtggccacaagcataataaagcccctttgcctttctctgtattatattcaatacaatacatcaatagtcttgaaaaatgttttgctgtctttgctttgtttgtatt

SEQ ID NO: 25709 - protein, 1220 aa, Homo sapiens
MEVTAVATQGGYGSSNWVTSYLLMFSDSGWNWKQYRQEDSIWGFSGNANADSVVYYRLQPSIKARFLRFIPLEWNPKGRIGMRIEVFGCAYRSEVVDLDGKSSLLYRFDQKSLSPIKDIISLKFKTMQSDGILLHREGPNGDHITLQLRRARLFLLINSGEAKLPSTSTLVNLTLGSLLDDQHWHSVLIQRLGKQVNFTVDEHRHHFHARGEFNLMNLDYEISFGGIPAPGKSVSFPHRNFHGCLENLYYNGVDIIDLAKQQKPQIIAMGNVSFSCSQPQSMPVTFLSSRSYLALPDFSGEEEVSATFQFRTWNKAGLLLFSELQLISGGILLFLSDGKLKSNLYQPGKLPSDITAGVELNDGQWHSVSLSAKKNHLSVAVDGQMASAAPLLGPEQIYSGGTYYFGGCPDKSFGSKCKSPLGGFQGCMRLISISGKVVDLISVQQGSLGNFSDLQIDSCGISDRCLPNYCEHGGECSQSWSTFHCNCTNTGYRGATCHNSIYEQSCEAYKHRGNTSGFYYIDSDGSGPLEPFLLYCNMTETAWTIIQHNGSDLTRVRNTNPENPYAGFFEYVASMEQLQATINRAEHCEQEFTYYCKKSRLVNKQDGTPLSWWVGRTNETQTYWGGSSPDLQKCTCGLEGNCIDSQYYCNCDADRNEWTNDTGLLAYKEHLPVTKIVITDTGRLHSEAAYKLGPLLCQGDRSFWNSASFDTEASYLHFPTFHGELSADVSFFFKTTASSGVFLENLGIADFIRIELRSPTVVTFSFDVGNGPFEISVQSPTHFNDNQWHHVRVERNMKEASLQVDQLTPKTQPAPADGHVLLQLNSQLFVGGTATRQRGFLGCIRSLQLNGMTLDLEERAQVTPEVQPGCRGHCSSYGKLCRNGGKCRERPIGFFCDCTFSAYTGPFCSNEISAYFGSGSSVIYNFQENYLLSKNSSSHAASFHGDMKLSREMIKFSFRTTRTPSLLLFVSSFYKEYLSVIIAKNGSLQIRYKLNKYQEPDVVNFDFKNMADGQLHHIMINREEGVVFIEIDDNRRRQVHLSSGTEFSAVKSLVLGRILEHSDVDQDTALAGAQGFTGCLSAVQLSHVAPLKAALHPSHPDPVTVTGHVTESSCMAQPGTDATSRERTHSFADHSGTIDDREPLANAIKSDSAVIGGLIAVVIFILLCITAIAVRIYQQKRLYKRSEAKRSENVDSAEAVLKSELNIQNAVNENQKEYFF

SEQ ID NO: 25710 - DNA, 4364 bp, Homo sapiens
atgggatctgtcacgggagctgtcctcaagacgctacttctgtatctactcaaaattggaacagagtcgaagctgggaattcctatgactgtgatgatcctcttgtgtctgccttgcctcaggcatccttcagcagttcttccgagctctccagcagtcatggtcctggatttgcaaggctgaatagaagagatggagctggtggctggtctccacttgtgtctaacaaataccagtggttgcagattgaccttggagagagaatggaggtcaccgctgtggccactcaagggggatatggtagctccaactgggtgaccagctacctcctgatgttcagtgatagtggctggaactggaaacaatatcgccaagaggacagcatctggggtttttcaggaaatgcaaatgcagacagtgttgtgtactatagactccagccttctatcaaagccagatttctgcgcttcatccctttggaatggaaccccaagggcagaattggaatgcgaatcgaagtgttcggatgtgcatacagatcagaagtggttgatcttgatggaaaaagttcccttctctacagatttgatcaaaaatccctgagcccaataaaagacattatttctttgaaattcaaaaccatgcagagtgatgggattctactccacagggaagggccaaatggagatcacatcacactgcaattaagaagagcaagactctttttacttattaattcaggtgaagctaaactgccttccacttccaccctggtcaatctcaccctgggcagcctgctagatgatcagcattggcattcagtgctcatccagcgtttgggcaaacaagtcaacttcacagtggacgaacacaggcatcatttccatgcacggggagaattcaatctcatgaatcttgattatgagggaaatgtgtcattttcttgttcacaaccacaatctatgcccgtgacttttctgagctccaggagttatttagcactgccagacttctctggagaggaggaggtttctgccacttttcaatttcgaacttggaataaggcagggcttctgctgttcagtgaacttcagctgatttcagggggtatcctcctctttctgagtgatggaaaacttaagtcgaatctctaccagccaggaaaattacccagtgacatcacagcaggtgtcgaattaaatgatgggcagtggcattctgtctctttatctgctaaaaagaatcacttgagtgtggcggtggacggccagatggcttctgctgctcctctgctggggcctgagcagatttattcgggtggcacctattattttggaggttgtcctgacaaaagctttggatccaaatgtaaaagtccacttggtggatttcagggatgtatgaggctcatttctatcagcggcaaagtggtagatctgatttcagttcagcaggggtcccttgggaacttcagtgaccttcagatagactcatgtggcatctcagacaggtgtttgcccaactattgtgaacacggtggggagtgttcccagtcctggagcacctttcattgtaactgtaccaacactggttacagaggagctacttgccataactctatctatgagcagtcatgtgaagcctataagcacagaggaaatacttcagggttttactatatagattcagatggaagtggtcccctggaaccatttcttctatattgcaatatgaccgaaactgcatggaccatcatacagcacaacggctctgacttaacaagagtcagaaatactaatccagagaacccatatgctgggtttttcgagtatgtggccagcatggagcaacttcaggccactattaaccgtgcagagcactgtgaacaggagtttacttattactgcaagaagtcacggctggtcaataagcaagatggaacccctctgagttggtgggtaggaagaaccaatgaaacgcaaacctactggggaggttcttcgcctgatcttcaaaaatgtacttgtggattagagggaaactgcattgattctcagtattactgcaattgtgatgctgaccggaatgaatggaccaatgacactggattgcttgcttataaagaacatcttccagtaactaagatcgtgattacagacacaggccgactgcattcagaagcagcttataaactggggcctctgctctgccagggagacagatcattttggaattcagcttcctttgataccgaggcttcatatcttcattttcctaccttccacggagaacttagcgcggatgtatctttcttttttaagacaacagcttcatctggggtatttttagagaacttggggattgctgattttatacggatagagcttcgctctccgacagtagtgactttttcatttgatgtggggaatgggccttttgaaatctcagtgcagtcacccacccacttcaacgacaaccagtggcaccatgtgagggttgaaaggaacatgaaggaggcctcccttcaagtggatcagctgacaccaaagacacagcccgcccccgctgatgggcatgtcctgttacagctcaacagtcagctcttcgtgggtggaacggccaccagacagagaggctttctgggctgcattcggtctctgcagttgaatgggatgaccctggatttggaagaaagagcccaggtgactccagaagtgcagccaggttgtaggggacattgcagcagctatgggaagttatgccgcaatggagggaaatgcagagaaagacccattgggttcttttgtgactgcactttctctgcatacacagggccattctgctcaaatgagatttctgcatattttggatctggctcatccgtgatatacaattttcaagaaaattatcttttaagtaaaaactccagctcccacgctgcttcatttcatggtgatatgaagctgagcagagaaatgatcaaatttagtttccgaacaacacgaacaccaagcttgctgctttttgtgagctccttttacaaagaatacctttctgtgatcattgccaaaaatggaagtttgcagatcaggtacaagttaaataaatatcaagagcctgatgttgttaactttgattttaaaaacatggctgatggacaacttcaccacataatgattaacagagaagaaggagtggtctttatagagattgacgataatagaaggagacaagttcacctgtcatcaggcacagaattcagtgcagtcaaatctctggtattgggcaggattttagaacacagtgatgtggaccaggatactgcactggcaggtgcgcagggcttcacaggctgcctctctgcagtgcagctcagccacgtggcccctctgaaggcagctctgcaccccagccacccagaccctgtcactgttacaggacacgtgactgagtccagctgtatggcccagcctggcactgatgccacatcaagggaaaggacacactcgtttgcagatcattctggaacaatagatgacagagagccccttgctaatgcaatcaaaagtgactctgcagtaattggaggtctgatagctgttgtgatttttatcttgctttgcatcactgccatagctgttcgcatttatcagcagaaaaggttatataaaagaagtgaggcaaaaaggtcagagaatgtagacagtgctgaggctgttctgaaaagtgagcttaatatacaaaatgcagtcaatgaaaatcagaaagagtacttcttctgattggcagctatgatttaacataaaattatgatagtttgttttaatagccaggggttctcaatggaaaaacgaatgctcttacactgaatgtacaggcagtgggcttgcagcactgccatcttgccatgtacaggcttggggtggctccaggaagcctcgtccagtgatatatttctcatagcattcattctatggaacaagaaattagatattgctgttaattttcaactgttctggtatgatctaaaacaagtttaacctgcttaatggctacagtttttacatgtgaaaactgtagccttggtctcttaaccatgtaatacataagttttgttagaggtaaaaattaaatttggactataatgtccttgctttatttgagaacatttgctgtgtttgcttttgtctcctcgtggtgttattcatagacctggaaatgcttctcagatcctgtgtggccggtgtttgcatcttcagtggccacaagcataataaagcccctttgcctttctctgtattatattcaatacaatacatcaatagtcttgaaaaatgttttgctgtctttgctttgtttgtatt

SEQ ID NO: 25711 - protein, 1172 aa, Homo sapiens
MEVTAVATQGGYGSSNWVTSYLLMFSDSGWNWKQYRQEDSIWGFSGNANADSVVYYRLQPSIKARFLRFIPLEWNPKGRIGMRIEVFGCAYRSEVVDLDGKSSLLYRFDQKSLSPIKDIISLKFKTMQSDGILLHREGPNGDHITLQLRRARLFLLINSGEAKLPSTSTLVNLTLGSLLDDQHWHSVLIQRLGKQVNFTVDEHRHHFHARGEFNLMNLDYEGNVSFSCSQPQSMPVTFLSSRSYLALPDFSGEEEVSATFQFRTWNKAGLLLFSELQLISGGILLFLSDGKLKSNLYQPGKLPSDITAGVELNDGQWHSVSLSAKKNHLSVAVDGQMASAAPLLGPEQIYSGGTYYFGGCPDKSFGSKCKSPLGGFQGCMRLISISGKVVDLISVQQGSLGNFSDLQIDSCGISDRCLPNYCEHGGECSQSWSTFHCNCTNTGYRGATCHNSIYEQSCEAYKHRGNTSGFYYIDSDGSGPLEPFLLYCNMTETAWTIIQHNGSDLTRVRNTNPENPYAGFFEYVASMEQLQATINRAEHCEQEFTYYCKKSRLVNKQDGTPLSWWVGRTNETQTYWGGSSPDLQKCTCGLEGNCIDSQYYCNCDADRNEWTNDTGLLAYKEHLPVTKIVITDTGRLHSEAAYKLGPLLCQGDRSFWNSASFDTEASYLHFPTFHGELSADVSFFFKTTASSGVFLENLGIADFIRIELRSPTVVTFSFDVGNGPFEISVQSPTHFNDNQWHHVRVERNMKEASLQVDQLTPKTQPAPADGHVLLQLNSQLFVGGTATRQRGFLGCIRSLQLNGMTLDLEERAQVTPEVQPGCRGHCSSYGKLCRNGGKCRERPIGFFCDCTFSAYTGPFCSNEISAYFGSGSSVIYNFQENYLLSKNSSSHAASFHGDMKLSREMIKFSFRTTRTPSLLLFVSSFYKEYLSVIIAKNGSLQIRYKLNKYQEPDVVNFDFKNMADGQLHHIMINREEGVVFIEIDDNRRRQVHLSSGTEFSAVKSLVLGRILEHSDVDQDTALAGAQGFTGCLSAVQLSHVAPLKAALHPSHPDPVTVTGHVTESSCMAQPGTDATSRERTHSFADHSGTIDDREPLANAIKSDSAVIGGLIAVVIFILLCITAIAVRIYQQKRLYKRSEAKRSENVDSAEAVLKSELNIQNAVNENQKEYFF

SEQ ID NO: 25712 - DNA, 2339 bp, Homo sapiens
ctcattttctcttgcagccgccatgattctgaggccttcccagctatgtggaactatgactgtgatgatcctcttgtgtctgccttgcctcaggcatccttcagcagttcttccgagctctccagcagtcatggtcctggatttgcaaggctgaatagaagagatggagctggtggctggtctccacttgtgtctaacaaataccagtggttgcagattgaccttggagagagaatggaggtcaccgctgtggccactcaagggggatatggtagctccaactgggtgaccagctacctcctgatgttcagtgatagtggctggaactggaaacaatatcgccaagaggacagcatctggggtttttcaggaaatgcaaatgcagacagtgttgtgtactatagactccagccttctatcaaagccagatttctgcgcttcatccctttggaatggaaccccaagggcagaattggaatgcgaatcgaagtgttcggatgtgcatacagatcagaagtggttgatcttgatggaaaaagttcccttctctacagatttgatcaaaaatccctgagcccaataaaagacattatttctttgaaattcaaaaccatgcagagtgatgggattctactccacagggaagggccaaatggagatcacatcacactgcaattaagaagagcaagactctttttacttattaattcaggtgaagctaaactgccttccacttccaccctggtcaatctcaccctgggcagcctgctagatgatcagcattggcattcagtgctcatccagcgtttgggcaaacaagtcaacttcacagtggacgaacacaggcatcatttccatgcacggggagaattcaatctcatgaatcttgattatgagatcagctttggagggattccagcacctggaaaatcagtgtcattcccacatagaaattttcatggatgtttagaaaatctctattataatggagtggatatcattgatttggccaagcagcaaaaaccacagatcattgctatgggaaatgtgtcattttcttgttcacaaccacaatctatgcccgtgacttttctgagctccaggagttatttagcactgccagacttctctggagaggaggaggtttctgccacttttcaatttcgaacttggaataaggcagggcttctgctgttcagtgaacttcagctgatttcagggggtatcctcctctttctgagtgatggaaaacttaagtcgaatctctaccagccaggaaaattacccagtgacatcacagcaggtgtcgaattaaatgatgggcagtggcattctgtctctttatctgctaaaaagaatcacttgagtgtggcggtggacggccagatggcttctgctgctcctctgctggggcctgagcagatttattcgggtggcacctattattttggaggttgtcctgacaaaagctttggatccaaatgtaaaagtccacttggtggatttcagggatgtatgaggctcatttctatcagcggcaaagtggtagatctgatttcagttcagcaggggtcccttgggaacttcagtgaccttcagatagactcatgtggcatctcagacaggtgtttgcccaactattgtgaacacggtggggagtgttcccagtcctggagcacctttcattgtaactgtaccaacactggttacagaggagctacttgccataactctatctatgagcagtcatgtgaagcctataagcacagaggaaatacttcagggttttactatatagattcagatggaagtggtcccctggaaccatttcttctatattgcaatatgaccgaaactgcatggaccatcatacagcacaacggctctgacttaacaagagtcagaaatactaatccagagaacccatatgctgggtttttcgagtatgtggccagcatggagcaacttcaggccactattaaccgtgcagagcactgtgaacaggagtttacttattactgcaagaagtcacggctggtcaataagcaagatggaacccctctgagttggtgggtaggaagaaccaatgaaacgcaaacctactggggaggttcttcgcctgatcttcaaaaatgtacttgtggattagagggaaactgcattgattctcagtattactgcaattgtgatgctgaccggaatgaatggtgatttccatatgatttctttatgcaagaaaaagttcatttaaaaaaattaatcactcaaagtatgtatagctagccagatactgaacaagttagtgcaatgaagtaattaaataaaggtttgttttaatg

SEQ ID NO: 25713 - protein, 721 aa, Homo sapiens; identical to SEQ ID NO: 3419

SEQ ID NO: 25714 - DNA, 543 bp, Homo sapiens
ctgaggccttcccagctatgtggaactatgactgtgatgatcctcttgtgtctgccttgcctcaggcatccttcagcagttcttccgagctctccagcagtcatggtcctggatttgcaaggctgaatagaagagatggagctggtggctggtctccacttgtgtctaacaaataccagtggttgcagattgaccttggagagagaatggaggtcaccgctgtggccactcaagggggatatggtagctccaactgggtgaccagctacctcctgatgttcagtgatagtggctggaactggaaacaatatcgccaagaggacagcatctggggtttttcaggaaatgcaaatgcagacagtgttgtgtactatagactccagccttctatcaaagccagatttctgcgcttcatccctttggaatggaaccccaagggcagaattggaatgcgaatcgaagtgttcggatgtgcatacagtaacagtgatcctgtttgcagatctggagaagaaatgtatagaagtaaattactggtgggag

SEQ ID NO: 25715 - protein, 174 aa, Homo sapiens
MWNYDCDDPLVSALPQASFSSSSELSSSHGPGFARLNRRDGAGGWSPLVSNKYQWLQIDLGERMEVTAVATQGGYGSSNWVTSYLLMFSDSGWNWKQYRQEDSIWGFSGNANADSVVYYRLQPSIKARFLRFIPLEWNPKGRIGMRIEVFGCAYSNSDPVCRSGEEMYRSKLLV

SEQ ID NO: 25716 - DNA, 4657 bp, Homo sapiens
tatataattttatgatttttaaagtattttcatattctcctgtctttaagttttttcttttctcattgaacttactagacttctagtaagccctggaagtagtaggcatatttttagagatcttagatcctagtttttgatgttgttgttttacttgttggttgttttgtctattgattccacgaaagcctcagcactaactaaccctaacgtggcattgttcctcctggcagatgactgtgatgatcctcttgtgtctgccttgcctcaggcatccttcagcagttcttccgagctctccagcagtcatggtcctggatttgcaaggctgaatagaagagatggagctggtggctggtctccacttgtgtctaacaaataccagtggttgcagattgaccttggagagagaatggaggtcaccgctgtggccactcaagggggatatggtagctccaactgggtgaccagctacctcctgatgttcagtgatagtggctggaactggaaacaatatcgccaagaggacagcatctggggtttttcaggaaatgcaaatgcagacagtgttgtgtactatagactccagccttctatcaaagccagatttctgcgcttcatccctttggaatggaaccccaagggcagaattggaatgcgaatcgaagtgttcggatgtgcatacagatcagaagtggttgatcttgatggaaaaagttcccttctctacagatttgatcaaaaatccctgagcccaataaaagacattatttctttgaaattcaaaaccatgcagagtgatgggattctactccacagggaagggccaaatggagatcacatcacactgcaattaagaagagcaagactctttttacttattaattcaggtgaagctaaactgccttccacttccaccctggtcaatctcaccctgggcagcctgctagatgatcagcattggcattcagtgctcatccagcgtttgggcaaacaagtcaacttcacagtggacgaacacaggcatcatttccatgcacggggagaattcaatctcatgaatcttgattatgagatcagctttggagggattccagcacctggaaaatcagtgtcattcccacatagaaattttcatggatgtttagaaaatctctattataatggagtggatatcattgatttggccaagcagcaaaaaccacagatcattgctatgggaaatgtgtcattttcttgttcacaaccacaatctatgcccgtgacttttctgagctccaggagttatttagcactgccagacttctctggagaggaggaggtttctgccacttttcaatttcgaacttggaataaggcagggcttctgctgttcagtgaacttcagctgatttcagggggtatcctcctctttctgagtgatggaaaacttaagtcgaatctctaccagccaggaaaattacccagtgacatcacagcaggtgtcgaattaaatgatgggcagtggcattctgtctctttatctgctaaaaagaatcacttgagtgtggcggtggacggccagatggcttctgctgctcctctgctggggcctgagcagatttattcgggtggcacctattattttggaggttgtcctgacaaaagctttggatccaaatgtaaaagtccacttggtggatttcagggatgtatgaggctcatttctatcagcggcaaagtggtagatctgatttcagttcagcaggggtcccttgggaacttcagtgaccttcagatagactcatgtggcatctcagacaggtgtttgcccaactattgtgaacacggtggggagtgttcccagtcctggagcacctttcattgtaactgtaccaacactggttacagaggagctacttgccataactctatctatgagcagtcatgtgaagcctataagcacagaggaaatacttcagggttttactatatagattcagatggaagtggtcccctggaaccatttcttctatattgcaatatgaccgaaactgcatggaccatcatacagcacaacggctctgacttaacaagagtcagaaatactaatccagagaacccatatgctgggtttttcgagtatgtggccagcatggagcaacttcaggccactattaaccgtgcagagcactgtgaacaggagtttacttattactgcaagaagtcacggctggtcaataagcaagatggaacccctctgagttggtgggtaggaagaaccaatgaaacgcaaacctactggggaggttcttcgcctgatcttcaaaaatgtacttgtggattagagggaaactgcattgattctcagtattactgcaattgtgatgctgaccggaatgaatggaccaatgacactggattgcttgcttataaagaacatcttccagtaactaagatcgtgattacagacacaggccgactgcattcagaagcagcttataaactggggcctctgctctgccagggagacagatcattttggaattcagcttcctttgataccgaggcttcatatcttcattttcctaccttccacggagaacttagcgcggatgtatctttcttttttaagacaacagcttcatctggggtatttttagagaacttggggattgctgattttatacggatagagcttcgctctccgacagtagtgactttttcatttgatgtggggaatgggccttttgaaatctcagtgcagtcacccacccacttcaacgacaaccagtggcaccatgtgagggttgaaaggaacatgaaggaggcctcccttcaagtggatcagctgacaccaaagacacagcccgcccccgctgatgggcatgtcctgttacagctcaacagtcagctcttcgtgggtggaacggccaccagacagagaggctttctgggctgcattcggtctctgcagttgaatgggatgaccctggatttggaagaaagagcccaggtgactccagaagtgcagccaggttgtaggggacattgcagcagctatgggaagttatgccgcaatggagggaaatgcagagaaagacccattgggttcttttgtgactgcactttctctgcatacacagggccattctgctcaaatgagatttctgcatattttggatctggctcatccgtgatatacaattttcaagaaaattatcttttaagtaaaaactccagctcccacgctgcttcatttcatggtgatatgaagctgagcagagaaatgatcaaatttagtttccgaacaacacgaacaccaagcttgctgctttttgtgagctccttttacaaagaatacctttctgtgatcattgccaaaaatggaagtttgcagatcaggtacaagttaaataaatatcaagagcctgatgttgttaactttgattttaaaaacatggctgatggacaacttcaccacataatgattaacagagaagaaggagtggtctttatagagattgacgataatagaaggagacaagttcacctgtcatcaggcacagaattcagtgcagtcaaatctctggtattgggcaggattttagaacacagtgatgtggaccaggatactgcactggcaggtgcgcagggcttcacaggctgcctctctgcagtgcagctcagccacgtggcccctctgaaggcagctctgcaccccagccacccagaccctgtcactgttacaggacacgtgactgagtccagctgtatggcccagcctggcactgatgccacatcaagggaaaggacacactcgtttgcagatcattctggaacaatagatgacagagagccccttgctaatgcaatcaaaagtgactctgcagtaattggaggtctgatagctgttgtgatttttatcttgctttgcatcactgccatagctgttcgcatttatcagcagaaaaggttatataaaagaagtgaggcaaaaaggtcagagaatgtagacagtgctgaggctgttctgaaaagtgagcttaatatacaaaatgcagtcaatgaaaatcagaaagagtacttcttctgattggcagctatgatttaacataaaattatgatagtttgttttaatagccaggggttctcaatggaaaaacgaatgctcttacactgaatgtacaggcagtgggcttgcagcactgccatcttgccatgtacaggcttggggtggctccaggaagcctcgtccagtgatatatttctcatagcattcattctatggaacaagaaattagatattgctgttaattttcaactgttctggtatgatctaaaacaagtttaacctgcttaatggctacagtttttacatgtgaaaactgtagccttggtctcttaaccatgtaatacataagttttgttagaggtaaaaattaaatttggactataatgtccttgctttatttgagaacatttgctgtgtttgcttttgtctcctcgtggtgttattcatagacctggaaatgcttctcagatcctgtgtggccggtgtttgcatcttcagtggccacaagcataataaagcccctttgcctttctctgtattatattcaatacaatacatcaatagtcttgaaaaatgttttgctgtctttgctttgtttgtatt

SEQ ID NO: 25717 - protein, 1311 aa, Homo sapiens
MLLFYLLVVLSIDSTKASALTNPNVALFLLADDCDDPLVSALPQASFSSSSELSSSHGPGFARLNRRDGAGGWSPLVSNKYQWLQIDLGERMEVTAVATQGGYGSSNWVTSYLLMFSDSGWNWKQYRQEDSIWGFSGNANADSVVYYRLQPSIKARFLRFIPLEWNPKGRIGMRIEVFGCAYRSEVVDLDGKSSLLYRFDQKSLSPIKDIISLKFKTMQSDGILLHREGPNGDHITLQLRRARLFLLINSGEAKLPSTSTLVNLTLGSLLDDQHWHSVLIQRLGKQVNFTVDEHRHHFHARGEFNLMNLDYEISFGGIPAPGKSVSFPHRNFHGCLENLYYNGVDIIDLAKQQKPQIIAMGNVSFSCSQPQSMPVTFLSSRSYLALPDFSGEEEVSATFQFRTWNKAGLLLFSELQLISGGILLFLSDGKLKSNLYQPGKLPSDITAGVELNDGQWHSVSLSAKKNHLSVAVDGQMASAAPLLGPEQIYSGGTYYFGGCPDKSFGSKCKSPLGGFQGCMRLISISGKVVDLISVQQGSLGNFSDLQIDSCGISDRCLPNYCEHGGECSQSWSTFHCNCTNTGYRGATCHNSIYEQSCEAYKHRGNTSGFYYIDSDGSGPLEPFLLYCNMTETAWTIIQHNGSDLTRVRNTNPENPYAGFFEYVASMEQLQATINRAEHCEQEFTYYCKKSRLVNKQDGTPLSWWVGRTNETQTYWGGSSPDLQKCTCGLEGNCIDSQYYCNCDADRNEWTNDTGLLAYKEHLPVTKIVITDTGRLHSEAAYKLGPLLCQGDRSFWNSASFDTEASYLHFPTFHGELSADVSFFFKTTASSGVFLENLGIADFIRIELRSPTVVTFSFDVGNGPFEISVQSPTHFNDNQWHHVRVERNMKEASLQVDQLTPKTQPAPADGHVLLQLNSQLFVGGTATRQRGFLGCIRSLQLNGMTLDLEERAQVTPEVQPGCRGHCSSYGKLCRNGGKCRERPIGFFCDCTFSAYTGPFCSNEISAYFGSGSSVIYNFQENYLLSKNSSSHAASFHGDMKLSREMIKFSFRTTRTPSLLLFVSSFYKEYLSVIIAKNGSLQIRYKLNKYQEPDVVNFDFKNMADGQLHHIMINREEGVVFIEIDDNRRRQVHLSSGTEFSAVKSLVLGRILEHSDVDQDTALAGAQGFTGCLSAVQLSHVAPLKAALHPSHPDPVTVTGHVTESSCMAQPGTDATSRERTHSFADHSGTIDDREPLANAIKSDSAVIGGLIAVVIFILLCITAIAVRIYQQKRLYKRSEAKRSENVDSAEAVLKSELNIQNAVNENQKEYFF

SEQ ID NO: 25718 - DNA, 417 bp, Homo sapiens
caatatgccccatttcgctaacctccactgagccccaagctctgaagatcaaagtcaaagcacgaaatgaacgtgagagagctggaaagctaactacaaagcctctaaaagttacgtaacatgaagaaacacactcgattctgcctctcccattgaatagagcaataaaacatggacacaacacacaaagcagctatttgaggactctgagaaggaaatggcagcacacagattgggggagaagaccagaatttgaaatgctgctgaaccacagtagagtgatacaagatgtgaccgttgaagaatgctggatgaaaggcgactgccttcatggaacccgtatggactccgtgtatattttttgggtaatttcctatgactcagtaattatttcaaaataaaaatgtttaaaaagtg

SEQ ID NO: 25719 - protein, 47 aa, Homo sapiens
MLLNHSRVIQDVTVEECWMKGDCLHGTRMDSVYIFWVISYDSVIISK

SEQ ID NO: 25720 - DNA, 1237 bp, Homo sapiens
atggcccagagtcactactacttcccagggaaggagcaaggagcaatgcgaactgcccttcagaagggtggaaaatggatggcagaggagttgggtaaatgcaccaagagagtcaacaaggccgctcccaagcccagagctgctctgcgcaagcgcgaccgaccgagcagctccgaggagtccgcccggaaacaaacattccccagggcaatgtcacgacttggtcttcccgaggagccagtcagaaacagtttgctagatgatgctaaggcccgcttaagaaagtatgatattggaggcaaatattctcacttgccatataacaaatactccgtccttttgccattggtggctaaagaaggaaaactccatttgttgttcaccgtccggtcagagaagctaagaagggcccctggagaagtttgcttccctggaggtaagcgtgaccctacagacatggatgatgcagccacagctctccgggaagcccaggaggaagtgggtctccgtcctcaccaagtggaagttgtctgctgcctggtgccatgtcttattgatacagatacattgataactccatttgtgggtttaatagaccacaacttccaggcccagccgaatcctgctgaagttaaggatgtattcctggtgcctctggcctatttcctgcatccacaggtccatgaccagcattacgtcacacgtcttggtcaccgttttattaatcatatctttgagtacacaaaccctgaagacggtgtcacttaccagatcaagggaatgacggcaaaccttgcagtgttggtggcctttatcattttggaaaaaaaacccacctttgaggttcaatttaatcttaatgatgtattagcatcctctgaagagttattcctgaaggttcataaaaaagctacaagcaggttatgatttactagagcaagagacaaagaactattcacgaggattctgtgtgtgcttattcgtagaacaacaacaatgccagctgttggaatttgacaggtgtgaatattttttctgcagtatgtagttagaatccttgcctcttttccagttgccttctattgtctgaaaaagtaaaagccattcaaaaatgaaaactatgttcatagtgttgcatattttcacccacaatatgttaataatatttttcttacacatataataaagaatatctggcacatactaggcccttaataaagattttttgaatatataa

SEQ ID NO: 25721 - protein, 308 aa, Homo sapiens
MAQSHYYFPGKEQGAMRTALQKGGKWMAEELGKCTKRVNKAAPKPRAALRKRDRPSSSEESARKQTFPRAMSRLGLPEEPVRNSLLDDAKARLRKYDIGGKYSHLPYNKYSVLLPLVAKEGKLHLLFTVRSEKLRRAPGEVCFPGGKRDPTDMDDAATALREAQEEVGLRPHQVEVVCCLVPCLIDTDTLITPFVGLIDHNFQAQPNPAEVKDVFLVPLAYFLHPQVHDQHYVTRLGHRFINHIFEYTNPEDGVTYQIKGMTANLAVLVAFIILEKKPTFEVQFNLNDVLASSEELFLKVHKKATSRL

SEQ ID NO: 25722 - DNA, 1073 bp, Homo sapiens
ggccgctcccaagcccagagctgctctgcgcaagcgcgaccgaccgagcagctccgaggagtccgcccggaaacaaacattccccagggcaatgtcacgacttggtcttcccgaggagccagtcagaaacagtttgctagatgatgctaaggcccgcttaagaaagtatgatattggaggcaaatattctcacttgccatataacaaatactccgtccttttgccattggtggctaaagaaggaaaactccatttgttgttcaccgtccggtcagagaagccatgtgaagtgcttgctcctcctttaccttccgccatgattgtaagtttcctgaggtctccccagaagccaagcagacgccagcatcatgctccctgtacggcctgcgagactacagatacattgataactccatttgtgggtttaatagaccacaacttccaggcccagccgaatcctgctgaagttaaggatgtattcctggtgcctctggcctatttcctgcatccacaggtccatgaccagcattacgtcacacgtcttggtcaccgttttattaatcatatctttgagtacacaaaccctgaagacggtgtcacttaccagatcaagggaatgacggcaaaccttgcagtgttggtggcctttatcattttggaaaaaaaacccacctttgaggttcaatttaatcttaatgatgtattagcatcctctgaagagttattcctgaaggttcataaaaaagctacaagcaggttatgatttactagagcaagagacaaagaactattcacgaggattctgtgtgtgcttattcgtagaacaacaacaatgccagctgttggaatttgacaggtgtgaatattttttctgcagtatgtagttagaatccttgcctcttttccagttgccttctattgtctgaaaaagtaaaagccattcaaaaatgaaaactatgttcatagtgttgcatattttcacccacaatatgttaataatatttttcttacacatataataaagaatatctggcacatactaggcccttaataaagattttttgaatatataa

SEQ ID NO: 25723 - protein, 223 aa, Homo sapiens
MSRLGLPEEPVRNSLLDDAKARLRKYDIGGKYSHLPYNKYSVLLPLVAKEGKLHLLFTVRSEKPCEVLAPPLPSAMIVSFLRSPQKPSRRQHHAPCTACETTDTLITPFVGLIDHNFQAQPNPAEVKDVFLVPLAYFLHPQVHDQHYVTRLGHRFINHIFEYTNPEDGVTYQIKGMTANLAVLVAFIILEKKPTFEVQFNLNDVLASSEELFLKVHKKATSRL

SEQ ID NO: 25724 - DNA, 937 bp, Homo sapiens
gctctgcgcaagcgcgaccgaccgagcagctccgaggagtccgcccggaaacaaacattccccagggcaatgtcacgacttggtcttcccgaggagccagtcagaaacagtttgctagatgatgctaaggcccgcttaagaaagtatgatattggaggcaaatattctcacttgccatataacaaatactccgtccttttgccattggtggctaaagaaggaaaactccatttgttgttcaccgtccggtcagagaagacagatacattgataactccatttgtgggtttaatagaccacaacttccaggcccagccgaatcctgctgaagttaaggatgtattcctggtgcctctggcctatttcctgcatccacaggtccatgaccagcattacgtcacacgtcttggtcaccgttttattaatcatatctttgagtacacaaaccctgaagacggtgtcacttaccagatcaagggaatgacggcaaaccttgcagtgttggtggcctttatcattttggaaaaaaaacccacctttgaggttcaatttaatcttaatgatgtattagcatcctctgaagagttattcctgaaggttcataaaaaagctacaagcaggttatgatttactagagcaagagacaaagaactattcacgaggattctgtgtgtgcttattcgtagaacaacaacaatgccagctgttggaatttgacaggtgtgaatattttttctgcagtatgtagttagaatccttgcctcttttccagttgccttctattgtctgaaaaagtaaaagccattcaaaaatgaaaactatgttcatagtgttgcatattttcacccacaatatgttaataatatttttcttacacatataataaagaatatctggcacatactaggcccttaataaagattttttgaatatataa

SEQ ID NO: 25725 - protein, 185 aa, Homo sapiens
MSRLGLPEEPVRNSLLDDAKARLRKYDIGGKYSHLPYNKYSVLLPLVAKEGKLHLLFTVRSEKTDTLITPFVGLIDHNFQAQPNPAEVKDVFLVPLAYFLHPQVHDQHYVTRLGHRFINHIFEYTNPEDGVTYQIKGMTANLAVLVAFIILEKKPTFEVQFNLNDVLASSEELFLKVHKKATSRL

SEQ ID NO: 25726 - DNA, 1190 bp, Homo sapiens
gctctgcgcaagcgcgaccgaccgagcagctccgaggagtccgcccggaaacaaacattccccagggcaatgtcacgacttggtcttcccgaggagccagtcagaaacagtttgctagatgatgctaaggcccgcttaagaaagtatgatattggaggcaaatattctcacttgccatataacaaatactccgtccttttgccattggtggctaaagaaggaaaactccatttgttgttcaccgtccggtcagagaagctaagaagggcccctggagaagtttgcttccctggaggtaagcgtgaccctacagacatggatgatgcagccacagctctccgggaagcccaggaggaagtgggtctccgtcctcaccaagtggaagttgtctgctgcctggtgccatgtcttattgatagatgggggtctcgctatgttgatgaggctggtctcgagctcctggcctcaagtgatcctcccacctcagcctcccaaagtgctgggattacagacagatacattgataactccatttgtgggtttaatagaccacaacttccaggcccagccgaatcctgctgaagttaaggatgtattcctggtgcctctggcctatttcctgcatccacaggtccatgaccagcattacgtcacacgtcttggtcaccgttttattaatcatatctttgagtacacaaaccctgaagacggtgtcacttaccagatcaagggaatgacggcaaaccttgcagtgttggtggcctttatcattttggaaaaaaaacccacctttgaggttcaatttaatcttaatgatgtattagcatcctctgaagagttattcctgaaggttcataaaaaagctacaagcaggttatgatttactagagcaagagacaaagaactattcacgaggattctgtgtgtgcttattcgtagaacaacaacaatgccagctgttggaatttgacaggtgtgaatattttttctgcagtatgtagttagaatccttgcctcttttccagttgccttctattgtctgaaaaagtaaaagccattcaaaaatgaaaactatgttcatagtgttgcatattttcacccacaatatgttaataatatttttcttacacatataataaagaatatctggcacatactaggcccttaataaagattttttgaatatataa

SEQ ID NO: 25727 - protein, 186 aa, Homo sapiens
MMQPQLSGKPRRKWVSVLTKWKLSAAWCHVLLIDGGLAMLMRLVSSSWPQVILPPQPPKVLGLQTDTLITPFVGLIDHNFQAQPNPAEVKDVFLVPLAYFLHPQVHDQHYVTRLGHRFINHIFEYTNPEDGVTYQIKGMTANLAVLVAFIILEKKPTFEVQFNLNDVLASSEELFLKVHKKATSRL

SEQ ID NO: 25728 - DNA, 649 bp, Homo sapiens
tctgcgcaagcgcgaccgaccgagcagctccgaggagtccgcccggaaacaaacattccccagggcaatgtcacgacttggtcttcccgaggagccagtcagaaacagtttgctagatgatgctaaggcccgcttaagaaagtatgatattggaggcaaatattctcacttgccatataacaaatactccgtccttttgccattggtggctaaagaaggaaaactccatttgttgttcaccgtccggtcagagaagctaagaagggcccctggagaagtttgcttccctggaggtaagcgtgaccctacagacatggatgatgcagccacagctctccgggaagcccaggaggaagtgggtctccgtcctcaccaagtggaagttgtctgctgcctggtgccatgtcttattgatgtaagggtttcctgagacactcatgagcaccgtccccacccccaggtggatctactgttctcaggattccacattttccaaacataaccccaaagagtactgtacataaagtcaagagaacaggttctcctacagacattgcccctcatgagtcaagtggctatgggcaaccccttttgcctctccggacccctctttccccatccagaaataaaagggttgaactcccatcag

SEQ ID NO: 25729 - protein, 120 aa, Homo sapiens
MSRLGLPEEPVRNSLLDDAKARLRKYDIGGKYSHLPYNKYSVLLPLVAKEGKLHLLFTVRSEKLRRAPGEVCFPGGKRDPTDMDDAATALREAQEEVGLRPHQVEVVCCLVPCLIDVRVS

SEQ ID NO: 25730 - DNA, 876 bp, Homo sapiens
gcgcgaccgaccgagcagctccgaggagtccgcccggaaacaaacattccccagggcaatgtcacgacttggtcttcccgaggagccagtcagaaacagtttgctagatgatgctaaggcccgcttaagaaagtatgatattggaggcaaatattctcacttgccatataacaaatactccgtccttttgccattggtggctaaagaaggaaaatccatttgtgggtttaatagaccacaacttccaggcccagccgaatcctgctgaagttaaggatgtattcctggtgcctctggcctatttcctgcatccacaggtccatgaccagcattacgtcacacgtcttggtcaccgttttattaatcatatctttgagtacacaaaccctgaagacggtgtcacttaccagatcaagggaatgacggcaaaccttgcagtgttggtggcctttatcattttggaaaaaaaacccacctttgaggttcaatttaatcttaatgatgtattagcatcctctgaagagttattcctgaaggttcataaaaaagctacaagcaggttatgatttactagagcaagagacaaagaactattcacgaggattctgtgtgtgcttattcgtagaacaacaacaatgccagctgttggaatttgacaggtgtgaatattttttctgcagtatgtagttagaatccttgcctcttttccagttgccttctattgtctgaaaaagtaaaagccattcaaaaatgaaaactatgttcatagtgttgcatattttcacccacaatatgttaataatatttttcttacacatataataaagaatatctggcacatactaggcccttaataaagattttttgaatatataa

SEQ ID NO: 25731 - protein, 143 aa, Homo sapiens
MILEANILTCHITNTPSFCHWWLKKENPFVGLIDHNFQAQPNPAEVKDVFLVPLAYFLHPQVHDQHYVTRLGHRFINHIFEYTNPEDGVTYQIKGMTANLAVLVAFIILEKKPTFEVQFNLNDVLASSEELFLKVHKKATSRL

SEQ ID NO: 25732 - DNA, 587 bp, Homo sapiens
agctccgaggagtccgcccggaaacaaacattccccagggcaatgtcacgacttggtcttcccgaggagccagtcagaaacagtttgctagatgatgctaaggcccgcttaagaaagtatgatattggaggcaaatattctcacttgccatataacaaatactccgtccttttgccattggtggctaaagaaggaaaactccatttgttgttcaccgtccggtcagagaaggtaggtggacaaaaaatttcctgcccttaaacctcaggacatcagaagacctcacgagattttgtcacttgcacacactttgatgccaaaattctcaaaagggctttcaaaattgtgatgtcagaggcatacaaccacaagccacaggataacatggtgtttcttggagaaggtttaacaagaaaatgaaggaatttagctagcaagcagtttaaaacgctttcacactagggttacctaaccttggtgctattggcatttggggctgaataattctttggtgtggaggctgtcctgtataatgtggtgtgtttaccatcatccttggcctctacccaccagatgccagtagcaca

SEQ ID NO: 25733 - protein, 72 aa, Homo sapiens
MSRLGLPEEPVRNSLLDDAKARLRKYDIGGKYSHLPYNKYSVLLPLVAKEGKLHLLFTVRSEKVGGQKISCP

SEQ ID NO: 25734 - DNA, 752 bp, Homo sapiens
ccgaggagtccgcccggaaacaaacattccccagggcaatgtcacgacttggtcttcccgaggagccagtcagacagatacattgataactccatttgtgggtttaatagaccacaacttccaggcccagccgaatcctgctgaagttaaggatgtattcctggtgcctctggcctatttcctgcatccacaggtccatgaccagcattacgtcacacgtcttggtcaccgttttattaatcatatctttgagtacacaaaccctgaagacggtgtcacttaccagatcaagggaatgacggcaaaccttgcagtgttggtggcctttatcattttggaaaaaaaacccacctttgaggttcaatttaatcttaatgatgtattagcatcctctgaagagttattcctgaaggttcataaaaaagctacaagcaggttatgatttactagagcaagagacaaagaactattcacgaggattctgtgtgtgcttattcgtagaacaacaacaatgccagctgttggaatttgacaggtgtgaatattttttctgcagtatgtagttagaatccttgcctcttttccagttgccttctattgtctgaaaaagtaaaagccattcaaaaatgaaaactatgttcatagtgttgcatattttcacccacaatatgttaataatatttttcttacacatataataaagaatatctggcacatactaggcccttaataaagattttttgaatatataa

SEQ ID NO: 25735 - protein, 48 aa, Homo sapiens
MTANLAVLVAFIILEKKPTFEVQFNLNDVLASSEELFLKVHKKATSRL

SEQ ID NO: 25736 - DNA, 750 bp, Homo sapiens
tcatcgttaagctggggtcataatttgggaacaccacagaggtgaagtgctctcatcacacagtatcagagacagatacattgataactccatttgtgggtttaatagaccacaacttccaggcccagccgaatcctgctgaagttaaggatgtattcctggtgcctctggcctatttcctgcatccacaggtccatgaccagcattacgtcacacgtcttggtcaccgttttattaatcatatctttgagtacacaaaccctgaagacggtgtcacttaccagatcaagggaatgacggcaaaccttgcagtgttggtggcctttatcattttggaaaaaaaacccacctttgaggttcaatttaatcttaatgatgtattagcatcctctgaagagttattcctgaaggttcataaaaaagctacaagcaggttatgatttactagagcaagagacaaagaactattcacgaggattctgtgtgtgcttattcgtagaacaacaacaatgccagctgttggaatttgacaggtgtgaatattttttctgcagtatgtagttagaatccttgcctcttttccagttgccttctattgtctgaaaaagtaaaagccattcaaaaatgaaaactatgttcatagtgttgcatattttcacccacaatatgttaataatatttttcttacacatataataaagaatatctggcacatactaggcccttaataaagattttttgaatatataa

SEQ ID NO: 25737 - protein, 48 aa, Homo sapiens
MYSWCLWPISCIHRSMTSITSHVLVTVLLIISLSTQTLKTVSLTRSRE

SEQ ID NO: 25738 - DNA, 709 bp, Homo sapiens
agaatgtcctcatttgtatggtcaaggctgggttgcagagaagtccatgttgcagctcatggaaaaaaagaaccaaagggactcaagaacactggcttatgtcttagattggagatgacctggaaagtcaactttcacccataacccattggcctaaaacaatagaaggcaactggaaaagaggcaaggattctaactacatactgcagaaaaaatattcacacctgtcaaattccaacagctggcattgttgttgttctacgaataagcacacacagaatcctcgtgaatagttctttgtctcttgctctagtaaatcataacctgcttgtagcttttttatgaaccttcaggaataactcttcagaggatgctaatacatcattaagattaaattgaacctcaaaggtgggttttttttccaaaatgataaaggccaccaacactgcaaggtttgccgtcattcccttgatctggtaagtgacaccgtcttcagggtttgtgtactcaaagatatgattaataaaacggtgaccaagacgtgtgacgtaatgctggtcatggacctgtggatgcaggaaataggccagaggcaccaggaatacatccttaacttcagcaggattcggctgggcctggaagttgtggtctattaaacccacaaatggagttatcaatgtatctgtctaaaagcagaaaacaaaacaga

SEQ ID NO: 25739 - protein, 46 aa, Homo sapiens
MSSFVWSRLGCREVHVAAHGKKEPKGLKNTGLCLRLEMTWKVNFHP

SEQ ID NO: 25740 - DNA, 3774 bp, Homo sapiens
cccacattcaacaggaggaacccgcgggagaggagccccactcccccagcgccgcagccaccgcagccaccgcagcccgtgcgccccgcgccctcgagcgccatggccaaggaaggcgtggagaaggcggaggagacggagcaaatgatcgagaaggaggcaggcaaggagccggcggagggcggcggcggcgacggctcgcaccgcctcggggacgcccaggagatgcgcgcggtggtgctggctggcttcggggggctcaacaagctgcggctcttcaggaaggccatgcccgagcctcaggacggcgagctcaagatccgcgtcaaagcctgtggattaaacttcattgacttgatggtgcgacaagggaatattgacaaccctcccaagactcccctggtgccaggatttgagtgttctgggattgttgaagctctgggggacagcgtgaaaggatatgagattggagaccgtgtcatggcatttgtcaattacaatgcctgggcagaggtggtctgcacaccagtggagtttgtctacaagatcccggatgacatgagcttctccgaggctgctgcattccccatgaacttcgtcacagcctatgtgatgctgtttgaagttgccaacctccgggaagggatgtctgtgctcgtgcactcagctggtgggggcgtgggtcaagctgtggctcagctgtgttccactgtccccaacgtgactgtctttggaacagcctctactttcaagcatgaagcaatcaaagactctgtgacccacctctttgacagaaatgcagactacgtgcaagaagttaaaagaatctctgctgaaggtgtggacatcgttttggattgcctctgtggggacaacactggaaaaggtctcagtcttctcaaacccctgggaacctacattttatatggctcatccaacatggtaactggagagaccaagagcttcttcagctttgcaaaatcatggtggcaggtggagaaggtgaaccccatcaagctgtatgaggagaacaaagtcatcgcggggttttcccttttaaatctgctcttcaaacaaggccgggcgggcctcattcggggagtggtggaaaaactcatagggctctacaaccagaagaagatcaagcctgtggtggactccttgtgggctctggaggaggtgaaggaggccatgcagcggattcacgaccgagggaacattggcaagttaattctggatgtagaaaagaccccaactccactgatggccaatgacagcacagagaccagtgaagcaggggaagaggaggaggaccacgagggagacagcgagaacaaggagcggatgccctttatccagtaactgaggacccaggtgggagaatgtgaaggatggtttggaagatgaggacccggctgagaaaactcttctgtgccccagtgaacaaatgctgtagtccagtgcgtgtcgtgtttgtctgcagtcagctgagctaaaaagctgttgatcactgttgttttttgaagtgccaatcccatgccatgcagtattatgtccctctcctatctgtgtattacacattcccctctcccctgtatcaaaaccatccatctgtgggttcttcttgacagttctagaacagccttgcaaattaatacaagtcccaggcccaatgcctaagagaccagacgtgggcaaagacaagtttggatggaaaggtgttatcacagagccctgtccagctcctagaattcctcaggccagtgacacttttttgctgctggccacccatgcctctgatgagaacacttgccaatttggccagcagaaagagagtaggccggatgttttcatgagcccacaaatttagaaactctcctagtagtactttttctctctccatttaagagacaactacggtcaaaagtttgagccattctcttctaccccttcagtgtctgaccctttcactggctcttatctgtaaacacagggaggcaggtatggatttttcacagtagacaatgggtcaacagcatgagtttgaggacctgctgtgaagatttctcctccaaaatacatctcatgggcaggattcttcctgctccatatctgtttcaattttaagaaagcaccacatacaagacacattcagaagtcattcctgagcattgctggtgtttgcacacttgccacctgcattaccaattctgtaaatttcaattcctggtggaaagtgaccactttgaccatggatttcccaaagaagagttcctttgcagaccataggtggaaaagtcaatgagcatctccttccttgccaaagcatgtcccaacatgtaacaaactctagggatacaaaaggtttatattcagcatctgatgtcagatgtacagttcctcccctcccatatataaaccccggtgtagaatctgcagcgccctgctcttcggaaaccaaggaacaagccacctgctcacacaccttgttcaacttttcagctcctaaggaaccccacccccatgcaatttgactgtgcttgagaggtgaatacagttaccttcgagaaacagagggagctcctcaccccgtccttccagtccttttggctaaaatgcttaactatcactcacaaacaaatgtggagataccaggagctcatttgattcataccccaactttgtgttctgaaaaacatcagagggattttacattgcccagtttctccaccaacaagccttagggtggacccaaccctttccgcaagtggtaggaacgaatgcatcttagcaattacctgatttccaaagtccttttgtagcaaatgtcacctcattcgtggtctttttacctatcctaagcttatgatgatgagttatgtatgccaaatacttatctgaagagtttctcctcattgtgaatgtgtatgtaaaatatgaagacaagaaagggtgctttcatctgaggaaccaaggggtgagagtatcccaaaggaggacaccagcatcatcttttcttcgtactccaggacccaccaatattccagttctgggtcatttagagagataatggggcgtttattcccctattacctttgctaagtgctatattattggctgtttctcccgtaaccatgctgaaaagggggtcttagggagaactgtcatccaagtggcattcctagtaagttgggtagaaatgacattttccagagctgaaggagtgaagagcccttggccatactagggctctccttcccccggggagtgggaactcagccacattcagaattcacatcgcctttgttatgtccagaggagaggcataaaaaggcactctcccccaccacccctaccaaatctgggtttggtttggttttatttaactagcaaagttaatccagtaatcgcaaattactccagatggttaaagaaaaccctttcagaatacagaacgagaaaactagagtttgaccaataagaccaatttctgccatgaagaaccgggggacgcaagttaattgtttaacgtactctcattttaagcaccttctttcctgtctcttgattgttttttctgaaggaagtgtaaagaatgtctcagtctgccttaaaggaactgtgaaggcttctctgtaatttaagcttgatagaagtgaactgaaacattgtctaatgtctttgtggctttagagcttttgttatattgtgcctataaagcaaattatgtttacataaaaatataaataaagtattcagcatagcaaaacctca

SEQ ID NO: 25741 - protein, 419 aa, Homo sapiens; identical to SEQ ID NO: 3421

SEQ ID NO: 25742 - DNA, 494 bp, Homo sapiens
gtattggaaatcatcttattacacaatccagcatggatttcagaaggcaaatattcaaattacataaacatgcttgttatacactttttcactcctcttcatcttaagggttatggtaactttagcttcaaaccttaagcaagctacatggatttaaaagttaactattaaatcaaatggccttgtatgcaccaataacatgtcatttttttgtttgtttgaggcagagtcttgctgtgttgcctggactagagtgcagtagtgcaatcggggctcactgcagtctcaactttctgggctcaaacaatcctcccacctctacgaaaaatacaaaaaattaaccgggcatggcagcatgtgcctgtagtcccagctacttgggaggctgaggcaggagaatcgctagaacacaggaggtagaggttgcagtgagccgagatcgcaccactgcacattgcactccagcctgagtgacagagtgagactccatctct

SEQ ID NO: 25743 - protein, 54 aa, Homo sapiens [sequence omitted]

SEQ ID NO: 25744 - DNA, 479 bp, Homo sapiens
agcattccttgacttgcagacatcttcccagtctcccttccatcttcacatgggcttctcagctgtgtggtccctgtatgtcctgtctctttattaggccaccctcagtgaatttagaattcactctaacaaagtatgatctcacgttgatccttaacgcatgacatctgcaaagatctatttccacgtgacagtgagtggcctccctgagagcaggactgtgccatcctcatgctgtgtccccagtgactagctcagtcctccgcagacaggaagctccaagcaaacgtctagtaaataagtgaatgaatgagtgatcagaatgcactcttctttgttggtgccatcccttaagcccttctaagtgtgacttgttttgactcaatggcaagtccattgacttaaataccttgaccagttctctcatcctaaagtgtctgggagtgtacaaaagcaaaaagagaacaccaagttgctta

SEQ ID NO: 25745 - protein, 30 aa, Homo sapiens
MTSAKIYFHVTVSGLPESRTVPSSCCVPSD

SEQ ID NO: 25746 - DNA, 442 bp, Homo sapiens
cggtttagattagccgtggcctaggccgtttgacggggtgacacgagcctgcagggccgagtccaaggcccggagataggaccaaccgtcaggaatgcgaggaatgtttttcttcggactctatcgaggcacacagacagaccatggggattctgtctacagtgacagccttaacatttgccagagccctggacggctgcagaaatggcattgcccaccctgcaagtgagaagcacagactcgagaaatgtagggaactcgagagcagccactcggccccaggatcaacccagcaccgaagaaaaacaaccagaagaaattattcttcagcctgaaatgaagccgggatcaaatggttgctgatcagagcccatatttaaattggaaaagtcaaattgagcattattaaataaagcttgtttaatatgtctcaaacagaaaa

SEQ ID NO: 25747 - protein, 63 aa, Homo sapiens
MGILSTVTALTFARALDGCRNGIAHPASEKHRLEKCRELESSHSAPGSTQHRRKTTRRNYSSA

SEQ ID NO: 25748 - DNA, 564 bp, Homo sapiens
tcaaatccctgcagggggagaccagcagccccgacttcagccgccatgcctcctgcctgagaagctagctgcgaaggttccagaaggagactgccctccgggaacagaaacagcgcatgactgcgacctgtctgcaaaaatcttgatcacttgtaaatccttctccacctgataagttatcacattggctcatgatgttttttttcattctcaccctatggcgtggatgctgttactaccccattttacaaaggagtaaagtgaggcccagagagaacagttaaatcacttccccagcttcactcaactcatctacggtgagtcgacggtacacatgcccttccacaacacaaaggtctccactttgccacgtgtcactctgatggttccaggtgcagattttgcgtctgcttcttgacttctaatggctgcaccattttgcattggatggttataccatcatttatttgactcatctcctgtgcacaagcatctagtttatctgcaaacttttgctaccaaaaacaatgctgcaatgaataaataagctgatgcctgcttcta

SEQ ID NO: 25749 - protein, 30 aa, Homo sapiens
MMFFFILTLWRGCCYYPILQRSKVRPRENS

SEQ ID NO: 25750 - DNA, 4083 bp, Homo sapiens
atttcctctctccttggggacaccgaaaagcagaccacccgggcatactaaggtcaagatgtcgttgatcggtttctttgttttattgtattacttgttttatttacctatttactttcttggtaaaaccagcctgccggcttgctcaggacatgaactatgacgtccctggagatggtctcttgggagaggagccccccaggccagcgaatcccgctcacctggggattaacgagcaggcccggccatttcccagggccaccggtgctccctgatctcagtgtctccgtctgtaaaatgggtataaccagagccagcctgtgtggccctggggaaagcggcactgaggacagaccaggtgtccagcagggtcctgccccgactcccacgcccccctcgccggccccctcgccgcggtcttgcaccctccactccccgtgcctgcaaagcctctgccccgtccctacaccaggctaatcctttgcacctcagctcagaggccccgtctccaaagccttccctgaaacttcctccttgagacacccaccatccccaccaagcctgccacacccaggcctgctatcgcccgtgcggtgtcgtccttctgataagctgtggaggggtaagggtcgccctggtctcttgttcatagccttaaacctagagccactcaagtgccgggcacatagcaggtgctcaataaatactccttgctgattgaacggcaaccagctgcaagagtgaatgcatggatgccgctcgtgggcctgggtttggagatcttagaaacaaagcttccttttgccacactcatgccttcttctatcacactcatgccttcttctaccacaatgtcacacccttacatcttgtatccgtagggaaatgtggccaggggcgttttaccaagttggtctgggatgacgtgagttaaccctcacactccacagtcagagagatgggtaacccaggtgacccagcgctaagtgacaaatatgctctcggatagaacagcccagaaagggcaagagggagagttggaacactcagataattacccttcagcgacgcagtgcacttaagtggtgaaaggagattcactggttggaaaaacactccagggcgaagggccagcgtgtgcaaaagcaccgaagcatgaccgagcgcgggcattcccgccagccaccagtgggccacgcatcccaacatgtgagtgccgcaaggatacaagtgcctaatgtgaacctccaagtggacgatcattcagtactgactttgggcctggccccctttcctcatgcaagccttccaggcaggaactaagagtgagccatcctctacagaagagaaaagcaagacacagcaagctgagaaacttaccagggtcacccagttggttggagtcagagatgtgttacgggcagcagctcctctgcccgcttacgtctgggctttgggggctggcccagagatagtcataatgcagccctttattcagcacttgctatgggccaagtccttcattcacaagctcaagtcttcccaacccagaaagaaagatggttagttccatttcatgtaggaggaaactgtcgaggctcagaaaatttaaggaatttaccggtcatcagtaaacgagagtaaaggcctgtgtgaacccaaatctgccctcctctgaaactctcgctgcagacatcgcaccccactgtttttcaatttcatcttcttatttattcactcaaccaatatttatttaccaaagcactatgaggcccagttaagaatgtgtggtcctcgatctgacagcctggattcaaatccctgttgccccacaactctccacactagctgtgtggccttgcaaatttcactcaacctctcagggactcagtttccttgattgtcaaatgggagtaatgacatttcctacctcattgacttgttgggaggtagcattgagttatcccatgccgcacccgctcccttgtaaactctggataattaccgagctttcttataagtgcagctcatggatcactcaaggcactgggaatatagcaatcacaacaaagattctagtcatgggagatggtcacctaacaaattaaaaactaaggcatttgttaaaggactgaatgaccaagattagcgttccaaggaaaagtatggcgctctggagtggtcaggagagcctctgtcactgagtagcagtgtggccctgtccaagctcctggcctggctaggcctcatgcccatgtctgcatggcaagtgcctggaaccggatggccatggcagcttttgctctgtgaaagcccaactgctcccctggactgctcccatgttttctgtctccaccgagcaagcctctttcaaagccctagagagagacctgggtccccagcaccctctcctggaggagatctggactgaaatgtttgggacgcctcccattcaaatgctcaagtctccaaaccgctggggaggcgttgcacaagagacaggcaggggtttcagtttctggcacttgtttgctcaaaggatctcagccttcttcttcctgacatgcagcttaaacatgtgagctgacccttaaatgaaacccccacagttttccatctccttccaagagaatttcacggggtgcagggagaatggggaggacgtgaaacgtggtgtatcctgcaggattcactcccccactgacgggactaaaggtttctgaagcctgaaatattttcaactaaatgagaaaatctttgctgttgaatggcctattagagctgtcacaaatgtgatttctggaaataaacaagattataagaaggctggctggcgcagaaacagcccgatggatacaccctgggagaggcgacggggtggcccctgtgacttcgggctgcgacgcggtgtcgtccccacccccacccccctcactctagaagtcacagcgccatctactggacagcggacaaacctccccacccagggacgggcttctctgtttaaggccatccaaactagaaagcttaaaaatgcgtttaagaggtagaataccatagtttacggaacagaagaacaagaacaaaactctctaatcaaaatcacagggacctggaaatattggtctatagcaatttggtttttgggggttttgttgttgttgttgttgtttcgggggcggggagggagttggttttggttttttggttggtttttgtttttgtttttgttttgagacggtctcactctgtcattcaggctggagtgcagtagtgcgatctccactcaatgcagtctggaccttctgggctcaagcgaccctcctgcctcagcctcccgagcagctgggaacacaggcgcacaccaccacgcccggctaatttttaaattttttgtagagacagggcattgctatgtttcccaggctggtctcaaactcctgagctcaagcgatcctcccgcctcggcctctcaaagtgctgggattacaggcaggagccaccacgcctggcctatagcaattttgaaaactggctcaagcccattcctctatcccctgacataaccccccaaagagaagactttttaaaaaggtaagaaaactgtttttttttcatttttaagagttttatattagctataaatttctggagtaaagatttggttccacctagtcagctcccacatttttctccccatcatccttggggctaaggtgtaggagagctgggtagagacacacacactcacacacacgcgcacacacacgcacacacagacacacacgtgcgcacacacacgcacccagacacacgcgcgcgcacatacacgcacacacatgcacccagacacgcacacacgcgcacacagacacgcacacgcatgcacacacacaaaaacactccttgtgatggagctctttaatcctcctggaccctgaacgctttggtgaacacaagcgtacaaaactaggataacccaaatattattctgaattctttttttcagtcgtttaagcaaaacaactttcatttttaaagtttatgtgatttttccttataaatatcatcacattccacgat

SEQ ID NO: 25751 - protein, 42 aa, Homo sapiens
MKPPQFSISFQENFTGCRENGEDVKRGVSCRIHSPTDGTKGF

SEQ ID NO: 25752 - DNA, 460 bp, Homo sapiens
ctgcagccagccggcatctccacgcaggccttagcgtgtgaaggtgaggggaccttcacctctaccaaggcatccaactcctgggctttttatgcagctctgaaagttgggactgttcctttttttttttaagttgctttaaaatgtcaccactacaggggatttttagagtgacaaaactatttgtatgatactctagggctggatatttttctttacattttctttacatttgtccaaacccatagaatattcaacaccaagagtcaaccctgatgcagactgtggactttagttaataataatgtatccattttggcttatgggttgtaacaaacataacacgccaatgcaagacgagaataataggggcatggggaggattagaggggaactctatttctgctcagtttttctgtaaatgtgaaactactctaaaaaataaagtctagtaatttaa

SEQ ID NO: 25753 - protein, 38 aa, Homo sapiens
MYPFWLMGCNKHNTPMQDENNRGMGRIRGELYFCSVFL

SEQ ID NO: 25754 - DNA, 1650 bp, Homo sapiens
ttgtccccatgtccgtgtccctgggggagggcagctatttccgagtgtctcttcagggacagcagacccactggatgagggcccgaaaatggtttcagcacctgtgtcagagcagaacgcaaccggcgccagggtcccggggagagaggcagcaggaagtgaggctgaggggctgtctgtgtcgcgcagggagccgggcagggctgttttccatggctgccggccctctccttagatgagtacacagctgcttttcacagcgctcagcctgccctcctggagggatcatttgaggagaaaatccatctcaacatccacatgttgtgtatcacttgaacgcggggcagggcaaggaagaccaaagctcccccactttcaggaggcgactcctccttctttgctggacaggggcgaacaggaaccacgttggctctggaagttcacagggcagtggatcagggctcaggaggaagaagatggtgcagccgcaggcacttctgagtgacgagaggcaggcatgcgttgaaggtgatctgcagggcactcacacacagggcttggcaaggtcccgcagtcgtggggaacgtggaagttctgacccaggccttctgtcaccggtcccaagcccacgtcgtttctgcgacagcgtgactgaccagtaagtcatctgcttaccaatgtcccccgagccaaggacagcgatggaaagccgtgcggtatcactccggaagaggaaagtcggtggccttttaagcaggatgaagtcaatcctacaggccacatggtttgccacgtggcacatgcctccccctgtgacctcattcaatccctgcagagcccctggcggccatcgtcgtacggttggcaccagcatggactccagagcccaccacctggcttatggccccagctctgccctcattagcggtggaacctggccagcaacttaagctctccatgcctccgtttcttcatccataaaataagaatagcactggtacccctgcgcagggctgctgcgagaatcaaggtgcctcgctggaacttaacgtgaggggagccagtgtggtctgtggaggctcctttgagcaggtgacatctgagctgccctctgaagataacaaggatccagacatgacggggagaaggagacgctgcaggcagaggacaaagttaaggacgcagtactcctcccctctgaagggcacagcaacaaggcgccaccgtggaagcagggtccaggccctcacctgacatgaagcctgccaggaccttgatcttggacatcccagcctccagagcaggaagttggatttgtctcctactccatagaagaaatagaggccatcagataagaatttcctcaacttggccaggtgtggtggctcactcctgtaatcccagcacttcgagaggccgaggcggatggatcacgaggtcaggagatcgagaccatcctggctaacctggtgaaactccgtctctactaaaaatacaaaaaattagctgggcgtggtggcagacgcctgtactcccaactacttgggaggctgaggcaggagaatggcatgaacccaggaggtggagcttgcagtgagctgagattgcaccactgccctccagcctgggtgacagagcaagacaccatct

SEQ ID NO: 25755 - protein, 76 aa, Homo sapiens
MSVSLGEGSYFRVSLQGQQTHWMRARKWFQHLCQSRTQPAPGSRGERQQEVRLRGCLCRAGSRAGLFSMAAGPLLR

SEQ ID NO: 25756 - DNA, 1444 bp, Homo sapiens
cgcgatgggaaggagcccacccacgactgtggatgtttaaccaaagccttcctgtaggaaagcaggaaagactgggtggcctgagggcaagacgacagtactgctgctcagaaaaggtgaccaaagtggccaacattgcaacctggacctgggactcaaacccaaatctgtctgattcctaaactgcaatcttcccaccagattctgcggcctcccactacctgaaaaatggtttttctctgtctcctcacctaggaatggaaatatcactgaaactaaagaaaacgaccctccagtccagtgggtgcaaactggggacttcagctggattcacccctcaggtggcttctgtttggccaccaccttgtttggtaaagctgacagcagccaagtcatagtccctgaaacatgcagcagatgaagacagcggccctcgttggacaaaaaccacatctgcttccctttaaaagaaatgacaaacagaatagctgctcaccattcacagcaacagagtctagaacttaagatgctccaagcatcttaacaccttctcaactcaacgcaccaacggaagggtcaccatgtataaagaaaaatgtgttcttccatttaatgttttccctttcagtaggaccccatcacccttttttaagtaacagctttattaagatataatctacaccatgctaggcatgtttgtggctattatctcatttaatccatatcatcattccattgcactaatttgaaaaccaaagctcagagaagtaaacgttctcagagccacacagttgctccatggtagaggcaggatttgaacctggatcgccccaagtccaatcccaaagatacttccactactccatgtttctcgtgcagtagatggcagctgccctttatcattttattatggtatgttttagagacagcaagggcctgtacttttgtttggcttacagaaactcaaatgcatgcaatgtatcacttcacccatgcatatccctgggttgaaaatatgcccacatctatggaacacctaagaacaagcattacacaaataaaccgtttccctaaatttccctgtgattcttggagctactgagacaacactccaatatttctgtaatttttaagcccacaaaggaaagttagtgtataacaaaggccttggtggctttcagctgcatcctaagcctcctctcgttaaatttcttaatagactggcctcatatcagagcccaggaggagatggtccacctaggaataagggttctaatagttaactctgaaactggaagcaagccagtgacaaggagttgaaactaaagaacacaggagacctccgtaaacgtccttccagcatagacctgaggttctgagcaactgtgggtaacgcacaaaccattattaaaaccaataaaataccattattttacaaaaaatt

SEQ ID NO: 25757 - protein, 49 aa, Homo sapiens
MFNQSLPVGKQERLGGLRARRQYCCSEKVTKVANIATWTWDSNPNLSDS

SEQ ID NO: 25758 - DNA, 374 bp, Homo sapiens
acagccaccctctgagctctccgcagcaggaggaaaacgtcagagagcccttgaggccctgtttcctcaccagaaggaaggtggctgacacagccatgatcacccccaatctggaggctcagactagagtggccccaaatccttggggacaaggccagaaagtggatgtggccacacagacagctcacagaagttgaaatctaccaaggacatgcatggcacacgggcgtgtacacacactcgtctgactcacacctcatcctccctttcgcttcagctggggaaggaggtggaaaggtgacgttcaagactggagggtaatttgcccaagaatgcagcgagcaaacatcttaaaacaccacggagagcctctg

SEQ ID NO: 25759 - protein, 51 aa, Homo sapiens
MWPHRQLTEVEIYQGHAWHTGVYTHSSDSHLILPFASAGEGGGKVTFKTGG

SEQ ID NO: 25760 - DNA, 1718 bp, Homo sapiens
tttctcttggaccctttgctctggggaaaccagctgctacatcaccatcagccttgtgaccatgccacatggtaaggagctgaaatctcagcagccacatgagtgagctcggcagcggatcctttaggccccgtcatgcaatcctggattgcagccctggacatccacttaactagcaagactgagccagaaccacccagatgagctgctcctggattcccaactctcaaaaactgtgagagatgttcaacggtggttgtttgaaactgctgagtctcagtataatttgttacacagcactagctaactcatacacgtcacgtttctgcagcagaataccttggacctggggagagctggagataattactcagtaccacccagtacatgggaaagtgattactgacaggctcagaaatgttaagaagatgcttaaaagaaatgggctcatgagccttctttgctgaagtattaattactagatctgaatgttttgcttttctgtgatggaaaacgtgaagaaaatagggcttttttttttcttttgaagagatgggatttccctctgtcgcttaggcttaactgcagtgattcagtcatagctcacggcagcctcaaactcctggactcaagcaaatgactgatattttttgagcaccagcagtaacgatagttactattcactgttttctccctgccaggtgttccacagacatcctacatgcatgacattgattcactcttacatttgacaggaatcacttaattctgaaagtcttctgagaagacatagcaagaagtggagtcaagcacacatcatgatggcagagaaaggaaggtggggggctactccatagatttctgagactgaccttctttcctacgaagctttactctctacactcatagtcagtgaatgacaagtggtatatctggttcattcctgggcatgaatgaaaagagaacaaacaaatccattttctgggtaagaacagtaacagctcccatttgaatgttgtcttaacagtttataaaacatcttcaagtacaagctctcactgaatcttcactgcaaacctgtgaagtgggtaaggatatttctgtcatcgaacagataaggaaatagaggctcagagaagtcaagaaactggcccagggttacacagctcagaagtggagagcgaagtcttgaattggggttttgtggtgcttcatctatgagctttcaatttcagccatcatgggttgtagcttctctgctccgtgtttgatctttgctccacgtgggtatctctggctgttgccatgggtctgaagaacatgcgcatggtcacgtaggacaaccacagtcttcaacagaaagcgccatctctctgcttcatgcccgtggttgattttatacctgtagcaaggacactttcctattctagggctgctgagccatggcaaccttgaaaggttataataccacagtacgaacgatttccaaatgtcccttgtcaacgcccagcacagccctaatacctggagaagtgaagaaggttccagaggaggaaagaaagcctttgaatcattttgtcaggcacatgtcactccacttgaattatttttcatgaaggtgaatgcttttcaatcgtccaaggcaggggtccatcactttcaagcgcacttgatgtgttgctgttttaaaaattaaatacgcagagtttgcagaatgg

SEQ ID NO: 25761 - protein, 74 aa, Homo sapiens
MFNGGCLKLLSLSIICYTALANSYTSRFCSRIPWTWGELEIITQYHPVHGKVITDRLRNVKKMLKRNGLMSLLC

SEQ ID NO: 25762 - DNA, 662 bp, Homo sapiens
ccagctgctacatcaccatcagccttgtgaccatgccacatggtgttccacagacatcctacatgcatgacattgattcactcttacatttgacaggattgcaggagctcctcagacaagatctgtggcaacagtaacaataaaagcatcccatgcggaccaaactcctgctgcagaacctggccgtccactccacccacgtgccttagcaaagtgcccttggtgaggctgagggactaggcagccaggactcctgaggggaccttatcagagagggaagccacctcggactgagtggtgagtgctgctctaggactgccctaaaactggatttgaacaaaagaccacatgccgtatgactccattggaatgaaacatccagaacaggcaaagccacagaggcaggaagcagcatccccccaggtcagcaacacctctggagctgaggctggcagaatgtggcgggggctcctctgagagcatggcagcttctaatggacccacgtggttagtttgagagaaacagtcaccagaagacagccatatgtgtccgggctgggagacctaacatttcagagccaccaaccctgcatcactggctgacaggtggctggacatcgtgtcaccactgtcttctgggaataaacatttctcagctttcc

SEQ ID NO: 25763 - protein, 42 aa, Homo sapiens
MPYDSIGMKHPEQAKPQRQEAASPQVSNTSGAEAGRMWRGLL

SEQ ID NO: 25764 - DNA, 964 bp, Homo sapiens
aaaacaggcgcaaaggatgaaaatacatcgagactgaggaaaacacagttggaaggagctaaacacaagcagaaaataagagcagagcatttaaatgtaattagataaaaacccaagaggcaaaggtatagatagtgagctagagaaacaatgcagaattttgtcagagtctgtacttctagaagtcatgtttgctggctgggcatggtggctcacgcctgtaatcccagcactttgggaggccgaggtaggaggagtggttgagctcaggaatcgtgccactgcactccagcctgggtgacagagcaagactccgtcttaaaaaataaataaataaataaatagacagatagatagatagatagtgtctatgaaggctgcccaagaacttgaccattagggaaacatggctgtttctgtggattaactagtcaagcccatacaggaagagtgaggtcagctcccaggtggggcaggatgtagtggacgcttggaagaatttgggaccacacacgaattgctaccatggtgagccagtgaaacttgaggaaggcaggactggattgtgattacaactgagtaagtaggcagagaattggagtgtgggcaacataaagatgatgtgaatcaaagaagaatggtcaattaagaccctaaaaaaaggacgttcaaaaatgcagaggttaaaaaaaaaaaaagcagagattgccagatgctccatttggtaggagtctgcttagcacagtggtgcttcgccagactttaccgtggcccagggaaatggtcctcaagacggactccatgtctaccaagctacttgctaatgatttctttgtcctccaggacagggaaggggcttttctggatgggatacattgatattttatggccttgaaacactatcctgattataaattaataaattgctatgcaaataattgcattagttgcatcaatctcttat

SEQ ID NO: 25765 - protein, 37 aa, Homo sapiens
MFAGWAWWLTPVIPALWEAEVGGVVELRNRATALQPG

SEQ ID NO: 25766 - DNA, 719 bp, Homo sapiens
tagttgccaagagacagaacctgggccacagcaattgctgctgatgtttctggttctcaaagccacatccgtcttaaaaaataaataaataaataaatagacagatagatagatagatagtgtctatgaaggctgcccaagaacttgaccattagggaaacatggctgtttctgtggattaactagtcaagcccatacaggaagagtgaggtcagctcccaggtggggcaggatgtagtggacgcttggaagaatttgggaccacacacgaattgctaccatggtgagccagtgaaacttgaggaaggcaggactggattgtgattacaactgagtaagtaggcagagaattggagtgtgggcaacataaagatgatgtgaatcaaagaagaatggtcaattaagaccctaaaaaaaggacgttcaaaaatgcagaggttaaaaaaaaaaaaagcagagattgccagatgctccatttggtaggagtctgcttagcacagtggtgcttcgccagactttaccgtggcccagggaaatggtcctcaagacggactccatgtctaccaagctacttgctaatgatttctttgtcctccaggacagggaaggggcttttctggatgggatacattgatattttatggccttgaaacactatcctgattataaattaataaattgctatgcaaataattgcattagttgcatcaatctcttat

SEQ ID NO: 25767 - protein, 60 aa, Homo sapiens
MLHLVGVCLAQWCFARLYRGPGKWSSRRTPCLPSYLLMISLSSRTGKGLFWMGYIDILWP

SEQ ID NO: 25768 - DNA, 737 bp, Homo sapiens
gattgatgcaactaatgcaattatttgcatagcaatttattaatttataatcaggatagtgtttcaaggccataaaatatcaatgtatcccatccagaaaagccccttccctgtcctggaggacaaagaaatcattagcaagtagcttggtagacatggagtccgtcttgaggaccatttccctgggccacggtaaagtctggcgaagcaccactgtgctaagcagactcctaccaaatggagcatctggcaatctctgctttttttttttttaacctctgcatttttgaacgtcctttttttagggtcttaattgaccattcttctttgattcacatcatctttatgttgcccacactccaattctctgcctacttactcagttgtaatcacaatccagtcctgccttcctcaagtttcactggctcaccatggtagcaattcgtgtgtggtcccaaattcttccaagcgtccactacatcctgccccacctgggagctgacctcactcttcctgtatgggcttgactagttaatccacagaaacagccatgtttccctaatggtcaagttcttgggcagccttcatagacactatctatctatctatctgtctatttatttatttatttattttttaagacggagtcttgctctgtcacccaggctggaaatgaaactgtctcaaaaaaaaaaaaaaaaaaagaagaaaagaaagaaaaaagaaaattttttttt

SEQ ID NO: 25769 - protein, 57 aa, Homo sapiens
MVKFLGSLHRHYLSIYLSIYLFIYFLRRSLALSPRLEMKLSQKKKKKKKKRKKKENF

SEQ ID NO: 25770 - DNA, 2295 bp, Homo sapiens
aaaggcgcggcggggaggggagccggggccccagccctgccgggaaacgggttcccagtcccggccgagagcgcgggcgccgaggggaccgacccggactccccgcaaccccccaaccgccaggccatggcgcccacggggctcctggtggccggcgcctccttcctcgcgttccgggggctgcactgggggttgcggcggctgcccacgccggaatcggccgctcgggaccgctggcagtggtggaacctctgcgtctccctggcgcacagcctgctctcggggaccggggcgctgctcggcctgtcactgtaccctcagatggccgccgaccccatccatggccacccgcgctgggctctggtgctggtggctgtgtctgtgggttacttcctggcagacggagctgacctgctgtggaaccagaccttgggcaagacctgggatcttctctgtcatcatttggtggtggtgagctgcctcagcaccgctgttctgtctggccactacgtgggcttctccatggtgtctctgctcctggaactgaatccagcctgggcaaacagagtgagactcttgtctctaaagaaaaaaaaaaaaggaagagctgggacttttctgagatacattcataaagtcttcttcctccctgctgcttctgctgcgtttttttctgttgaacaagaccccttccttcccagaacatcgaggtgacgggaagtgcccagcagattaagtctgctgttccactaaacaatggactgagagaggcaacccttagccatccacagaaaagctacatgagcaaaagcaagagacaggaagattgtcttcaaaaaaaaacaaaacaaaacaaaaaccttgctaagaagcggaggtacagaaagatacgaagaatgacagagacagacatacatagattgagtgatagatagaaagagagaaggattattcacatagaggtgacagaggcaaagaaggatggagggcaaaagagacaggccctagcagaaatatggagaaaggctgtcatagatcctgagagacaccaaagtcacagaactgataaaagggttataaacaaaaaggaccagaaaaatagaaatgaaggccgacaagaagagaccccaaggctgaaaggcacagagagtctagacagtgaaatagagtgagtgacaaggagaaacacccaggctcaggagtgatggaggaaatactggcagatagagagatcagaagagcaagaggagaggtgggaacagagaagagcggggacgagtccggggagctgagaagcagaaggcggaggaggcagtcagtgggaagattcactgacagaagagaccaggagatatggggacttggaggcaggcagaaagacaaaggacaaacagctgcagcgcaaaccctaaagacaggctgacagtaaccggtcggcagagactggtaggaagataaggacaagtcagaatcaggggtgtcaactgagatgcaaatataggcaaaggagctgacaaagagaatcacagagagaaaaaaaaggaggagagcacagaacaatttaaatatccaggctgggcatggtgggtcacgcctgtaatcccagcattttgggaggccgaggcaggcggatcacgaggtcaggagatgaccatcctggctaacatggtgaaacaccatctctactaaaaatacaaaaaattggccgggcgtggtggcaggcgcccgtaatcccggctactgaggaggctgaggcaggagaatcgtttgaacctgggaggccgaggttgttataatgagccgagatagtgccactgcagtccagcaggggtgacagagtgagactccgtctcaaaaaaaaaaattgaatatccaaagaacaaagaagaggcaggaacccagaaatgaaaagaggaggaaaaatacaggtgtgaaaaaaaaatgagagggattgtgagaagtctccatcatagagtcataaaaacaggcgcaaaggatgaaaatacatcgagactgaggaaaacacagttggaaggagctaaacacaagcagaaaataagagcagagcatttaaatgtaattagataaaaacccaagaggcaaaggtatagatagtgagctagagaaacaatgcagaattttgtcagagtctgtacttctagaagtcatgtttgctggctgggcatggtggctcacgcctgtaatcccagcactttgggaggccgaggtaggaggagtggttgagctcaggagttcaagaccagtctgggcaacatattgagacctcctctctac

SEQ ID NO: 25771 - protein, 195 aa, Homo sapiens
MAPTGLLVAGASFLAFRGLHWGLRRLPTPESAARDRWQWWNLCVSLAHSLLSGTGALLGLSLYPQMAADPIHGHPRWALVLVAVSVGYFLADGADLLWNQTLGKTWDLLCHHLVVVSCLSTAVLSGHYVGFSMVSLLLELNPAWANRVRLLSLKKKKKGRAGTFLRYIHKVFFLPAASAAFFSVEQDPFLPRTSR

SEQ ID NO: 25772 - DNA, 2217 bp, Homo sapiens
agtagaaggctcaaacaacccaaggttagttggtctttgtgtgacagtgggaagaagtggagagaacactctgtctccccgacttccttcttgaccctccttccgtatctttcattcttccccactggcctttccagatgaggtccaaaagtaagctcactcttcagggaaaagtgatactaaacccaggcgtgaggagtcatccttctgctcttacttttccctgcatttccttaggctggcccagactctagattcctgggcacttacctgtatctgagacccttagacctcctgtctcagtttctccacctgtgagatgggcagtcacacagatgagtgtgcatgagggaatcagaagcccatctgggttgactcagaacccgggctctccccctgctgtgggtggaaacaaaacaccttttcacagaagctgttgtccctcccccatccctgataccatcacccagaagctgggtggggaatgggaagctggaggagggggttagagttagaccaatgcgaggagctagtaagagctcgcctctccgtgacttccccccatgcaagggtggcccaaggcttcccctgatatccaaagcaggacagcagccccttggtgggattctaactgctgctactctgtttctttcctcactttgctttccaaggtggtatgtgatccccagctcaggcctgtgcagacaggaaattctcccctgcagcaagtaggggaggtgggttgtgggatgtgacctccttccagatatcaggcagtgagtgtaaacctgccacctccagccctgatccattctcacctagcggctacaggaagctgtgtctgttcgatttggtgggaggagatgtgcagggagctgtatcttgtcctccgcttgtgaaaaactcaaggatgtggagaagagtagaccgtggaaccctgctcttctgcagccaagctgaggggcaggatgcgtgtgggacagtggtagagaagcaggggatagactcataggctgcaacaaaggtgactctgtccctggacactgcctccgtactttctccttgcttcactggccacagcatctccctccagccctcgctatgtgcctctgccatcttcacccatcatggagcagaggtgaggagaggcagcctgggaatatggagaccagtgaaggaccaggcctggagagcacagggtcctacctgggcatccagcagaggagcccctaaaggccaggagcaccccaagaggagggagggcagccagcctccattgacggcgagcctccagccctctcctactttgatcaccatttctctccaggctttctgcctccgagatgtggcaccatagtgcggtgccctgtggcttcaccgccctacttccacctccgcccagcctgtaatgtttatataagcagcctcaaggaccaagaaccatctgcgaaaggacacacacaggaaattcataaaagaaatctgaatggataaaaccatgaaaaaaagtatgcttcattagtaattaaagaaaggcaaatagagctggaagcatttttcccttagcaaaccataacagaaaaaaataagacccaatattggcaaagagactactgaaaaaacattcccatacattgcgtgtgggagtatacatcggtgcaggcttcctggatgacagttgggtgatatgtgtcatgtggcctaaaagcctccatgtcatttgacctacgaattctatctttgggaatttatcctaagaaaatacttaaggatttagttagtgataagatgttcatcccagcattgcaatggagaaaaatgggaagcaatggtttggttgggaatttattccttttctgctgtaacgaaagtttgcaataggggattgcttaagtaaattattgtatctccatccagatggtggagtaccgcgcagacattaaaagtcatgtaaaagaacatctgactgaaagaaaaatgctccttgaatattaaaaggttgtaaaaatagtgcatgttatgtgatttcaattttgttttttaaaatatgggtgtatgcttgtatacgtagagcagataaaaaagacggaaggcatactaaaaaatgttgagtggttatctttgtatggtggaacaaagtcactgtaattttcatctttggtttttctgtaatttccaaattttccacattttgtatttcatataatataatttaag

SEQ ID NO: 25773 - protein, 70 aa, Homo sapiens
MRGASKSSPLRDFPPCKGGPRLPLISKAGQQPLGGILTAATLFLSSLCFPRWYVIPSSGLCRQEILPCSK

SEQ ID NO: 25774 - DNA, 2584 bp, Homo sapiens
gagacagcgccgccggccgtggggagcggacgcagtgatttgctccccctcgtgcagcaacccccacacccagcaccaggagcctgttcctctcacgccctcacctggctgagccgcagtagttcttcagtggcaagctttatgtcctgacccagctaaagctgccagttgaagaactgttgccctctgcccctggcttcgaggaggaggaggagctgctttccccatcatctggaaggtgacagaaatgggctgggaaggtccgaacagcagggtggatgatacgttttgggcaagttggagagcctttgcccagattggcccagcaaggagcggttttagattagagacactggctggattgaggagtagaaggctcaaacaacccaaggttagttggtctttgtgtgacagtgggaagaagtggagagaacactctgtctccccgacttccttcttgaccctccttccgtatctttcattcttccccactggcctttccagatgaggtccaaaagtaagctcactcttcagggaaaagtgatactaaacccaggcgtgaggagtcatccttctgctcttacttttccctgcatttccttaggctggcccagactctagattcctgggcacttacctgtatctgagacccttagacctcctgtctcagtttctccacctgtgagatgggcagtcacacagatgagtgtgcatgagggaatcagaagcccatctgggttgactcagaacccgggctctccccctgctgtgggtggaaacaaaacaccttttcacagaagctgttgtccctcccccatccctgataccatcacccagaagctgggtggggaatgggaagctggaggagggggttagagttagaccaatgcgaggagctagtaagagctcgcctctccgtgacttccccccatgcaagggtggcccaaggcttcccctgatatccaaagcaggacagcagccccttggtgggattctaactgctgctactctgtttctttcctcactttgctttccaaggtggtatgtgatccccagctcaggcctgtgcagacaggaaattctcccctgcagcaagtaggggaggtgggttgtgggatgtgacctccttccagatatcaggcagtgagtgtaaacctgccacctccagccctgatccattctcacctagcggctacaggaagctgtgtctgttcgatttggtgggaggagatgtgcagggagctgtatcttgtcctccgcttgtgaaaaactcaaggatgtggagaagagtagaccgtggaaccctgctcttctgcagccaagctgaggggcaggatgcgtgtgggacagtggtagagaagcaggggatagactcataggctgcaacaaaggtgactctgtccctggacactgcctccgtactttctccttgcttcactggccacagcatctccctccagccctcgctatgtgcctctgccatcttcacccatcatggagcagaggtgaggagaggcagcctgggaatatggagaccagtgaaggaccaggcctggagagcacagggtcctacctgggcatccagcagaggagcccctaaaggccaggagcaccccaagaggagggagggcagccagcctccattgacggcgagcctccagccctctcctactttgatcaccatttctctccaggctttctgcctccgagatgtggcaccatagtgcggtgccctgtggcttcaccgccctacttccacctccgcccagcctgtaatgtttatataagcagcctcaaggaccaagaaccatctgcgaaaggacacacacaggaaattcataaaagaaatctgaatggataaaaccatgaaaaaaagtatgcttcattagtaattaaagaaaggcaaatagagctggaagcatttttcccttagcaaaccataacagaaaaaaataagacccaatattggcaaagagactactgaaaaaacattcccatacattgcgtgtgggagtatacatcggtgcaggcttcctggatgacagttgggtgatatgtgtcatgtggcctaaaagcctccatgtcatttgacctacgaattctatctttgggaatttatcctaagaaaatacttaaggatttagttagtgataagatgttcatcccagcattgcaatggagaaaaatgggaagcaatggtttggttgggaatttattccttttctgctgtaacgaaagtttgcaataggggattgcttaagtaaattattgtatctccatccagatggtggagtaccgcgcagacattaaaagtcatgtaaaagaacatctgactgaaagaaaaatgctccttgaatattaaaaggttgtaaaaatagtgcatgttatgtgatttcaattttgttttttaaaatatgggtgtatgcttgtatacgtagagcagataaaaaagacggaaggcatactaaaaaatgttgagtggttatctttgtatggtggaacaaagtcactgtaattttcatctttggtttttctgtaatttccaaattttccacattttgtatttcatataatataatttaag

SEQ ID NO: 25775 - protein, 86 aa, Homo sapiens [sequence omitted]

SEQ ID NO: 25776 - DNA, 1363 bp, Homo sapiens
aagagacagcgccgccggccgtggggagcggacgcagtgatttgctccccctcgtgcagcaacccccacacccagcaccaggcccccagaactctccttccagctgaactccctgggaacaagtcagttgggctgatcactgaactcacatttctggacctgaggagcctgttcctctcacgccctcacctggctgagccgcagtagttcttcagtggcaagctttatgtcctgacccagctaaagctgccagttgaagaactgttgccctctgcccctggcttcgaggaggaggaggagctgctttccccatcatctggaaggtgacagaaatgggctgggaaggtccgaacagcagggtggatgatacgttttgggcaagttggagagcctttgcccagattggcccagcaaggagcggttttagattagagacactggctggattgaggagtagaaggctcaaacaacccaaggctttctgcctccgagatgtggcaccatagtgcggtgccctgtggcttcaccgccctacttccacctccgcccagcctgtaatgtttatataagcagcctcaaggaccaagaaccatctgcgaaaggacacacacaggaaattcataaaagaaatctgaatggataaaaccatgaaaaaaagtatgcttcattagtaattaaagaaaggcaaatagagctggaagcatttttcccttagcaaaccataacagaaaaaaataagacccaatattggcaaagagactactgaaaaaacattcccatacattgcgtgtgggagtatacatcggtgcaggcttcctggatgacagttgggtgatatgtgtcatgtggcctaaaagcctccatgtcatttgacctacgaattctatctttgggaatttatcctaagaaaatacttaaggatttagttagtgataagatgttcatcccagcattgcaatggagaaaaatgggaagcaatggtttggttgggaatttattccttttctgctgtaacgaaagtttgcaataggggattgcttaagtaaattattgtatctccatccagatggtggagtaccgcgcagacattaaaagtcatgtaaaagaacatctgactgaaagaaaaatgctccttgaatattaaaaggttgtaaaaatagtgcatgttatgtgatttcaattttgttttttaaaatatgggtgtatgcttgtatacgtagagcagataaaaaagacggaaggcatactaaaaaatgttgagtggttatctttgtatggtggaacaaagtcactgtaattttcatctttggtttttctgtaatttccaaattttccacattttgtatttcatataatataattt

SEQ ID NO: 25777 - protein, 57 aa, Homo sapiens; identical to SEQ ID NO: 3423

SEQ ID NO: 25778 - DNA, 1821 bp, Homo sapiens
ggggagcggacgcagtgatttgctccccctcgtgcagcaacccccacacccagcaccaggcccccagaactctccttccagctgaactccctgggaacaagtcagttgggctgatcactgaactcacatttctggacctgaggagcctgttcctctcacgccctcacctggctgagccgcagtagttcttcagtggcaagctttatgtcctgacccagctaaagctgccagttgaagaactgttgccctctgcccctggcttcgaggaggaggaggagctgctttccccatcatctggaaggtgacagaaatgggctgggaaggtccgaacagcagggtggatgatacgttttgggcaagttggagagcctttgcccagattggcccagcaaggagcggttttagattagagacactggctggattgaggagtagaaggctcaaacaacccaaggaagctgtgtctgttcgatttggtgggaggagatgtgcagggagctgtatcttgtcctccgcttgtgaaaaactcaaggatgtggagaagagtagaccgtggaaccctgctcttctgcagccaagctgaggggcaggatgcgtgtgggacagtggtagagaagcaggggatagactcataggctgcaacaaaggtgactctgtccctggacactgcctccgtactttctccttgcttcactggccacagcatctccctccagccctcgctatgtgcctctgccatcttcacccatcatggagcagaggtgaggagaggcagcctgggaatatggagaccagtgaaggaccaggcctggagagcacagggtcctacctgggcatccagcagaggagcccctaaaggccaggagcaccccaagaggagggagggcagccagcctccattgacggcgagcctccagccctctcctactttgatcaccatttctctccaggctttctgcctccgagatgtggcaccatagtgcggtgccctgtggcttcaccgccctacttccacctccgcccagcctgtaatgtttatataagcagcctcaaggaccaagaaccatctgcgaaaggacacacacaggaaattcataaaagaaatctgaatggataaaaccatgaaaaaaagtatgcttcattagtaattaaagaaaggcaaatagagctggaagcatttttcccttagcaaaccataacagaaaaaaataagacccaatattggcaaagagactactgaaaaaacattcccatacattgcgtgtgggagtatacatcggtgcaggcttcctggatgacagttgggtgatatgtgtcatgtggcctaaaagcctccatgtcatttgacctacgaattctatctttgggaatttatcctaagaaaatacttaaggatttagttagtgataagatgttcatcccagcattgcaatggagaaaaatgggaagcaatggtttggttgggaatttattccttttctgctgtaacgaaagtttgcaataggggattgcttaagtaaattattgtatctccatccagatggtggagtaccgcgcagacattaaaagtcatgtaaaagaacatctgactgaaagaaaaatgctccttgaatattaaaaggttgtaaaaatagtgcatgttatgtgatttcaattttgttttttaaaatatgggtgtatgcttgtatacgtagagcagataaaaaagacggaaggcatactaaaaaatgttgagtggttatctttgtatggtggaacaaagtcactgtaattttcatctttggtttttctgtaatttccaaattttccacattttgtatt

SEQ ID NO: 25779 - protein, 90 aa, Homo sapiens
MGWEGPNSRVDDTFWASWRAFAQIGPARSGFRLETLAGLRSRRLKQPKEAVSVRFGGRRCAGSCILSSACEKLKDVEKSRPWNPALLQPS

SEQ ID NO: 25780 - DNA, 2640 bp, Homo sapiens
gccgccggccgtggggagcggacgcagtgatttgctccccctcgtgcagcaacccccacacccagcaccaggcccccagaactctccttccagctgaactccctgggaacaagtcagttgggctgatcactgaactcacatttctggacctgaggagcctgttcctctcacgccctcacctggctgagccgcagtagttcttcagtggcaagctttatgtcctgacccagctaaagctgccagttgaagaactgttgccctctgcccctggcttcgaggaggaggaggagctgctttccccatcatctggaaggtgacagaaatgggctgggaaggtccgaacagcagggtggatgatacgttttgggcaagttggagagcctttgcccagattggcccagcaaggagcggttttagattagagacactggctggattgaggagtagaaggctcaaacaacccaaggttagttggtctttgtgtgacagtgggaagaagtggagagaacactctgtctccccgacttccttcttgaccctccttccgtatctttcattcttccccactggcctttccagatgaggtccaaaagtaagctcactcttcagggaaaagtgatactaaacccaggcgtgaggagtcatccttctgctcttacttttccctgcatttccttaggctggcccagactctagattcctgggcacttacctgtatctgagacccttagacctcctgtctcagtttctccacctgtgagatgggcagtcacacagatgagtgtgcatgagggaatcagaagcccatctgggttgactcagaacccgggctctccccctgctgtgggtggaaacaaaacaccttttcacagaagctgttgtccctcccccatccctgataccatcacccagaagctgggtggggaatgggaagctggaggagggggttagagttagaccaatgcgaggagctagtaagagctcgcctctccgtgacttccccccatgcaagggtggcccaaggcttcccctgatatccaaagcaggacagcagccccttggtgggattctaactgctgctactctgtttctttcctcactttgctttccaaggtggtatgtgatccccagctcaggcctgtgcagacaggaaattctcccctgcagcaagtaggggaggtgggttgtgggatgtgacctccttccagatatcaggcagtgagtgtaaacctgccacctccagccctgatccattctcacctagcggctacaggaagctgtgtctgttcgatttggtgggaggagatgtgcagggagctgtatcttgtcctccgcttgtgaaaaactcaaggatgtggagaagagtagaccgtggaaccctgctcttctgcagccaagctgaggggcaggatgcgtgtgggacagtggtagagaagcaggggatagactcataggctgcaacaaaggtgactctgtccctggacactgcctccgtactttctccttgcttcactggccacagcatctccctccagccctcgctatgtgcctctgccatcttcacccatcatggagcagaggtgaggagaggcagcctgggaatatggagaccagtgaaggaccaggcctggagagcacagggtcctacctgggcatccagcagaggagcccctaaaggccaggagcaccccaagaggagggagggcagccagcctccattgacggcgagcctccagccctctcctactttgatcaccatttctctccaggctttctgcctccgagatgtggcaccatagtgcggtgccctgtggcttcaccgccctacttccacctccgcccagcctgtaatgtttatataagcagcctcaaggaccaagaaccatctgcgaaaggacacacacaggaaattcataaaagaaatctgaatggataaaaccatgaaaaaaagtatgcttcattagtaattaaagaaaggcaaatagagctggaagcatttttcccttagcaaaccataacagaaaaaaataagacccaatattggcaaagagactactgaaaaaacattcccatacattgcgtgtgggagtatacatcggtgcaggcttcctggatgacagttgggtgatatgtgtcatgtggcctaaaagcctccatgtcatttgacctacgaattctatctttgggaatttatcctaagaaaatacttaaggatttagttagtgataagatgttcatcccagcattgcaatggagaaaaatgggaagcaatggtttggttgggaatttattccttttctgctgtaacgaaagtttgcaataggggattgcttaagtaaattattgtatctccatccagatggtggagtaccgcgcagacattaaaagtcatgtaaaagaacatctgactgaaagaaaaatgctccttgaatattaaaaggttgtaaaaatagtgcatgttatgtgatttcaattttgttttttaaaatatgggtgtatgcttgtatacgtagagcagataaaaaagacggaaggcatactaaaaaatgttgagtggttatctttgtatggtggaacaaagtcactgtaattttcatctttggtttttctgtaatttccaaattttccacattttgtatt

SEQ ID NO: 25781 - protein, 86 aa, Homo sapiens [sequence omitted]

SEQ ID NO: 25782 - DNA, 1758 bp, Homo sapiens
gagacagcgccgccggccgtggggagcggacgcagtgatttgctccccctcgtgcagcaacccccacacccagcaccaggagcctgttcctctcacgccctcacctggctgagccgcagtagttcttcagtggcaagctttatgtcctgacccagctaaagctgccagttgaagaactgttgccctctgcccctggcttcgaggaggaggaggagctgctttccccatcatctggaaggtgacagaaatgggctgggaaggtccgaacagcagggtggatgatacgttttgggcaagttggagagcctttgcccagattggcccagcaaggagcggttttagattagagacactggctggattgaggagtagaaggctcaaacaacccaaggaagctgtgtctgttcgatttggtgggaggagatgtgcagggagctgtatcttgtcctccgcttgtgaaaaactcaaggatgtggagaagagtagaccgtggaaccctgctcttctgcagccaagctgaggggcaggatgcgtgtgggacagtggtagagaagcaggggatagactcataggctgcaacaaaggtgactctgtccctggacactgcctccgtactttctccttgcttcactggccacagcatctccctccagccctcgctatgtgcctctgccatcttcacccatcatggagcagaggtgaggagaggcagcctgggaatatggagaccagtgaaggaccaggcctggagagcacagggtcctacctgggcatccagcagaggagcccctaaaggccaggagcaccccaagaggagggagggcagccagcctccattgacggcgagcctccagccctctcctactttgatcaccatttctctccaggctttctgcctccgagatgtggcaccatagtgcggtgccctgtggcttcaccgccctacttccacctccgcccagcctgtaatgtttatataagcagcctcaaggaccaagaaccatctgcgaaaggacacacacaggaaattcataaaagaaatctgaatggataaaaccatgaaaaaaagtatgcttcattagtaattaaagaaaggcaaatagagctggaagcatttttcccttagcaaaccataacagaaaaaaataagacccaatattggcaaagagactactgaaaaaacattcccatacattgcgtgtgggagtatacatcggtgcaggcttcctggatgacagttgggtgatatgtgtcatgtggcctaaaagcctccatgtcatttgacctacgaattctatctttgggaatttatcctaagaaaatacttaaggatttagttagtgataagatgttcatcccagcattgcaatggagaaaaatgggaagcaatggtttggttgggaatttattccttttctgctgtaacgaaagtttgcaataggggattgcttaagtaaattattgtatctccatccagatggtggagtaccgcgcagacattaaaagtcatgtaaaagaacatctgactgaaagaaaaatgctccttgaatattaaaaggttgtaaaaatagtgcatgttatgtgatttcaattttgttttttaaaatatgggtgtatgcttgtatacgtagagcagataaaaaagacggaaggcatactaaaaaatgttgagtggttatctttgtatggtggaacaaagtcactgtaattttcatctttggtttttctgtaatttccaaattttccacattttgtatt

SEQ ID NO: 25783 - protein, 90 aa, Homo sapiens; identical to SEQ ID NO: 25779

SEQ ID NO: 25784 - DNA, 1700 bp, Homo sapiens
gaagagacagcgccgccggccgtggggagcggacgcagtgatttgctccccctcgtgcagcaacccccacacccagcaccaggcccccagaactctccttccagctgaactccctgggaacaagtcagttgggctgatcactgaactcacatttctggacctgaggagcctgttcctctcacgccctcacctggctgagccgcagtagttcttcagtggcaagctttatgtcctgacccagctaaagctgccagttgaagaactgttgccctctgcccctggcttcgaggaggaggaggagctgctttccccatcatctggaagcggctacaggaagctgtgtctgttcgatttggtgggaggagatgtgcagggagctgtatcttgtcctccgcttgtgaaaaactcaaggatgtggagaagagtagaccgtggaaccctgctcttctgcagccaagctgaggggcaggatgcgtgtgggacagtggtagagaagcaggggatagactcataggctgcaacaaaggtgactctgtccctggacactgcctccgtactttctccttgcttcactggccacagcatctccctccagccctcgctatgtgcctctgccatcttcacccatcatggagcagaggtgaggagaggcagcctgggaatatggagaccagtgaaggaccaggcctggagagcacagggtcctacctgggcatccagcagaggagcccctaaaggccaggagcaccccaagaggagggagggcagccagcctccattgacggcgagcctccagccctctcctactttgatcaccatttctctccaggctttctgcctccgagatgtggcaccatagtgcggtgccctgtggcttcaccgccctacttccacctccgcccagcctgtaatgtttatataagcagcctcaaggaccaagaaccatctgcgaaaggacacacacaggaaattcataaaagaaatctgaatggataaaaccatgaaaaaaagtatgcttcattagtaattaaagaaaggcaaatagagctggaagcatttttcccttagcaaaccataacagaaaaaaataagacccaatattggcaaagagactactgaaaaaacattcccatacattgcgtgtgggagtatacatcggtgcaggcttcctggatgacagttgggtgatatgtgtcatgtggcctaaaagcctccatgtcatttgacctacgaattctatctttgggaatttatcctaagaaaatacttaaggatttagttagtgataagatgttcatcccagcattgcaatggagaaaaatgggaagcaatggtttggttgggaatttattccttttctgctgtaacgaaagtttgcaataggggattgcttaagtaaattattgtatctccatccagatggtggagtaccgcgcagacattaaaagtcatgtaaaagaacatctgactgaaagaaaaatgctccttgaatattaaaaggttgtaaaaatagtgcatgttatgtgatttcaattttgttttttaaaatatgggtgtatgcttgtatacgtagagcagataaaaaagacggaaggcatactaaaaaatgttgagtggttatctttgtatggtggaacaaagtcactgtaattttcatctttggtttttctgtaatttccaaattttccacattttgtatt

SEQ ID NO: 25785 - protein, 55 aa, Homo sapiens [sequence omitted]

SEQ ID NO: 25786 - DNA, 1187 bp, Homo sapiens
gaagagacagcgccgccggccgtggggagcggacgcagtgatttgctccccctcgtgcagcaacccccacacccagcaccaggagcctgttcctctcacgccctcacctggctgagccgcagtagttcttcagtggcaagctttatgtcctgacccagctaaagctgccagttgaagaactgttgccctctgcccctggcttcgaggaggaggaggagctgctttccccatcatctggaaggtgacagaaatgggctgggaaggtccgaacagcagggtggatgatacgttttgggcaagttggagagcctttgcccagattggcccagcaaggagcggttttagattagagacactggctggattgaggagtagaaggctcaaacaacccaaggctttctgcctccgagatgtggcaccatagtgcggtgccctgtggcttcaccgccctacttccacctccgcccagcctgtaatgtttatataagcagcctcaaggaccaagaaccatctgcgaaaggacacacacaggaaattcataaaagaaatctgaatggataaaaccatgaaaaaaagtatgcttcattagtaattaaagaaaggcaaatagagctggaagcatttttcccttagcaaaccataacagaaaaaaataagacccaatattggcaaagagactactgaaaaaacattcccatacattgcgtgtgggagtatacatcggtgcaggcttcctggatgacagttgggtgatatgtgtcatgtggcctaaaagcctccatgtcatttgacctacgaattctatctttgggaatttatcctaagaaaatacttaaggatttagttagtgataagatgttcatcccagcattgcaatggagaaaaatgggaagcaatggtttggttgggaatttattccttttctgctgtaacgaaagtttgcaataggggattgcttaagtaaattattgtatctccatccagatggtggagtaccgcgcagacattaaaagtcatgtaaaagaacatctgactgaaagaaaaatgctccttgaatattaaaaggttgtaaaaatagtgcatgttatgtgatttcaattttgttttttaaaatatgggtgtatgcttgtatacgtagagcagataaaaaagacggaaggcatactaaaaaatgttgagtggttatc

SEQ ID NO: 25787 - protein, 57 aa, Homo sapiens; identical to SEQ ID NO: 3423

SEQ ID NO: 25788 - DNA, 1153 bp, Homo sapiens
gtggtatgtgatccccagctcaggcctgtgcagacaggaaattctcccctgcagcaagtaggggaggtgggttgtgggatgtgacctccttccagatatcaggcagtgagtgtaaacctgccacctccagccctgatccattctcacctagcggctacaggaagctgtgtctgttcgatttggtgggaggagatgtgcagggagctgtatcttgtcctccgcttgtgaaaaactcaaggatgtggagaagagtagaccgtggaaccctgctcttctgcagccaagctgaggggcaggatgcgtgtgggacagtggtagagaagcaggggatagactcataggctgcaacaaaggtgactctgtccctggacactgcctccgtactttctccttgcttcactggccacagcatctccctccagccctcgctatgtgcctctgccatcttcacccatcatggagcagaggctttctgcctccgagatgtggcaccatagtgcggtgccctgtggcttcaccgccctacttccacctccgcccagcctgtaatgtttatataagcagcctcaaggaccaagaaccatctgcgaaaggacacacacaggaaattcataaaagaaatctgaatggataaaaccatgaaaaaaagtatgcttcattagtaattaaagaaaggcaaatagagctggaagcatttttcccttagcaaaccataacagaaaaaaataagacccaatattggcaaagagactactgaaaaaacattcccatacattgcgtgtgggagtatacatcggtgcaggcttcctggatgacagttgggtgatatgtgtcatgtggcctaaaagcctccatgtcatttgacctacgaattctatctttgggaatttatcctaagaaaatacttaaggatttagttagtgataagatgttcatcccagcattgcaatggagaaaaatgggaagcaatggtttggttgggaatttattccttttctgctgtaacgaaagtttgcaataggggattgcttaagtaaattattgtatctccatccagatggtggagtaccgcgcagacattaaaagtcatgtaaaagaacatctgactgaaagaaaaatgctccttgaatattaaaaggttgtaaaaatagtg

SEQ ID NO: 25789 - protein, 67 aa, Homo sapiens
MCLCHLHPSWSRGFLPPRCGTIVRCPVASPPYFHLRPACNVYISSLKDQEPSAKGHTQEIHKRNLNG

SEQ ID NO: 25790 - DNA, 913 bp, Homo sapiens
gccggccgtggggagcggacgcagtgatttgctccccctcgtgcagcaacccccacacccagcaccaggagcctgttcctctcacgccctcacctggctgagccgcagtagttcttcagtggcaagctttatgtcctgacccagctaaagctgccagttgaagaactgttgccctctgcccctggcttcgaggaggaggaggagctgctttccccatcatctggaaggctttctgcctccgagatgtggcaccatagtgcggtgccctgtggcttcaccgccctacttccacctccgcccagcctgtaatgtttatataagcagcctcaaggaccaagaaccatctgcgaaaggacacacacaggaaattcataaaagaaatctgaatggataaaaccatgaaaaaaagtatgcttcattagtaattaaagaaaggcaaatagagctggaagcatttttcccttagcaaaccataacagaaaaaaataagacccaatattggcaaagagactactgaaaaaacattcccatacattgcgtgtgggagtatacatcggtgcaggcttcctggatgacagttgggtgatatgtgtcatgtggcctaaaagcctccatgtcatttgacctacgaattctatctttgggaatttatcctaagaaaatacttaaggatttagttagtgataagatgttcatcccagcattgcaatggagaaaaatgggaagcaatggtttggttgggaatttattccttttctgctgtaacgaaagtttgcaataggggattgcttaagtaaattattgtatctccatccagatggtggagtaccgcgcagacattaaaagtcatgtaaaagaacatctgactgaaagaaaaatgctccttgaatattaaaaggttgtaaaaatagtg

SEQ ID NO: 25791 - protein, 55 aa, Homo sapiens [sequence omitted]

SEQ ID NO: 25792 - DNA, 1059 bp, Homo sapiens
gacgccgccagctgatcggagcctggagccggtgtgtgctgggtgccgagaagagacagcgccgccggccgtggggagcggacgcagtgatttgctccccctcgtgcagcaacccccacacccagcaccaggcccccagaactctccttccagctgaactccctgggaacaagtcagttgggctgatcactgaactcacatttctggacctgaggagcctgttcctctcacgccctcacctggctgagccgcagtagttcttcagtggcaagctttatgtcctgacccagctaaagctgccagttgaagaactgttgccctctgcccctggcttcgaggaggaggaggagctgctttccccatcatctggaaggctttctgcctccgagatgtggcaccatagtgcggtgccctgtggcttcaccgccctacttccacctccgcccagcctgtaatgtttatataagcagcctcaaggaccaagaaccatctgcgaaaggacacacacaggaaattcataaaagaaatctgaatggataaaaccatgaaaaaaagtatgcttcattagtaattaaagaaaggcaaatagagctggaagcatttttcccttagcaaaccataacagaaaaaaataagacccaatattggcaaagagactactgaaaaaacattcccatacattgcgtgtgggagtatacatcggtgcaggcttcctggatgacagttgggtgatatgtgtcatgtggcctaaaagcctccatgtcatttgacctacgaattctatctttgggaatttatcctaagaaaatacttaaggatttagttagtgataagatgttcatcccagcattgcaatggagaaaaatgggaagcaatggtttggttgggaatttattccttttctgctgtaacgaaagtttgcaataggggattgcttaagtaaattattgtatctccatccagatggtggagtaccgcgcagacattaaaagtcatgtaaaagaacatctgactgaaagaaaaatgctccttgaatattaaaaggttgtaaaaatagtg

SEQ ID NO: 25793 - protein, 55 aa, Homo sapiens [sequence omitted]

SEQ ID NO: 25794 - DNA, 3808 bp, Homo sapiens
aaagagcaggcgaaagccacggcgtctgcgtttgcaatgcatgctggtccgtgtagttctcagcctgacaccgtcgttcccagaacccagcgcgctctgtgctggcgggcgcagaggcctcccaggaggagagcaaggacctggcaggggctgctgaggaggaggagagcgggctgcccggggccgggcctggctcctgtgcttttggggaggagattcccatggatggggagcctcctgcctcctcgggcctggggctcccagactacacgtctggcgtcagcttccacgaccaggctgacctccctgagacagaggacttccaagccgggctctatgtgactgagtctccccagccccaggaggctgaggctgtgagcctgggccggctgagtgacaagagcagcaccagcgagacctccctgggtgaggagcgggctccagacgaggggggtgcccccgtggacaagagcagccttcgatcaggtgacagcagccaggacttgaagcaaagcgagggctccgaggaggaagaggaggaggaggacagctgcgtggtgctagaggaggaggagggggagcaggaggaggtcaccggggcatctgagctcactctgtctgacacggtgctgtccatggagacggttgtggccggcggcagtgggggagatggagaagaagaggaggaggcactgcctgagcagtcagaaggcaaagaacagaagatcctccttgatacagcctgcaagatggtccgctggctgtctgccaagctcggccccacagtggcctctcgccacgtggcccggaacctgctccgcctgctgacgtcttgttatgttggacccactcggcagcagttcacagtgagcagtggcgagagcccaccgctgagcgccggcaacatctaccagaagaggccggtcctgggcgacatcgtgtcagggcctgtgctcagctgcctcctccacatcgcccgcctgtatggggagcctgtcctcacctaccagtacctgccctacatcagctacctggtggccccagggagtgcctcaggccccagccgactgaacagccgtaaggaggcggggctgctggccgcggtgacgctgactcagaagatcatcgtgtacctctcagacaccacactcatggacatcctgccccggatcagccatgaggtcctgctgcccgtgctcagcttcctcacctccctcgtcacggggttcccaagtggggcccaggctcggaccatcctgtgtgtgaaaaccatcagcctcatcgccctcatctgcctgcgcattggacaggagatggtccagcagcacctgagcgagcccgtggccacctttttccaggtcttctctcagctgcatgagcttcggcaacaggatctgaagctggaccctgcgggccgtggtgagggccagctgccacaggtggtcttctctgatgggcagcagcggcccgtggaccccgccctgctggacgagctgcagaaggtgttcaccctggagatggcatacacaatctacgtgcccttctcctgcctgttgggtgacatcatccggaaaatcatccccaaccacgagctggttggggagctggcggcgctgtacttggagagcatcagccccagcagtcgcaaccctgccagcgtggagcccaccatgcccggcaccgggcccgagtgggacccccatggtgggggctgccctcaggatgacggccactcagggacctttgggagcgtcctggtggggaaccgcattcagatccccaatgactctcggcctgagaaccccggaccactgggccccatctcgggggtgggtggcgggggcctgggcagcgggagcgacgacaacgccctgaagcaggagctgccgcggagcgtgcacgggctgagcggaaactggctggcgtactggcagtacgagatcggcgtgagccagcaggatgcccactttcacttccaccagatccgcctgcagagcttcccgggccactcgggggccgtcaagtgcgtggcacccctaagcagcgaggacttcttcctgagcggcagcaaggatcgtaccgtgcgcctctggccgctgtacaactacggcgacgggaccagcgagacggccccacgcctcgtctacacccagcaccgcaagagcgtcttcttcgtgggccagcttgaggccccgcagcacgtggtgagctgtgacggggctgtgcacgtctgggaccccttcacagggaagacccttcgcacagtggagccgctggacagccgggtgcccctgactgcggtggctgtcatgcccgccccccacaccagcatcaccatggccagctctgactctaccctgcgctttgtggactgcaggaagcctggtctgcagcacgagttccgactgggcggtgggctgaaccctgggcttgtccgtgccctggccatcagccccagtggccgtagtgtcgtggccggcttctcctcaggcttcatggtgctcctggacacccgcacaggcctggttctgcgaggctggccagcccacgagggggacattctgcagatcaaggcggtggagggcagcgtcctggtcagctcctcctctgaccattccttgaccgtctggaaggagctggagcagaagcccacccatcactacaagtcagcatccgaccccatccacacctttgacctgtacggcagcgaggtggtcactggcaccgtgtccaacaagattggcgtctgctccctgcttgagccaccctcgcaggccaccacgaagctcagctctgagaacttccgcggcacgctcaccagcctggccttgctgcccactaaacgccacctcctgctgggctcagacaacggggttatccgcctcctggcatagactgaggcaggagctggccgggcaagggtgggaagacatctgcgggcgcgtgtccactcaccctgttccctgagcagcagctccctccagggaggccctgggtcccacgccctgggtgcccacatggcctgccaactagggcctgcaaatggagtgggggagtcctggcccctgaatcaccagagccaccaagcctgccagaggggtctcattcatggcttggggacacagggctcctagcaagcaggaagttaagagcaggaggaagcgttgctaccttcacttctccccagctctgccctctgggtccacatgaggacagggaagctcgggaaggggaagggagactggccctgcccagccggtctctagcccctcagcccccgctgggcactctctgtcccatccctctaggacagggaagctggcctggtccagggcactgatggtgcttggattccagcctaaggaaggctggccgtggtccaggagttaagggcttgggtctggggtttaagtggccacccatccaggccctggccagtgtgggaccgggacgggaaggaagaaggaggctaggagcagggggaaaaggtgcacttggccagtggcgcctgccaggagtgagtccatgcgttgtctgcccacccctaccacagtgtttgtgccttcagctgagggggcagcctctgggccctgaacccctgctggggctccacgaccctgagagaaggggtgagaagaatcatctctgcacctcgggtctctgccagaggaagacttaagcatccctgcgacctcacattctagacagagatgaggtccaggggttggcccctgctgccttctcacaatttgcaatagatgtaaataggaccaataaatcctttggaagagccatggggtgaactgag

SEQ ID NO: 25795 - protein, 890 aa, Homo sapiens
MDGEPPASSGLGLPDYTSGVSFHDQADLPETEDFQAGLYVTESPQPQEAEAVSLGRLSDKSSTSETSLGEERAPDEGGAPVDKSSLRSGDSSQDLKQSEGSEEEEEEEDSCVVLEEEEGEQEEVTGASELTLSDTVLSMETVVAGGSGGDGEEEEEALPEQSEGKEQKILLDTACKMVRWLSAKLGPTVASRHVARNLLRLLTSCYVGPTRQQFTVSSGESPPLSAGNIYQKRPVLGDIVSGPVLSCLLHIARLYGEPVLTYQYLPYISYLVAPGSASGPSRLNSRKEAGLLAAVTLTQKIIVYLSDTTLMDILPRISHEVLLPVLSFLTSLVTGFPSGAQARTILCVKTISLIALICLRIGQEMVQQHLSEPVATFFQVFSQLHELRQQDLKLDPAGRGEGQLPQVVFSDGQQRPVDPALLDELQKVFTLEMAYTIYVPFSCLLGDIIRKIIPNHELVGELAALYLESISPSSRNPASVEPTMPGTGPEWDPHGGGCPQDDGHSGTFGSVLVGNRIQIPNDSRPENPGPLGPISGVGGGGLGSGSDDNALKQELPRSVHGLSGNWLAYWQYEIGVSQQDAHFHFHQIRLQSFPGHSGAVKCVAPLSSEDFFLSGSKDRTVRLWPLYNYGDGTSETAPRLVYTQHRKSVFFVGQLEAPQHVVSCDGAVHVWDPFTGKTLRTVEPLDSRVPLTAVAVMPAPHTSITMASSDSTLRFVDCRKPGLQHEFRLGGGLNPGLVRALAISPSGRSVVAGFSSGFMVLLDTRTGLVLRGWPAHEGDILQIKAVEGSVLVSSSSDHSLTVWKELEQKPTHHYKSASDPIHTFDLYGSEVVTGTVSNKIGVCSLLEPPSQATTKLSSENFRGTLTSLALLPTKRHLLLGSDNGVIRLLA

SEQ ID NO: 25796 - DNA, 3320 bp, Homo sapiens
tggagaccctttcagccccgggaggaagcggagcccagaccgagccagagcggagcagcgggagggagggcggggaggccgccgggcaggaagcggggtcccgcccgggcctctggagccacgtgcgcttgtttccgtgctggggcgatcacgtgacccgcgtcagctgacccgtcacggtggagcccggtgctcgcgcccggcagcctctgccccgccgcgcccggagcgcaggacccgcggagggatacagcctgcaagatggtccgctggctgtctgccaagctcggccccacagtggcctctcgccacgtggcccggaacctgctccgcctgctgacgtcttgttatgttggacccactcggcagcagttcacagtgagcagtggcgagagcccaccgctgagcgccggcaacatctaccagaagaggccggtcctgggcgacatcgtgtcagggcctgtgctcagctgcctcctccacatcgcccgcctgtatggggagcctgtcctcacctaccagtacctgccctacatcagctacctggtggccccagggagtgcctcaggccccagccgactgaacagccgtaaggaggcggggctgctggccgcggtgacgctgactcagaagatcatcgtgtacctctcagacaccacactcatggacatcctgccccggatcagccatgaggtcctgctgcccgtgctcagcttcctcacctccctcgtcacggggttcccaagtggggcccaggctcggaccatcctgtgtgtgaaaaccatcagcctcatcgccctcatctgcctgcgcattggacaggagatggtccagcagcacctgagcgagcccgtggccacctttttccaggtcttctctcagctgcatgagcttcggcaacaggatctgaagctggaccctgcgggccgtggtgagggccagctgccacaggtggtcttctctgatgggcagcagcggcccgtggaccccgccctgctggacgagctgcagaaggtgttcaccctggagatggcatacacaatctacgtgcccttctcctgcctgttgggtgacatcatccggaaaatcatccccaaccacgagctggttggggagctggcggcgctgtacttggagagcatcagccccagcagtcgcaaccctgccagcgtggagcccaccatgcccggcaccgggcccgagtgggacccccatggtgggggctgccctcaggatgacggccactcagggacctttgggagcgtcctggtggggaaccgcattcagatccccaatgactctcggcctgagaaccccggaccactgggccccatctcgggggtgggtggcgggggcctgggcagcgggagcgacgacaacgccctgaagcaggagctgccgcggagcgtgcacgggctgagcggaaactggctggcgtactggcagtacgagatcggcgtgagccagcaggatgcccactttcacttccaccagatccgcctgcagagcttcccgggccactcgggggccgtcaagtgcgtggcacccctaagcagcgaggacttcttcctgagcggcagcaaggatcgtaccgtgcgcctctggccgctgtacaactacggcgacgggaccagcgagacggccccacgcctcgtctacacccagcaccgcaagagcgtcttcttcgtgggccagcttgaggccccgcagcacgtggtgagctgtgacggggctgtgcacgtctgggaccccttcacagggaagacccttcgcacagtggagccgctggacagccgggtgcccctgactgcggtggctgtcatgcccgccccccacaccagcatcaccatggccagctctgactctaccctgcgctttgtggactgcaggaagcctggtctgcagcacgagttccgactgggcggtgggctgaaccctgggcttgtccgtgccctggccatcagccccagtggccgtagtgtcgtggccggcttctcctcaggcttcatggtgctcctggacacccgcacaggcctggttctgcgaggctggccagcccacgagggggacattctgcagatcaaggcggtggagggcagcgtcctggtcagctcctcctctgaccattccttgaccgtctggaaggagctggagcagaagcccacccatcactacaagtcagcatccgaccccatccacacctttgacctgtacggcagcgaggtggtcactggcaccgtgtccaacaagattggcgtctgctccctgcttgagccaccctcgcaggccaccacgaagctcagctctgagaacttccgcggcacgctcaccagcctggccttgctgcccactaaacgccacctcctgctgggctcagacaacggggttatccgcctcctggcatagactgaggcaggagctggccgggcaagggtgggaagacatctgcgggcgcgtgtccactcaccctgttccctgagcagcagctccctccagggaggccctgggtcccacgccctgggtgcccacatggcctgccaactagggcctgcaaatggagtgggggagtcctggcccctgaatcaccagagccaccaagcctgccagaggggtctcattcatggcttggggacacagggctcctagcaagcaggaagttaagagcaggaggaagcgttgctaccttcacttctccccagctctgccctctgggtccacatgaggacagggaagctcgggaaggggaagggagactggccctgcccagccggtctctagcccctcagcccccgctgggcactctctgtcccatccctctaggacagggaagctggcctggtccagggcactgatggtgcttggattccagcctaaggaaggctggccgtggtccaggagttaagggcttgggtctggggtttaagtggccacccatccaggccctggccagtgtgggaccgggacgggaaggaagaaggaggctaggagcagggggaaaaggtgcacttggccagtggcgcctgccaggagtgagtccatgcgttgtctgcccacccctaccacagtgtttgtgccttcagctgagggggcagcctctgggccctgaacccctgctggggctccacgaccctgagagaaggggtgagaagaatcatctctgcacctcgggtctctgccagaggaagacttaagcatccctgcgacctcacattctagacagagatgaggtccaggggttggcccctgctgccttctcacaatttgcaatagatgtaaataggaccaataaatcctttggaagagccatggggtgaactgag

SEQ ID NO: 25797 - protein, 714 aa, Homo sapiens
MVRWLSAKLGPTVASRHVARNLLRLLTSCYVGPTRQQFTVSSGESPPLSAGNIYQKRPVLGDIVSGPVLSCLLHIARLYGEPVLTYQYLPYISYLVAPGSASGPSRLNSRKEAGLLAAVTLTQKIIVYLSDTTLMDILPRISHEVLLPVLSFLTSLVTGFPSGAQARTILCVKTISLIALICLRIGQEMVQQHLSEPVATFFQVFSQLHELRQQDLKLDPAGRGEGQLPQVVFSDGQQRPVDPALLDELQKVFTLEMAYTIYVPFSCLLGDIIRKIIPNHELVGELAALYLESISPSSRNPASVEPTMPGTGPEWDPHGGGCPQDDGHSGTFGSVLVGNRIQIPNDSRPENPGPLGPISGVGGGGLGSGSDDNALKQELPRSVHGLSGNWLAYWQYEIGVSQQDAHFHFHQIRLQSFPGHSGAVKCVAPLSSEDFFLSGSKDRTVRLWPLYNYGDGTSETAPRLVYTQHRKSVFFVGQLEAPQHVVSCDGAVHVWDPFTGKTLRTVEPLDSRVPLTAVAVMPAPHTSITMASSDSTLRFVDCRKPGLQHEFRLGGGLNPGLVRALAISPSGRSVVAGFSSGFMVLLDTRTGLVLRGWPAHEGDILQIKAVEGSVLVSSSSDHSLTVWKELEQKPTHHYKSASDPIHTFDLYGSEVVTGTVSNKIGVCSLLEPPSQATTKLSSENFRGTLTSLALLPTKRHLLLGSDNGVIRLLA

SEQ ID NO: 25798 - DNA, 464 bp, Homo sapiens
tctcttccgcgtgctgagggctatggacgcctgtcaccgccaggggctggcgtgtggggccctgtctttgtatcacatcgcagtggatgagaagctttgcagcgagctgcgactggacctgagtgcttatgagaggcccgaggaggacgagaatgaggaggccccttggcgcctgccaggagtgagtccatgcgttgtctgcccacccctaccacagtgtttgtgccttcagctgagggggcagcctctgggccctgaacccctgctggggctccacgaccctgagagaaggggtgagaagaatcatctctgcacctcgggtctctgccagaggaagacttaagcatccctgcgacctcacattctagacagagatgaggtccaggggttggcccctgctgccttctcacaatttgcaatagatgtaaataggaccaataaatcctttggaagagccatggggt

SEQ ID NO: 25799 - protein, 106 aa, Homo sapiens
MDACHRQGLACGALSLYHIAVDEKLCSELRLDLSAYERPEEDENEEAPWRLPGVSPCVVCPPLPQCLCLQLRGQPLGPEPLLGLHDPERRGEKNHLCTSGLCQRKT

SEQ ID NO: 25800 - DNA, 4131 bp, Homo sapiens
ggttcccttcccaccctacttcccggcactgcacagattcatcctcctgtaccaggcaaggcgtgtggaggacgaggcccaggggcgcgagctggtgtttgctctgtggcagcagctgggcgcggtgctgaaggacatcacccctgagggcctggagatcctgctgcccttcgtgctctcactcatgtccgaggagcacacagctgtgtacacggcctggtatctgtttgagcctgttgccaaggcactgggccccaaaaatgccaataagtacctcctgaagccgctcattggtgcctacgagagcccctgccagctacacggccgcttctacctgtacacggactgctttgtggcccagctgatggtgcggctgggcctgcaggcatttctcactcacctgctgccccatgtcctgcaggtgctggcgggcgcagaggcctcccaggaggagagcaaggacctggcaggggctgctgaggaggaggagagcgggctgcccggggccgggcctggctcctgtgcttttggggaggagattcccatggatggggagcctcctgcctcctcgggcctggggctcccagactacacgtctggcgtcagcttccacgaccaggctgacctccctgagacagaggacttccaagccgggctctatgtgactgagtctccccagccccaggaggctgaggctgtgagcctgggccggctgagtgacaagagcagcaccagcgagacctccctgggtgaggagcgggctccagacgaggggggtgcccccgtggacaagagcagccttcgatcaggtgacagcagccaggacttgaagcaaagcgagggctccgaggaggaagaggaggaggaggacagctgcgtggtgctagaggaggaggagggggagcaggaggaggtcaccggggcatctgagctcactctgtctgacacggtgctgtccatggagacggttgtggccggcggcagtgggggagatggagaagaagaggaggaggcactgcctgagcagtcagaaggcaaagaacagaagatcctccttgatacagcctgcaagatggtccgctggctgtctgccaagctcggccccacagtggcctctcgccacgtggcccggaacctgctccgcctgctgacgtcttgttatgttggacccactcggcagcagttcacagtgagcagtggcgagagcccaccgctgagcgccggcaacatctaccagaagaggccggtcctgggcgacatcgtgtcagggcctgtgctcagctgcctcctccacatcgcccgcctgtatggggagcctgtcctcacctaccagtacctgccctacatcagctacctggtggccccagggagtgcctcaggccccagccgactgaacagccgtaaggaggcggggctgctggccgcggtgacgctgactcagaagatcatcgtgtacctctcagacaccacactcatggacatcctgccccggatcagccatgaggtcctgctgcccgtgctcagcttcctcacctccctcgtcacggggttcccaagtggggcccaggctcggaccatcctgtgtgtgaaaaccatcagcctcatcgccctcatctgcctgcgcattggacaggagatggtccagcagcacctgagcgagcccgtggccacctttttccaggtcttctctcagctgcatgagcttcggcaacaggatctgaagctggaccctgcgggccgtggtgagggccagctgccacaggtggtcttctctgatgggcagcagcggcccgtggaccccgccctgctggacgagctgcagaaggtgttcaccctggagatggcatacacaatctacgtgcccttctcctgcctgttgggtgacatcatccggaaaatcatccccaaccacgagctggttggggagctggcggcgctgtacttggagagcatcagccccagcagtcgcaaccctgccagcgtggagcccaccatgcccggcaccgggcccgagtgggacccccatggtgggggctgccctcaggatgacggccactcagggacctttgggagcgtcctggtggggaaccgcattcagatccccaatgactctcggcctgagaaccccggaccactgggccccatctcgggggtgggtggcgggggcctgggcagcgggagcgacgacaacgccctgaagcaggagctgccgcggagcgtgcacgggctgagcggaaactggctggcgtactggcagtacgagatcggcgtgagccagcaggatgcccactttcacttccaccagatccgcctgcagagcttcccgggccactcgggggccgtcaagtgcgtggcacccctaagcagcgaggacttcttcctgagcggcagcaaggatcgtaccgtgcgcctctggccgctgtacaactacggcgacgggaccagcgagacggccccacgcctcgtctacacccagcaccgcaagagcgtcttcttcgtgggccagcttgaggccccgcagcacgtggtgagctgtgacggggctgtgcacgtctgggaccccttcacagggaagacccttcgcacagtggagccgctggacagccgggtgcccctgactgcggtggctgtcatgcccgccccccacaccagcatcaccatggccagctctgactctaccctgcgctttgtggactgcaggaagcctggtctgcagcacgagttccgactgggcggtgggctgaaccctgggcttgtccgtgccctggccatcagccccagtggccgtagtgtcgtggccggcttctcctcaggcttcatggtgctcctggacacccgcacaggcctggttctgcgaggctggccagcccacgagggggacattctgcagatcaaggcggtggagggcagcgtcctggtcagctcctcctctgaccattccttgaccgtctggaaggagctggagcagaagcccacccatcactacaagtcagcatccgaccccatccacacctttgacctgtacggcagcgaggtggtcactggcaccgtgtccaacaagattggcgtctgctccctgcttgagccaccctcgcaggccaccacgaagctcagctctgagaacttccgcggcacgctcaccagcctggccttgctgcccactaaacgccacctcctgctgggctcagacaacggggttatccgcctcctggcatagactgaggcaggagctggccgggcaagggtgggaagacatctgcgggcgcgtgtccactcaccctgttccctgagcagcagctccctccagggaggccctgggtcccacgccctgggtgcccacatggcctgccaactagggcctgcaaatggagtgggggagtcctggcccctgaatcaccagagccaccaagcctgccagaggggtctcattcatggcttggggacacagggctcctagcaagcaggaagttaagagcaggaggaagcgttgctaccttcacttctccccagctctgccctctgggtccacatgaggacagggaagctcgggaaggggaagggagactggccctgcccagccggtctctagcccctcagcccccgctgggcactctctgtcccatccctctaggacagggaagctggcctggtccagggcactgatggtgcttggattccagcctaaggaaggctggccgtggtccaggagttaagggcttgggtctggggtttaagtggccacccatccaggccctggccagtgtgggaccgggacgggaaggaagaaggaggctaggagcagggggaaaaggtgcacttggccagtggcgcctgccaggagtgagtccatgcgttgtctgcccacccctaccacagtgtttgtgccttcagctgagggggcagcctctgggccctgaacccctgctggggctccacgaccctgagagaaggggtgagaagaatcatctctgcacctcgggtctctgccagaggaagacttaagcatccctgcgacctcacattctagacagagatgaggtccaggggttggcccctgctgccttctcacaatttgcaatagatgtaaataggaccaataaatcctttggaagagccatggggtgaactgag

SEQ ID NO: 25801 - protein, 1010 aa, Homo sapiens
MSEEHTAVYTAWYLFEPVAKALGPKNANKYLLKPLIGAYESPCQLHGRFYLYTDCFVAQLMVRLGLQAFLTHLLPHVLQVLAGAEASQEESKDLAGAAEEEESGLPGAGPGSCAFGEEIPMDGEPPASSGLGLPDYTSGVSFHDQADLPETEDFQAGLYVTESPQPQEAEAVSLGRLSDKSSTSETSLGEERAPDEGGAPVDKSSLRSGDSSQDLKQSEGSEEEEEEEDSCVVLEEEEGEQEEVTGASELTLSDTVLSMETVVAGGSGGDGEEEEEALPEQSEGKEQKILLDTACKMVRWLSAKLGPTVASRHVARNLLRLLTSCYVGPTRQQFTVSSGESPPLSAGNIYQKRPVLGDIVSGPVLSCLLHIARLYGEPVLTYQYLPYISYLVAPGSASGPSRLNSRKEAGLLAAVTLTQKIIVYLSDTTLMDILPRISHEVLLPVLSFLTSLVTGFPSGAQARTILCVKTISLIALICLRIGQEMVQQHLSEPVATFFQVFSQLHELRQQDLKLDPAGRGEGQLPQVVFSDGQQRPVDPALLDELQKVFTLEMAYTIYVPFSCLLGDIIRKIIPNHELVGELAALYLESISPSSRNPASVEPTMPGTGPEWDPHGGGCPQDDGHSGTFGSVLVGNRIQIPNDSRPENPGPLGPISGVGGGGLGSGSDDNALKQELPRSVHGLSGNWLAYWQYEIGVSQQDAHFHFHQIRLQSFPGHSGAVKCVAPLSSEDFFLSGSKDRTVRLWPLYNYGDGTSETAPRLVYTQHRKSVFFVGQLEAPQHVVSCDGAVHVWDPFTGKTLRTVEPLDSRVPLTAVAVMPAPHTSITMASSDSTLRFVDCRKPGLQHEFRLGGGLNPGLVRALAISPSGRSVVAGFSSGFMVLLDTRTGLVLRGWPAHEGDILQIKAVEGSVLVSSSSDHSLTVWKELEQKPTHHYKSASDPIHTFDLYGSEVVTGTVSNKIGVCSLLEPPSQATTKLSSENFRGTLTSLALLPTKRHLLLGSDNGVIRLLA

SEQ ID NO: 25802 - DNA, 4447 bp, Homo sapiens
ccttcccaccctacttcccggcactgcacagattcatcctcctgtaccaggcaaggcgtgtggaggacgaggcccaggggcgcgagctggtgtttgctctgtggcagcagctgggcgcggtgctgaaggacatcacccctgagggcctggagatcctgctgcccttcgtgctctcactcatgtccgaggagcacacagctgtgtacacggcctggtatctgtttgagcctgttgccaaggcactgggccccaaaaatgccaataagtacctcctgaagccgctcattggtgcctacgagagcccctgccagctacacggccgcttctacctgtacacggactgctttgtggcccagctgatggtgcggctgggcctgcaggcatttctcactcacctgctgccccatgtcctgcaggtgctggcgggcgcagaggcctcccaggaggagagcaaggacctggcaggggctgctgaggaggaggagagcgggctgcccggggccgggcctggctcctgtgcttttggggaggagattcccatggatggggagcctcctgcctcctcgggcctggggctcccagactacacgtctggcgtcagcttccacgaccaggctgacctccctgagacagaggacttccaagccgggctctatgtgactgagtctccccagccccaggaggctgaggctgtgagcctgggccggctgagtgacaagagcagcaccagcgagacctccctgggtgaggagcgggctccagacgaggggggtgcccccgtggacaagagcagccttcgatcaggtgacagcagccaggacttgaagcaaagcgagggctccgaggaggaagaggaggaggaggacagctgcgtggtgctagaggaggaggagggggagcaggaggaggtcaccggggcatctgagctcactctgtctgacacggtgctgtccatggagacggttgtggccggcggcagtgggggagatggagaagaagaggaggaggcactgcctgagcagtcagaaggcaaagaacagaagatcctccttgatacagcctgcaagatggtccgctggctgtctgccaagctcggccccacagtggcctctcgccacgtggcccggaacctgctccgcctgctgacgtcttgttatgttggacccactcggcagcagttcacagtgagcagtggcgagagcccaccgctgagcgccggcaacatctaccagaagaggccggtcctgggcgacatcgtgtcagggcctgtgctcagctgcctcctccacatcgcccgcctgtatggggagcctgtcctcacctaccagtacctgccctacatcagctacctggtggccccagggagtgcctcaggccccagccgactgaacagccgtaaggaggcggggctgctggccgcggtgacgctgactcagaagatcatcgtgtacctctcagacaccacactcatggacatcctgccccggatcagccatgaggtcctgctgcccgtgctcagcttcctcacctccctcgtcacggggttcccaagtggggcccaggctcggaccatcctgtgtgtgaaaaccatcagcctcatcgccctcatctgcctgcgcattggacaggagatggtccagcagcacctgagcgagcccgtggccacctttttccaggtcttctctcagctgcatgagcttcggcaacaggatctgaagctggaccctgcgggccgtggtgagggccagctgccacaggtggtcttctctgatgggcagcagcggcccgtggaccccgccctgctggacgagctgcagaaggtgttcaccctggagatggcatacacaatctacgtgcccttctcctgcctgttgggtgacatcatccggaaaatcatccccaaccacgagctggttggggagctggcggcgctgtacttggagagcatcagccccagcagtcgcaaccctgccagcgtggagcccaccatgcccggcaccgggcccgagtgggacccccatggtgggggctgccctcaggatgacggccactcagggacctttgggagcgtcctggtggggaaccgcattcagatccccaatgactctcggcctgagaaccccggaccactgggccccatctcgggggtgggtggcgggggcctgggcagcgggagcgacgacaacgccctgaagcaggagctgccgcggagcgtgcacgggctgagcggaaactggctggcgtactggcagtacgagatcggcgtgagccagcaggatgcccactttcacttccaccagatccgcctgcagagcttcccgggccactcgggggccgtcaagtgcgtggcacccctaagcagcgaggacttcttcctgagcggcagcaaggatcgtaccgtgcgcctctggccgctgtacaactacggcgacgggaccagcgagacggccccacgcctcgtctacacccagcaccgcaagagcgtcttcttcgtgggccagcttgaggccccgcagcacgtggtgagctgtgacggggctgtgcacgtctgggaccccttcacagggaagacccttcgcacagtggagccgctggacagccgggtgcccctgactgcggtggctgtcatgcccgccccccacaccagcatcaccatggccagctctgactctaccctgcgctttgtggactgcaggaagcctggtctgcaggtcaggggggtccagttccctgagcactcgcctggttctctggggacctggcaaggaggagagactccccaaaaacagaaagccaggatgttgttctggggccctagttagtttctctttggtgctagatcacccacagccacacatcctgcggggcaggactctggcctgtgatgggggtggggttctgggcttttcatgccccctgatgagggtcagaggctcaggccttcctgctgtgtgggcttgggtggtgggcagggccttggggagtgtgagatgggaaggtggtgcctcagctcagccgccctctccctgcagcacgagttccgactgggcggtgggctgaaccctgggcttgtccgtgccctggccatcagccccagtggccgtagtgtcgtggccggcttctcctcaggcttcatggtgctcctggacacccgcacaggcctggttctgcgaggctggccagcccacgagggggacattctgcagatcaaggcggtggagggcagcgtcctggtcagctcctcctctgaccattccttgaccgtctggaaggagctggagcagaagcccacccatcactacaagtcagcatccgaccccatccacacctttgacctgtacggcagcgaggtggtcactggcaccgtgtccaacaagattggcgtctgctccctgcttgagccaccctcgcaggccaccacgaagctcagctctgagaacttccgcggcacgctcaccagcctggccttgctgcccactaaacgccacctcctgctgggctcagacaacggggttatccgcctcctggcatagactgaggcaggagctggccgggcaagggtgggaagacatctgcgggcgcgtgtccactcaccctgttccctgagcagcagctccctccagggaggccctgggtcccacgccctgggtgcccacatggcctgccaactagggcctgcaaatggagtgggggagtcctggcccctgaatcaccagagccaccaagcctgccagaggggtctcattcatggcttggggacacagggctcctagcaagcaggaagttaagagcaggaggaagcgttgctaccttcacttctccccagctctgccctctgggtccacatgaggacagggaagctcgggaaggggaagggagactggccctgcccagccggtctctagcccctcagcccccgctgggcactctctgtcccatccctctaggacagggaagctggcctggtccagggcactgatggtgcttggattccagcctaaggaaggctggccgtggtccaggagttaagggcttgggtctggggtttaagtggccacccatccaggccctggccagtgtgggaccgggacgggaaggaagaaggaggctaggagcagggggaaaaggtgcacttggccagtggcgcctgccaggagtgagtccatgcgttgtctgcccacccctaccacagtgtttgtgccttcagctgagggggcagcctctgggccctgaacccctgctggggctccacgaccctgagagaaggggtgagaagaatcatctctgcacctcgggtctctgccagaggaagacttaagcatccctgcgacctcacattctagacagagatgaggtccaggggttggcccctgctgccttctcacaatttgcaatagatgtaaataggaccaataaatcctttggaagagccatggggtgaactgag

SEQ ID NO: 25803 - protein, 880 aa, Homo sapiens
MSEEHTAVYTAWYLFEPVAKALGPKNANKYLLKPLIGAYESPCQLHGRFYLYTDCFVAQLMVRLGLQAFLTHLLPHVLQVLAGAEASQEESKDLAGAAEEEESGLPGAGPGSCAFGEEIPMDGEPPASSGLGLPDYTSGVSFHDQADLPETEDFQAGLYVTESPQPQEAEAVSLGRLSDKSSTSETSLGEERAPDEGGAPVDKSSLRSGDSSQDLKQSEGSEEEEEEEDSCVVLEEEEGEQEEVTGASELTLSDTVLSMETVVAGGSGGDGEEEEEALPEQSEGKEQKILLDTACKMVRWLSAKLGPTVASRHVARNLLRLLTSCYVGPTRQQFTVSSGESPPLSAGNIYQKRPVLGDIVSGPVLSCLLHIARLYGEPVLTYQYLPYISYLVAPGSASGPSRLNSRKEAGLLAAVTLTQKIIVYLSDTTLMDILPRISHEVLLPVLSFLTSLVTGFPSGAQARTILCVKTISLIALICLRIGQEMVQQHLSEPVATFFQVFSQLHELRQQDLKLDPAGRGEGQLPQVVFSDGQQRPVDPALLDELQKVFTLEMAYTIYVPFSCLLGDIIRKIIPNHELVGELAALYLESISPSSRNPASVEPTMPGTGPEWDPHGGGCPQDDGHSGTFGSVLVGNRIQIPNDSRPENPGPLGPISGVGGGGLGSGSDDNALKQELPRSVHGLSGNWLAYWQYEIGVSQQDAHFHFHQIRLQSFPGHSGAVKCVAPLSSEDFFLSGSKDRTVRLWPLYNYGDGTSETAPRLVYTQHRKSVFFVGQLEAPQHVVSCDGAVHVWDPFTGKTLRTVEPLDSRVPLTAVAVMPAPHTSITMASSDSTLRFVDCRKPGLQVRGVQFPEHSPGSLGTWQGGETPQKQKARMLFWGPS

SEQ ID NO: 25804 - DNA, 454 bp, Homo sapiens
gtacctctcagacaccacactcatggacatcctgccccggatcagccatgaggtcctgctgcccgtgctcagcttcctcacctccctcgtcacggggttcccaagtggggcccaggctcggaccatcctgtgtgtgaaaaccatcagcctcatcgccctcatctgcctgcgcattggacaggagatggtccagcagcacctgagcgagcccgtggccacctttttccaggtcttctctcagctgcatgagcttcggcaacaggatctgaagctggactccggccgtggtgagggccagctgccacaggtggtctctgccagaggaagacttaagcatccctgcgacctcacattctagacagagatgaggtccaggggttggcccctgctgccttctcacaatttgcaatagatgtaaataggaccaataaatcctttggaagagccatggggt

SEQ ID NO: 25805 - protein, 111 aa, Homo sapiens
MDILPRISHEVLLPVLSFLTSLVTGFPSGAQARTILCVKTISLIALICLRIGQEMVQQHLSEPVATFFQVFSQLHELRQQDLKLDSGRGEGQLPQVVSARGRLKHPCDLTF

SEQ ID NO: 25806 - DNA, 2289 bp, Homo sapiens
cctgggcagagagtgaggagcacccaagtggggccagaggaacgttgtgtgtggcagcaaggagcccgcagaggaacatggcgctgctctgggggctcctggtgctcagctggtcctgcctgcaaggcccctgctccgtgttctcccctgtgagcgccatggagcccttgggccggcagctaactagcgggccgaaccaggagcaggtgtccccacttaccctcctcaagttgggcaaccaggagcctggtggccagactgccctgaagagtcccccaggagtctgcagcagagaccccaccccagagcagacccacaggctggcccgggccatgatggccttcactgccgacctgttctccctggtggctcaaacgtccacctgccccaacctcatcctgtcacccctgagtgtggccctggcgctgtctcacctggcactaggtgctcagaaccacacgttgcagaggctgcaacaggtgctgcacgcaggctcagggccctgcctcccccatctgctgagccgcctctgccaggacctgggccccggcgcgttccgactggctgccaggatgtacctgcagaaaggatttcccatcaaagaagatttcctggaacaatccgaacagctatttggggcaaagcccgtgagcctgacgggaaagcaggaagatgacctggcaaacatcaaccaatgggtgaaggaggccacggaggggaagattcaggaattcctctctgggctgccggaagacaccgtgttgcttctcctcaacgccatccacttccagggtttctggaggaacaagtttgacccgagccttacccagagagactccttccacctggacgagcagttcacggtgcccgtggaaatgatgcaggcccgcacgtacccgctgcgctggttcttgctggagcagcctgagatccaggtggctcatttcccctttaagaacaacatgagctttgtggtccttgtacccacccactttgaatggaacgtgtcccaggtactggccaacctgagttgggacaccctgcacccacctctggtgtgggagaggcccaccaaggtccggctgcctaagctgtatctgaaacaccaaatggacctggtggccaccctcagccagctgggcctgcaggagttgttccaggccccagacctgcgtgggatctccgagcagagcctggtggtgtccggcgtgcagcatcagtccaccctggagctcagcgaggtcggcgtggaggcggcggcggccaccagcattgccatgtcccgcatgtccctgtcctccttcagcgtgaaccgccccttcctcttcttcatcttcgaggacaccacaggccttcccctcttcgtgggcagcgtgaggaaccccaaccccagtgcaccgcgggagctcaaggaacagcaggattccccgggcaacaaggacttcctccagagcctgaaaggcttcccccgcggagacaagcttttcggccctgacttaaaacttgtgccccccatggaggaggattacccccagtttggcagccccaagtgaggggccgtggctgtggcatccagagtccctgcctggaccagcctctccactcatgtgactctttccaaccggctttgtggcactggggcaggggccgggggcagtctgagagaggccattctttcccaacacctcttggggagtttagggtggggggggggcgcggctgggaggagggcaggcatcggggagccgggagcctgaccctcatctttcttccaaacaggctcagagggtgtcctgcaccggggcctgggcaggagggaggtgcttctagttctgccaggagacaggttagctgctccccacgtcagctgggacaccccgacttttgtttaccagagaaaaagggagggggagagggctgcctttggacttgtcccgggacacctaggctagggtggggagagacgggccctggtggtggctcgggaggcgaagcgttgtcctcagccccgcgtggaactcgtgtctggcacagcctggctgtggcctaacctgccgagagtccatcagcctccatcctaccccctgtgccttgtcacgccagacttcccacggctcctcgagatcccaacactgccagcatttcccttccttcctctcctgtctccctcctctgcccgggagctcaggaaccgaggcagggaaggatcccatgagctccttaaggctcttttgtaaggtttttgtagtgatttttatgccacctgaataaagaatgaatgggcctggc

SEQ ID NO: 25807 - protein, 491 aa, Homo sapiens
MALLWGLLVLSWSCLQGPCSVFSPVSAMEPLGRQLTSGPNQEQVSPLTLLKLGNQEPGGQTALKSPPGVCSRDPTPEQTHRLARAMMAFTADLFSLVAQTSTCPNLILSPLSVALALSHLALGAQNHTLQRLQQVLHAGSGPCLPHLLSRLCQDLGPGAFRLAARMYLQKGFPIKEDFLEQSEQLFGAKPVSLTGKQEDDLANINQWVKEATEGKIQEFLSGLPEDTVLLLLNAIHFQGFWRNKFDPSLTQRDSFHLDEQFTVPVEMMQARTYPLRWFLLEQPEIQVAHFPFKNNMSFVVLVPTHFEWNVSQVLANLSWDTLHPPLVWERPTKVRLPKLYLKHQMDLVATLSQLGLQELFQAPDLRGISEQSLVVSGVQHQSTLELSEVGVEAAAATSIAMSRMSLSSFSVNRPFLFFIFEDTTGLPLFVGSVRNPNPSAPRELKEQQDSPGNKDFLQSLKGFPRGDKLFGPDLKLVPPMEEDYPQFGSPK

SEQ ID NO: 25808 - DNA, 1906 bp, Homo sapiens
ccagaggaacgttgtgtgtggcagcaaggagcccgcagaggaacatggcgctgctctgggggctcctggtgctcagctggtcctgcctgcaaggcccctgctccgtgttctcccctgtgagcgccatggagcccttgggccggcagctaactagcgggccgaaccaggagcaggtgtccccacttaccctcctcaagttgggcaaccaggagcctggtggccagactgccctgaagagtcccccaggagtctgcagcagagaccccaccccagagcagacccacaggctggcccgggccatgatggccttcactgccgacctgttctccctggtggctcaaacgtccacctgccccaacctcatcctgtcacccctgagtgtggccctggcgctgtctcacctggcactaggtttctggaggaacaagtttgacccgagccttacccagagagactccttccacctggacgagcagttcacggtgcccgtggaaatgatgcaggcccgcacgtacccgctgcgctggttcttgctggagcagcctgagatccaggtggctcatttcccctttaagaacaacatgagctttgtggtccttgtacccacccactttgaatggaacgtgtcccaggtactggccaacctgagttgggacaccctgcacccacctctggtgtgggagaggcccaccaaggtccggctgcctaagctgtatctgaaacaccaaatggacctggtggccaccctcagccagctgggcctgcaggagttgttccaggccccagacctgcgtgggatctccgagcagagcctggtggtgtccggcgtgcagcatcagtccaccctggagctcagcgaggtcggcgtggaggcggcggcggccaccagcattgccatgtcccgcatgtccctgtcctccttcagcgtgaaccgccccttcctcttcttcatcttcgaggacaccacaggccttcccctcttcgtgggcagcgtgaggaaccccaaccccagtgcaccgcgggagctcaaggaacagcaggattccccgggcaacaaggacttcctccagagcctgaaaggcttcccccgcggagacaagcttttcggccctgacttaaaacttgtgccccccatggaggaggattacccccagtttggcagccccaagtgaggggccgtggctgtggcatccagagtccctgcctggaccagcctctccactcatgtgactctttccaaccggctttgtggcactggggcaggggccgggggcagtctgagagaggccattctttcccaacacctcttggggagtttagggtggggggggggcgcggctgggaggagggcaggcatcggggagccgggagcctgaccctcatctttcttccaaacaggctcagagggtgtcctgcaccggggcctgggcaggagggaggtgcttctagttctgccaggagacaggttagctgctccccacgtcagctgggacaccccgacttttgtttaccagagaaaaagggagggggagagggctgcctttggacttgtcccgggacacctaggctagggtggggagagacgggccctggtggtggctcgggaggcgaagcgttgtcctcagccccgcgtggaactcgtgtctggcacagcctggctgtggcctaacctgccgagagtccatcagcctccatcctaccccctgtgccttgtcacgccagacttcccacggctcctcgagatcccaacactgccagcatttcccttccttcctctcctgtctccctcctctgcccgggagctcaggaaccgaggcagggaaggatcccatgagctccttaaggctcttttgtaaggtttttgtagtgatttttatgccacctgaataaagaatgaatgggcctg

SEQ ID NO: 25809 - protein, 375 aa, Homo sapiens
MALLWGLLVLSWSCLQGPCSVFSPVSAMEPLGRQLTSGPNQEQVSPLTLLKLGNQEPGGQTALKSPPGVCSRDPTPEQTHRLARAMMAFTADLFSLVAQTSTCPNLILSPLSVALALSHLALGFWRNKFDPSLTQRDSFHLDEQFTVPVEMMQARTYPLRWFLLEQPEIQVAHFPFKNNMSFVVLVPTHFEWNVSQVLANLSWDTLHPPLVWERPTKVRLPKLYLKHQMDLVATLSQLGLQELFQAPDLRGISEQSLVVSGVQHQSTLELSEVGVEAAAATSIAMSRMSLSSFSVNRPFLFFIFEDTTGLPLFVGSVRNPNPSAPRELKEQQDSPGNKDFLQSLKGFPRGDKLFGPDLKLVPPMEEDYPQFGSPK

SEQ ID NO: 25810 - DNA, 2267 bp, Homo sapiens
gggacttgaaaaactggagcctgttcttggcaagaagattctaatgcccaggaacatggcgctgctctgggggctcctggtgctcagctggtcctgcctgcaaggcccctgctccgtgttctcccctgtgagcgccatggagcccttgggccggcagctaactagcgggccgaaccaggagcaggtgtccccacttaccctcctcaagttgggcaaccaggagcctggtggccagactgccctgaagagtcccccaggagtctgcagcagagaccccaccccagagcagacccacaggctggcccgggccatgatggccttcactgccgacctgttctccctggtggctcaaacgtccacctgccccaacctcatcctgtcacccctgagtgtggccctggcgctgtctcacctggcactaggtgctcagaaccacacgttgcagaggctgcaacaggtgctgcacgcaggctcagggccctgcctcccccatctgctgagccgcctctgccaggacctgggccccggcgcgttccgactggctgccaggatgtacctgcagaaaggatttcccatcaaagaagatttcctggaacaatccgaacagctatttggggcaaagcccgtgagcctgacgggaaagcaggaagatgacctggcaaacatcaaccaatgggtgaaggaggccacggaggggaagattcaggaattcctctctgggctgccggaagacaccgtgttgcttctcctcaacgccatccacttccagggtttctggaggaacaagtttgacccgagccttacccagagagactccttccacctggacgagcagttcacggtgcccgtggaaatgatgcaggcccgcacgtacccgctgcgctggttcttgctggagcagcctgagatccaggtggctcatttcccctttaagaacaacatgagctttgtggtccttgtacccacccactttgaatggaacgtgtcccaggtactggccaacctgagttgggacaccctgcacccacctctggtgtgggagaggcccaccaaggtccggctgcctaagctgtatctgaaacaccaaatggacctggtggccaccctcagccagctgggcctgcaggagttgttccaggccccagacctgcgtgggatctccgagcagagcctggtggtgtccggcgtgcagcatcagtccaccctggagctcagcgaggtcggcgtggaggcggcggcggccaccagcattgccatgtcccgcatgtccctgtcctccttcagcgtgaaccgccccttcctcttcttcatcttcgaggacaccacaggccttcccctcttcgtgggcagcgtgaggaaccccaaccccagtgcaccgcgggagctcaaggaacagcaggattccccgggcaacaaggacttcctccagagcctgaaaggcttcccccgcggagacaagcttttcggccctgacttaaaacttgtgccccccatggaggaggattacccccagtttggcagccccaagtgaggggccgtggctgtggcatccagagtccctgcctggaccagcctctccactcatgtgactctttccaaccggctttgtggcactggggcaggggccgggggcagtctgagagaggccattctttcccaacacctcttggggagtttagggtggggggggggcgcggctgggaggagggcaggcatcggggagccgggagcctgaccctcatctttcttccaaacaggctcagagggtgtcctgcaccggggcctgggcaggagggaggtgcttctagttctgccaggagacaggttagctgctccccacgtcagctgggacaccccgacttttgtttaccagagaaaaagggagggggagagggctgcctttggacttgtcccgggacacctaggctagggtggggagagacgggccctggtggtggctcgggaggcgaagcgttgtcctcagccccgcgtggaactcgtgtctggcacagcctggctgtggcctaacctgccgagagtccatcagcctccatcctaccccctgtgccttgtcacgccagacttcccacggctcctcgagatcccaacactgccagcatttcccttccttcctctcctgtctccctcctctgcccgggagctcaggaaccgaggcagggaaggatcccatgagctccttaaggctcttttgtaaggtttttgtagtgatttttatgccacctgaataaagaatgaatgggcctggc

SEQ ID NO: 25811 - protein, 495 aa, Homo sapiens
MPRNMALLWGLLVLSWSCLQGPCSVFSPVSAMEPLGRQLTSGPNQEQVSPLTLLKLGNQEPGGQTALKSPPGVCSRDPTPEQTHRLARAMMAFTADLFSLVAQTSTCPNLILSPLSVALALSHLALGAQNHTLQRLQQVLHAGSGPCLPHLLSRLCQDLGPGAFRLAARMYLQKGFPIKEDFLEQSEQLFGAKPVSLTGKQEDDLANINQWVKEATEGKIQEFLSGLPEDTVLLLLNAIHFQGFWRNKFDPSLTQRDSFHLDEQFTVPVEMMQARTYPLRWFLLEQPEIQVAHFPFKNNMSFVVLVPTHFEWNVSQVLANLSWDTLHPPLVWERPTKVRLPKLYLKHQMDLVATLSQLGLQELFQAPDLRGISEQSLVVSGVQHQSTLELSEVGVEAAAATSIAMSRMSLSSFSVNRPFLFFIFEDTTGLPLFVGSVRNPNPSAPRELKEQQDSPGNKDFLQSLKGFPRGDKLFGPDLKLVPPMEEDYPQFGSPK

SEQ ID NO: 25812 - DNA, 1860 bp, Homo sapiens
aggctggtctcaaactcatgacctcaggtgatccaccctctttggcctcccaaagtgctaggattacagacgtgagccaccatgcccggcctttatttttatttttgagacaaggtcttagttcttttgctgaggctggagtgcagtggcacaattatggctcactgcagcctcagccacctggggtcaagagggcctcccacctcaacctccccagtagcatgcaccacacctggctaatttttgtattttttgtagggacggagtttcaatgtgttgcacaggctggtgtcggactcccgggctcaagcaatccacccacttcagcttcccaacgtgctgggattacaggcatgagccactccacccagcatttctttaacagtgtgacaccccagcttctcctccttccccttccagggaagccagcgaggctcacatgccatcccaggctctctacccagactctccttgcaatgcgaggtcttgggcagcaaagcagagccccattccccgggccaccccaacttcctctaggacagagggtctgggggctcatattcaaccctctccccgctcccgaagccctggaaaagagcaggacacaggacagctctgactcagctccactgccagccagacgcttcctccttacccgccctgcccagcctgacctcgggggctcgcccgcaccctcctccttacccagctggctgagggtggccaccaggtccatttggtgtttcagatacagcttaggcagccggaccttggtgggcctctcccacaccagaggtgggtgcagggtgtcccaactcaggttggccagtacctgggacacgttccattcaaagtgggtgggtacaaggaccacaaagctcatgttgttcttaaaggggaaatgagccacctacagaaaagggaagggaagagcatgaggacagaaagccccgaagctaagtgggggtggggccagcaggtgctcctaaggcagacaatggggctcctggccatcctgccaggcgtgtgactgaccccactgctcctccacttcctcacagtggggtggagtcatactacctgtcccactgcaggcggacacgtaaccgaatgagatgcttttaaagtttctagcagtgtggccgggcatgggggctcacgcctgtaatcctagcactttgggattctgcagcaaaagcagtgtggacaccacagggctcgagggcctcctgcagctgtgactccttgggttccaggcagagtacccgtgtggagaacccctgcccgtgggaggataagccccgggttctggctgtttgggcctgtctgcagagggcctgaggacaagaaaggctgacggggcctaaggaaaggagacgaaggatgaaggaagagtacgcaggacacagcctggaggaaaggggaagcaggaaaggggagcctcggggaggtggatcagactggcctttcagaatgagctgcagggaagccaggacgcgttcccgggccagcctcacccacagccccctcccaggagggctgcccaagtggcttctggctcctccctgcagaagtggctgtgctctgtgtcacacttgccttgggaagctaacaaatacagccatctcagccacagctgtctggcccggggatcaatacccaggccaaggggaccacatttaggctagaagcaagagaggccacacctgagacagcctggcacggaattttatccaatcagagctgggcgcagtggctcctgcctataatcccagcactttgggaggccaaggcgggcggatcacttgaggtcaggagtttgagatcagcctggccaacatggtgaaacctgtctctact

SEQ ID NO: 25813 - protein, 41 aa, Homo sapiens
MLLKFLAVWPGMGAHACNPSTLGFCSKSSVDTTGLEGLLQL

SEQ ID NO: 25814 - DNA, 1393 bp, Homo sapiens
gggctttctgtcctcatgctcttcccttcccttttctgtaggtggctcatttcccctttaagaacaacatgagctttgtggtccttgtacccacccactttgaatggaacgtgtcccaggtactggccaacctgagttgggacaccctgcacccacctctggtgtgggagaggcccaccaaggtccggctgcctaagctgtatctgaaacaccaaatggacctggtggccaccctcagccagctgggcctgcaggagttgttccaggccccagacctgcgtgggatctccgagcagagcctggtggtgtccggcgtgcagcatcagtccaccctggagctcagcgaggtcggcgtggaggcggcggcggccaccagcattgccatgtcccgcatgtccctgtcctccttcagcgtgaaccgccccttcctcttcttcatcttcgaggacaccacaggccttcccctcttcgtgggcagcgtgaggaaccccaaccccagtgcaccgcgggagctcaaggaacagcaggattccccgggcaacaaggacttcctccagagcctgaaaggcttcccccgcggagacaagcttttcggccctgacttaaaacttgtgccccccatggaggaggattacccccagtttggcagccccaagtgaggggccgtggctgtggcatccagagtccctgcctggaccagcctctccactcatgtgactctttccaaccggctttgtggcactggggcaggggccgggggcagtctgagagaggccattctttcccaacacctcttggggagtttagggtggggggggggcgcggctgggaggagggcaggcatcggggagccgggagcctgaccctcatctttcttccaaacaggctcagagggtgtcctgcaccggggcctgggcaggagggaggtgcttctagttctgccaggagacaggttagctgctccccacgtcagctgggacaccccgacttttgtttaccagagaaaaagggagggggagagggctgcctttggacttgtcccgggacacctaggctagggtggggagagacgggccctggtggtggctcgggaggcgaagcgttgtcctcagccccgcgtggaactcgtgtctggcacagcctggctgtggcctaacctgccgagagtccatcagcctccatcctaccccctgtgccttgtcacgccagacttcccacggctcctcgagatcccaacactgccagcatttcccttccttcctctcctgtctccctcctctgcccgggagctcaggaaccgaggcagggaaggatcccatgagctccttaaggctcttttgtaaggtttttgtagtgatttttatgccacctgaataaagaatgaatgggcctg

SEQ ID NO: 25815 - protein, 196 aa, Homo sapiens [sequence omitted]

SEQ ID NO: 25816 - DNA, 754 bp, Homo sapiens
cttcttcatcttcgaggacaccacaggccttcccctcttcgtgggcagcgtgaggaaccccaaccccagtgcaccgcgggagctcaaggaacagcaggattccccgggcaacaaggacttcctccagagcctgaaaggcttcccccgcggagacaagcttttcggccctgacttaaaacttgtgccccccatggaggaggattacccccagtttggcagccccaagtgaggggccgtggctgtggcatccagagtccctgcctggaccagcctctccactcatgtgactctttccaaccggctttgtggcactggggcaggggccgggggcagtctgagagaggccattctttcccaacacctcttggggagtttagggtggggggggggcgcggctgggaggagggcaggcatcggggagccgggagcctgaccctcatctttcttccaaacaggctcagagggtgtcctgcaccggggcctgggcaggagggaggtgcttctagttctgccaggagacaggttagctgctccccacgtcagctgggacaccccgacttttgtttagccagacttcccacggctcctcgagatcccaacactgccagcatttcccttccttcctctcctgtctccctcctctgcccgggagctcaggaaccgaggcagggaaggatcccatgagctccttaaggctcttttgtaaggtttttgtagtgatttttatgccacctgaataaagaatgaatgggcc

SEQ ID NO: 25817 - protein, 170 aa, Homo sapiens
LKTCAPHGGGLPPVWQPQVRGRGCGIQSPCLDQPLHSCDSFQPALWHWGRGRGQSERGHSFPTPLGEFRVGGGRGWEEGRHRGAGSLTLIFLPNRLRGCPAPGPGQEGGASSSARRQVSCSPRQLGHPDFCLARLPTAPRDPNTASISLPSSPVSLLCPGAQEPRQGRIP

SEQ ID NO: 25818 - DNA, 1549 bp, Homo sapiens
aggtcgctttaagaaaggagtagctgtaatctgaagcctgctggacgctggattagaaggcagcaaaaaaagctctgtgctggctggagccccctcagtgtgcaggcttagagggactaggctgggtgtggagctgcagcgtatccacaggccccaggatgcaggccctggtgctactcctctgcattggagccctcctcgggcacagcagctgccagaaccctgccagccccccggaggagggctccccagaccccgacagcacaggggcgctggtggaggaggaggatcctttcttcaaagtccccgtgaacaagctggcagcggctgtctccaacttcggctatgacctgtaccgggtgcgatccagcacgagccccacgaccaacgtgctcctgtctcctctcagtgtggccacggccctctcggccctctcgctgggagcggagcagcgaacagaatccatcattcaccgggctctctactatgacttgatcagcagcccagacatccatggtacctataaggagctccttgacacggtcactgccccccagaagaacctcaagagtgcctcccggatcgtctttgagaagaagctgcgcataaaatccagctttgtggcacctctggaaaagtcatatgggaccaggcccagagtcctgacgggcaaccctcgcttggacctgcaagagatcaacaactgggtgcaggcgcagatgaaagggaagctcgccaggtccacaaaggaaattcccgatgagatcagcattctccttctcggtgtggcgcacttcaaggggcagtgggtaacaaagtttgactccagaaagacttccctcgaggatttctacttggatgaagagaggaccgtgagggtccccatgatgtcggaccctaaggctgttttacgctatggcttggattcagatctcagctgcaagattgcccagctgcccttgaccggaagcatgagtatcatcttcttcctgcccctgaaagtgacccagaatttgaccttgatagaggagagcctcacctccgagttcattcatgacatagaccgagaactgaagaccgtgcaggcggtcctcactgtccccaagctgaagctgagttatgaaggcgaagtcaccaagtccctgcaggagatgaagctgcaatccttgtttgattcaccagactttagcaagatcacaggcaaacccatcaagctgactcaggtggaacaccgggctggctttgagtggaacgaggatggggcgggaaccacccccagcccagggctgcagcctgcccacctcaccttcccgctggactatcaccttaaccagcctttcatcttcgtactgagggacacagacacaggggcccttctcttcattggcaagattctggaccccaggggcccctaatatcccagtttaatattccaataccctagaagaaaacccgagggacagcagattccacaggacacgaaggctgcccctgtaaggtttcaatgcatacaataaaagagctttatccctaacttctgttacttcgt

SEQ ID NO: 25819 - protein, 418 aa, Homo sapiens; identical to SEQ ID NO: 3431

SEQ ID NO: 25820 - DNA, 750 bp, Homo sapiens
ggtcgctttaagaaaggagtagctgtaatctgaagcctgctggacgctggattagaaggcagcaaaaaaagctctgtgctggctggagccccctcagtgtgcaggcttagagggactaggctgggtgtggagctgcagcgtatccacaggccccaggatgcaggccctggtgctactcctctgcattggagccctcctcgggcacagcagctgccagaaccctgccagccccccggaggagggctccccagaccccgacagcacaggggcgctggtggaggaggaggatcctttcttcaaagtccccgtgaacaagctggcagcggctgtctccaacttcggctatgacctgtaccgggtgcgatccagcacgagccccacgaccaacgtgctcctgtctcctctcagtgtggccacggccctctcggccctctcgctgggagcggagcagcgaacagaatccatcattcaccgggctctctactatgacttgatcagcagcccagacatccatggtacctataaggagctccttgacacggtcactgccccccagaagaacctcaagagtgcctcccggatcgtctttgagaagagtgagcccagagtcctgacgggcaaccctcgcttggacctgcaagagatcaacaactgggtgcaggcgcagatgaaagggaagctcgccaggtccacaaaggaaattcccgatgagatcagcattctccttctcggtgtggcgcacttcaaggg

SEQ ID NO: 25821 - protein, 196 aa, Homo sapiens
MQALVLLLCIGALLGHSSCQNPASPPEEGSPDPDSTGALVEEEDPFFKVPVNKLAAAVSNFGYDLYRVRSSTSPTTNVLLSPLSVATALSALSLGAEQRTESIIHRALYYDLISSPDIHGTYKELLDTVTAPQKNLKSASRIVFEKSEPRVLTGNPRLDLQEINNWVQAQMKGKLARSTKEIPDEISILLLGVAHF

SEQ ID NO: 25822 - DNA, 745 bp, Homo sapiens
gaagcctgctggacgctggattagaaggcagcaaaaaaagctctgtgctggctggagccccctcagtgtgcaggcttagagggactaggctgggtgtggagctgcagcgtatccacaggccccaggatgcaggccctggtgctactcctctgcattggagccctcctcgggcacagcagctgccagaaccctgccagccccccggaggagagagctcatgcgtgatcagggagtaaaactcattcccgttttaggccaaacacagaaaaattaggaaggacagccccaaggggccagaaccaccaccctacacaaagccgtgaggagacagtccctgtgcatctctgcgagtccctgaactcaaacccaagacttcctgtctcctgccagggctccccagaccccgacagcacaggggcgctggtggaggaggaggatcctttcttcaaagtccccgtgaacaagctggcagcggctgtctccaacttcggctatgacctgtaccgggtgcgatccagcacgagccccacgaccaacgtgctcctgtctcctctcagtgtggccacggccctctcggccctctcgctgggagcggagcagcgaacagaatccatcattcaccgggctctctactatgacttgatcagcagcccagacatccatggtacctataaggagctccttgacacggtcactgccccccagaagaacctcaagagtgcctcccggatcgtctttgagaaga

SEQ ID NO: 25823 - protein, 49 aa, Homo sapiens
MTCTGCDPARAPRPTCSCLLSVWPRPSRPSRWERSSEQNPSFTGLSTMT

SEQ ID NO: 25824 - DNA, 307 bp, Homo sapiens
tagaaggcagcaaaaaaagctctgtgctggctggagccccctcagtgtgcagcccagggctgcagcctgcccacctcaccttcccgctggactatcaccttaaccagcctttcatcttcgtactgagggacacagacacaggggcccttctcttcattggcaagattctggaccccaggggcccctaatatcccagtttaatattccaataccctagaagaaaacccgagggacagcagattccacaggacacgaaggctgcccctgtaaggtttcaatgcatacaataaaagagctttatccctaa

SEQ ID NO: 25825 - protein, 61 aa, Homo sapiens
EGSKKSSVLAGAPSVCSPGLQPAHLTFPLDYHLNQPFIFVLRDTDTGALLFIGKILDPRGP

SEQ ID NO: 25826 - DNA, 352 bp, Homo sapiens
tccccagaccccgacagcacaggggcgctggtggaggaggaggatcctttcttcaaagtccccgtgaacaagctggcagcggctgtctccaacttcggctatgacctgtaccgggtgcgatccagcacgagccccacgaccaacgtgctcctgtctcctctcagtgtggccacggccctctcggccctctcgctgggagcggagcagcgaacagaatccatcattcaccgggctctctactatgacttgatcagcagcccagacatccatggtacctataaggagctccttgacacggtcactgccccccagaagaacctcaagagtgcctcccggatcgtctttgagaaga

SEQ ID NO: 25827 - protein, 49 aa, Homo sapiens; identical to SEQ ID NO: 25823

SEQ ID NO: 25828 - DNA, 772 bp, Homo sapiens
agtggcgcgatgtggggaaatctgctgcccccctggccagtgcctggggatgccagcagaagtcctggcaagtcacaggaagatgctggctgggaagtcagggcctgctgagcgctaaaccagaacccgagcctggcaggctctcaaagacgggatgcttgtcgtcgagtctcatacgctaacctctgctccgcctcttctcagagctgcgcataaaatccagctttgtggcacctctggaaaagtcatatgggaccaggcccagagtcctgacgggcaaccctcgcttggacctgcaagagatcaacaactgggtgcaggcgcagatgaaagggaagctcgccaggtccacaaaggaaattcccgatgagatcagcattctccttctcggtgtggcgcacttcaaggggcagtgggtaacaaagtttgactccagaaagacttccctcgaggatttctacttggatgaagagaggaccgtgagggtccccatgatgtcggaccctaaggctgttttacgctatggcttggattcagatctcagctgcaagattgcccagctgcccttgaccggaagcatgagtatcatcttcttcctgcccctgaaagtgacccagaatttgaccttgatagaggagagcctcacctccgagttcattcatgacatagaccgagaactgaagaccgtgcaggcggtcctcactgtccccaagctgaagctgagttatgaaggcgaagtcaccaagtccctgcaggagatgagtatgtctga

SEQ ID NO: 25829 - protein, 147 aa, Homo sapiens
MKGKLARSTKEIPDEISILLLGVAHFKGQWVTKFDSRKTSLEDFYLDEERTVRVPMMSDPKAVLRYGLDSDLSCKIAQLPLTGSMSIIFFLPLKVTQNLTLIEESLTSEFIHDIDRELKTVQAVLTVPKLKLSYEGEVTKSLQEMSM

SEQ ID NO: 25830 - DNA, 674 bp, Homo sapiens
gagggaaggcagctcctggctgtgtctgtccccggcttttgggctctgaaggactaaccacatgctttctcacttgtctcagattgcccagctgcccttgaccggaagcatgagtatcatcttcttcctgcccctgaaagtgacccagaatttgaccttgatagaggagagcctcacctccgagttcattcatgacatagaccgagaactgaagaccgtgcaggcggtcctcactgtccccaagctgaagctgagttatgaaggcgaagtcaccaagtccctgcaggagatgaagctgcaatccttgtttgattcaccagactttagcaagatcacaggcaaacccatcaagctgactcaggtggaacaccgggctggctttgagtggaacgaggatggggcgggaaccacccccagcccagggctgcagcctgcccacctcaccttcccgctggactatcaccttaaccagcctttcatcttcgtactgagggacacagacacaggggcccttctcttcattggcaagattctggaccccaggggcccctaatatcccagtttaatattccaataccctagaagaaaacccgagggacagcagattccacaggacacgaaggctgcccctgtaaggtttcaatgcatacaataaaagagctttatccctaact

SEQ ID NO: 25831 - protein, 163 aa, Homo sapiens
MLSHLSQIAQLPLTGSMSIIFFLPLKVTQNLTLIEESLTSEFIHDIDRELKTVQAVLTVPKLKLSYEGEVTKSLQEMKLQSLFDSPDFSKITGKPIKLTQVEHRAGFEWNEDGAGTTPSPGLQPAHLTFPLDYHLNQPFIFVLRDTDTGALLFIGKILDPRGP

SEQ ID NO: 25832 - DNA, 333 bp, Homo sapiens
tccttgtttgattcaccagactttagcaagatcacaggcaaacccatcaagctgactcaggtggaacaccgggctggctttgagtggaacgaggatggggcgggaaccacccccagcccagggctgcagcctgcccacctcaccttcccgctggactatcaccttaaccagcctttcatcttcgtactgagggacacagacacaggggcccttctcttcattggcaagattctggaccccaggggcccctaatatcccagtttaatattccaataccctagaagaaaacccgagggacagcagattccacaggacacgaaggctgcccttaag

SEQ ID NO: 25833 - protein, 31 aa, Homo sapiens
MGREPPPAQGCSLPTSPSRWTITLTSLSSSY

SEQ ID NO: 25834 - DNA, 2393 bp, Homo sapiens
tattctcccaggagagctcctggtgcaggaggatgcttttgtgagtgttctcaacccaggagaactgccaccaccgcatcacggcctagacagcaaatgggacaccagagtcaccaatggggacctctattgtcaccgatgtttgaagcacactttggccacagttccgtgtgacggatgcagttatgccaagtattgcagccaggagtgtttgcagcaggcctgggagctctaccacaggacagaatgtcctctgggagggctgcttctcacactgggtgtcttttgccacattgccctgaggttgactcttttggtgggatttgaggatgttcgcaaaatcataacgaagctttgtgataagattagtaacaaggacatctgtttacctgaaagcaacaatcaggtcaagacacttaattatggcctaggggagatgttgaaatgggccatgagctcttcaaattggcccagatctttttcaacgggtttgcagtacccgaagccctgagcacaatacagaaagctgaggaggttctgtcgctgcactgtggcccatgggacgatgaaatccaggagctccagaagatgaaatcctgtttgttggacttaccacccacccctgtagggcctgcattgtagggttccaggaggattttgacccacagaaaaggagcccatggaacacaagttaaagaggttttgctggccaggtatggtggctcacgcctgtaatcccagcactttgggaggctaaggtgggcggatcacctgatgtcaggagttcaagaccagcctggccaacatggtgaaaccccatctttactaaaaatacaaaaaactagccaggcgtggtggtgggcacctgtaatcccagctacttgggaggctgaggcaggagaatctcttgaacccaggaggcggaggttgcagtgagccgagatcgctccactgcactccagcccaggtgacagtgtgagactccatctcaaaaaaaaaaataagaggccgggtgcggtggctcaagcctgtaatcccagcactttgggaggccgaggcaggcagatcacgaggtcaggagatccagaccatcctggctaacacggtgaaaccccgtctctactaaaaatacaaaaaaattagtcgggcgtggtggcggacgcctgtattcacagctactcgggaggttgaggcaggagaatggggtgaacccgggaggaagagcttgcagtgagccgagatcgcgccactgcactccagcctgggtgacagagccagactccatctcaaagaaaaaaaaaaaatattaagaggttctgctgccagatgtgggttctgtgggtcgggtgtgggttctgtgggtcgggtgtgggttctgcagaccaggtgcggattctgtgtaggttctgcaggcccagtgtagaggctcacacctgtaatcccagtactttgagacgctgaggtgggaggatcacttgagcccaggagttcaaaaccagcctgggcaatatagtgagaccgtatcactacaaaaaagtttttttagttcaccgagcatggtggcacatgcctgtagtcccacctactcgagaagctgagatagggtcacctgagcctggtaggctgaggctgcagtgagccaagatcgcactactgcactccagcctgggtgacagagtaagaccctgtctcaacaaaaaaataacaggttctgttgctgctgagctttcgtcaggaagataagactttcccaacagtccgaagcctaggatatgagggctgaggaggactcaaaccgttgcagtcagagagacacctattttggtgaatattttttgaaatagttaagtggcctccagtacaaactcccagttcccagaaaagacttaaaactagtatctggagattccaagtcctttaaaaggattttagctgatctgcaggcatctggatgttagcctggggttttggctggattccacctcgctcagtgatgatagtctgtttccctggaacattcctgtggttttagtagtaatgagatgtgtgcaccactccagtgggaactgaagctcttagtagttacattgtaattaaaaaagaattataaaacaagaaatcagcaagcctgcttacctccagagacacaccgttccacttacagtatctagcttcctcgactcctttgttaaaatcgtggagtatgaaccgtgaccagagaagtaaatatggagccgttttattgagcagtttcctccagggatgacggctgtcagtgtgtttcctgccagttttccagtccttactctctgcccttcattctgtactcttggcagagtcagtaaccaaccactaataaaatcaaagttgtagtaaagactttataacacata

SEQ ID NO: 25835 - protein, 65 aa, Homo sapiens
MGHELFKLAQIFFNGFAVPEALSTIQKAEEVLSLHCGPWDDEIQELQKMKSCLLDLPPTPVGPAL

SEQ ID NO: 25836 - DNA, 4334 bp, Homo sapiens
ctggcgcgggacgccggacgcggtgcggggcggagcggggcgccaaggggcgcgccaggagctgcgcgggcgctgggagggagaccagggcgcagttccgggcgcgtctgagcggttctcgaggcgttctcgcctcggtctctggcgagtgcacggatcaaaagcagcatggatctgcctgtggatgaatggaaatcatatctgcttcaaaagtgggcttcactcccgacgtctgttcaggtcacaatttctacagcagagaccttgagggatatctttcttcactcctcttcacttcttcaacctgaggatgagctgtttctaaaaagactttctaaaggttacttggtgggaaaggactcggacgctcctcttttctacagagaagaaggaaacaaaaaatttcaggagaaagattacacaggagctgcagtgctgtactctaagggagtgtcacattcaaggcctaacactgaggacatgtcactgtgtcatgctaaccgctcggcagccctcttccacctgggtcagtatgagacgtgtcttaaagacattaacagagcacagacacatgggtatccagaaaggttgcaacccaagattatgttacgtaaagcagaatgtctggtggccctggggagactgcaggaggcaagccagaccatcagtgatcttgaaaggaacttcacagccacaccagccctagcagatgtcctccctcagactctgcagagaaacctccatcgtctgaaaatgaagatgcaagaaaaggacagtctcacagaaagcttcccagcagctctggccaaaacccttgaggatgcagcgctgagggaggagaatgaacaactttccaatgcctcatcatccatcggcttatgcgtagatcctttaaaaggtcgctgtctcgttgccacaaaagatattctcccaggagagctcctggtgcaggaggatgcttttgtgagtgttctcaacccaggagaactgccaccaccgcatcacggcctagacagcaaatgggacaccagagtcaccaatggggacctctattgtcaccgatgtttgaagcacactttggccacagttccgtgtgacggatgcagttatgccaagtattgcagccaggagtgtttgcagcaggcctgggagctctaccacaggacagaatgtcctctgggagggctgcttctcacactgggtgtcttttgccacattgccctgaggttgactcttttggtgggatttgaggatgttcgcaaaatcataacgaagctttgtgataagattagtaacaaggacatctgtttacctgaaagcaacaatcaggtcaagacacttaattatggcctaggggagagtgagaaaaatggcaacatcgttgagaccccaattcctggatgcgatattaatgggaagtatgaaaataattataatgctgtcttcaaccttttgccccacactgaaaaccatagcccagagcacaaattcctctgtgctctctgtgtttctgcactgtgcagacagctagaagcagccagtttacaggccatcccaactgagaggattgtgaactcctctcagcttaaagcagcagtgacacctgaattgtgtcctgacgtgactatttggggagtggcgatgctgagacacatgttacagcttcagtgtaacgctcaggcgatgaccaccatacaacacacaggacctaaagggagcatcgttaccgacagcaggcaggtgcgccttgccacaggcatcttccctgttatcagcctcctgaaccactcctgtagccccaacaccagcgtgtccttcattagcactgtcgccaccatccgggcgtcacagcggattagaaaggggcaagagattctccactgctatgggcctcacaagagccggatgggggttgccgaaaggcagcagaagctgaggtctcagtatttctttgactgcgcctgtccagcttgtcaaactgaggcacacaggatggctgcagggcccaggtgggaagcattctgttgcaacagttgcggagcgcccatgcagggagatgacgtgctgcgctgtggcagcagatcttgtgcagaatccgccgtcagcagggaccacctggtctctcggttacaggacctacagcagcaggtcagagtggcccagaagcttctcagagatggtgaactagagcgagctgttcagcggctgtcggggtgccagcgtgacgccgagagcttcctgtgggcagagcacgccgtggtgggagagatcgcggatggcctggcccgggcctgtgctgccttaggagactggcaaaagtcagccacccatctacagaggagtctctacgtggtggaggttcgccacgggccgtccagtgttgaaatgggccatgagctcttcaaattggcccagatctttttcaacgggtttgcagtacccgaagccctgagcacaatacagaaagctgaggaggttctgtcgctgcactgtggcccatgggacgatgaaatccaggagctccagaagatgaaatcctgtttgttggacttaccacccacccctgtagggcctgcattgtagggttccaggaggattttgacccacagaaaaggagcccatggaacacaagttaaagaggttttgctggccaggtatggtggctcacgcctgtaatcccagcactttgggaggctaaggtgggcggatcacctgatgtcaggagttcaagaccagcctggccaacatggtgaaaccccatctttactaaaaatacaaaaaactagccaggcgtggtggtgggcacctgtaatcccagctacttgggaggctgaggcaggagaatctcttgaacccaggaggcggaggttgcagtgagccgagatcgctccactgcactccagcccaggtgacagtgtgagactccatctcaaaaaaaaaaataagaggccgggtgcggtggctcaagcctgtaatcccagcactttgggaggccgaggcaggcagatcacgaggtcaggagatccagaccatcctggctaacacggtgaaaccccgtctctactaaaaatacaaaaaaattagtcgggcgtggtggcggacgcctgtattcacagctactcgggaggttgaggcaggagaatggggtgaacccgggaggaagagcttgcagtgagccgagatcgcgccactgcactccagcctgggtgacagagccagactccatctcaaagaaaaaaaaaaaatattaagaggttctgctgccagatgtgggttctgtgggtcgggtgtgggttctgtgggtcgggtgtgggttctgcagaccaggtgcggattctgtgtaggttctgcaggcccagtgtagaggctcacacctgtaatcccagtactttgagacgctgaggtgggaggatcacttgagcccaggagttcaaaaccagcctgggcaatatagtgagaccgtatcactacaaaaaagtttttttagttcaccgagcatggtggcacatgcctgtagtcccacctactcgagaagctgagatagggtcacctgagcctggtaggctgaggctgcagtgagccaagatcgcactactgcactccagcctgggtgacagagtaagaccctgtctcaacaaaaaaataacaggttctgttgctgctgagctttcgtcaggaagataagactttcccaacagtccgaagcctaggatatgagggctgaggaggactcaaaccgttgcagtcagagagacacctattttggtgaatattttttgaaatagttaagtggcctccagtacaaactcccagttcccagaaaagacttaaaactagtatctggagattccaagtcctttaaaaggattttagctgatctgcaggcatctggatgttagcctggggttttggctggattccacctcgctcagtgatgatagtctgtttccctggaacattcctgtggttttagtagtaatgagatgtgtgcaccactccagtgggaactgaagctcttagtagttacattgtaattaaaaaagaattataaaacaagaaatcagcaagcctgcttacctccagagacacaccgttccacttacagtatctagcttcctcgactcctttgttaaaatcgtggagtatgaaccgtgaccagagaagtaaatatggagccgttttattgagcagtttcctccagggatgacggctgtcagtgtgtttcctgccagttttccagtccttactctctgcccttcattctgtactcttggcagagtcagtaaccaaccactaataaaatcaaagttgtagtaaagactttataacacata

SEQ ID NO: 25837 - protein, 804 aa, Homo sapiens
MDLPVDEWKSYLLQKWASLPTSVQVTISTAETLRDIFLHSSSLLQPEDELFLKRLSKGYLVGKDSDAPLFYREEGNKKFQEKDYTGAAVLYSKGVSHSRPNTEDMSLCHANRSAALFHLGQYETCLKDINRAQTHGYPERLQPKIMLRKAECLVALGRLQEASQTISDLERNFTATPALADVLPQTLQRNLHRLKMKMQEKDSLTESFPAALAKTLEDAALREENEQLSNASSSIGLCVDPLKGRCLVATKDILPGELLVQEDAFVSVLNPGELPPPHHGLDSKWDTRVTNGDLYCHRCLKHTLATVPCDGCSYAKYCSQECLQQAWELYHRTECPLGGLLLTLGVFCHIALRLTLLVGFEDVRKIITKLCDKISNKDICLPESNNQVKTLNYGLGESEKNGNIVETPIPGCDINGKYENNYNAVFNLLPHTENHSPEHKFLCALCVSALCRQLEAASLQAIPTERIVNSSQLKAAVTPELCPDVTIWGVAMLRHMLQLQCNAQAMTTIQHTGPKGSIVTDSRQVRLATGIFPVISLLNHSCSPNTSVSFISTVATIRASQRIRKGQEILHCYGPHKSRMGVAERQQKLRSQYFFDCACPACQTEAHRMAAGPRWEAFCCNSCGAPMQGDDVLRCGSRSCAESAVSRDHLVSRLQDLQQQVRVAQKLLRDGELERAVQRLSGCQRDAESFLWAEHAVVGEIADGLARACAALGDWQKSATHLQRSLYVVEVRHGPSSVEMGHELFKLAQIFFNGFAVPEALSTIQKAEEVLSLHCGPWDDEIQELQKMKSCLLDLPPTPVGPAL

SEQ ID NO: 25838 - DNA, 8192 bp, Homo sapiens
gcggagtctgcggccgttcccgcggcctcctcctcctccccgttcccttcacccccaccccgcacccctttccccatcccggctccgtcaccctcccgtcccccacactcaggacaagaatgccctgcccggaacaacccagcagcgcctagatggctttggtcacggtccagcggtcacctacccccagcaccacctccagcccctgcgcctcggaggcagacagtggggaggaagaatgccggtcacagcccaggagcatcagcgagagctttctaactgtcaaaggtgctgccctttttctaccacggggaaatggctcatccacaccaagaatcagccacagacggaacaagcatgcaggcgatctccaacagcatctccaagcaatgttcattttactccgcccagaagacaacatcaggctggctgtaagactggaaagtacttaccagaatcgaacacgctatatggtagtggtttcaactaatggtagacaagacactgaagaaagcatcgtcctaggaatggatttctcctctaatgacagtagcacttgtaccatgggcttagttttgcctctctggagcgacacgctaattcatttggatggtgatggtgggttcagtgtatcgacggataacagagttcacatattcaaacctgtatctgtgcaggcaatgtggtctgcactacagagcttacacaaggcttgtgaagtcgccagagcgcataactactacccaggcagcctatttctcacttgggtgagttattatgagagccatatcaactcagatcaatcctcagtcaatgaatggaatgcaatgcaagatgtacagtcccaccggcccgactctccagctctcttcaccgacatacctactgaacgtgaacgaacagaaaggctaattaaaaccaaattaagggagatcatgatgcagaaggatttggagaatattacatccaaagagataagaacagagttggaaatgcaaatggtgtgcaacttgcgggaattcaaggaatttatagacaatgaaatgatagtgatccttggtcaaatggatagccctacacagatatttgagcatgtgttcctgggctcagaatggaatgcctccaacttagaggacttacagaaccgaggggtacggtatatcttgaatgtcactcgagagatagataacttcttcccaggagtctttgagtatcataacattcgggtatatgatgaagaggcaacggatctcctggcgtactggaatgacacttacaaattcatctctaaagcaaagaaacatggatctaaatgccttgtgcactgcaaaatgggggtgagtcgctcagcctccaccgtgattgcctatgcaatgaaggaatatggctggaatctggaccgagcctatgactatgtgaaagaaagacgaacggtaaccaagcccaacccaagcttcatgagacaactggaagagtatcaggggatcttgctggcaagcaaacagcggcataacaaactatggagatctcattcagatagtgacctctcagaccaccacgaacccatctgcaaacctgggctagaactcaacaagaaggatatcaccacctcagcagaccagattgctgaggtgaagaccatggagagtcacccacccatacctcctgtctttgtggaacatatggtcccacaagatgcaaatcagaaaggcctgtgtaccaaagaaagaatgatctgcttggagtttacttctagggaatttcatgctggacagattgaggatgaattaaacttaaatgacatcaatggatgctcatcagggtgttgtctgaatgaatcaaaatttcctcttgacaattgccatgcatccaaagccttaattcagcctggacatgtcccagaaatggccaacaagtttccagacttaacagtggaagatttggagacagatgcactgaaagcagacatgaatgtccacctactgcctatggaagaattgacatctccactgaaagacccccccatgtcccctgatcctgagtcaccaagcccccaacccagttgccagactgaaatctcagatttcagtacagatcgcattgacttttttagtgccctagagaagtttgtggagctctcccaagaaacccggtcacgatctttttcccattcaaggatggaggaactgggtggaggaaggaatgagagctgtcgactgtcagtggtagaagtagccccttccaaagtgacagctgatgaccagagaagcagctctttgagtaatactccccatgcatcagaagaatcttcaatggatgaggaacagtcaaaggcaatttcagaactggtcagcccagacatcttcatgcagtctcactcggaaaatgcaatttcagtcaaagaaattgtcactgaaattgagtccatcagtcaaggagttgggcagattcaactgaaaggagacatcttacccaacccatgccatacaccaaagaagaacagcatccatgagctgctccttgagagggcccagactccagagaacaaacctggacatatggagcaagatgaggactcctgcacagcccagcctgaactagccaaagactcagggatgtgcaacccagaaggctgcctaaccacacactcatctatagcagacttggaagaaggggaaccagctgagggggaacaagagctccagggctcagggatgcacccaggtgccaagtggtaccctgggtctgtgaggcgagccaccttggagttcgaagagcgcttacggcaggagcaagagcatcatggtgctgccccaacatgtacctcattgtccactcgtaagaattcaaagaatgattcttctgtggcagacctagcaccaaaagggaaaagtgatgaagcccccccagaacattcatttgtcctcaaggaaccagaaatgagcaaaggcaaagggaaatacagtgggtctgaggctggctcactgtcccattctgagcagaatgccactgttccagctcccagggtgctggagtttgaccacttgccagatcctcaggagggcccagggtcagatactggaacacagcaggaaggagtcctgaaggatctgaggactgtgattccataccaggagtctgaaacacaagcagtccctcttccccttcccaagagggtagaaatcattgaatatacccacatagttacatcacccaatcacactgggccagggagtgaaatagccaccagtgagaagagcggagagcaagggctgaggaaagtgaacatggaaaaatctgtcactgtgctctgcacactggatgaaaatctaaacaggactctggaccccaaccaggtttctctgcacccccaagtgctacctctgcctcattcttcctcccctgagcacaacagacccactgaccatccaacctccatcctgagtagccctgaagacagaggcagcagcctgtccacagccctggagacagcagcaccttttgtcagtcatacaacccatttactgtctgccagtttggattacctgcatccccagactatggttcacctggagggcttcacagagcagagcagcactacagatgagccctctgcagaacaggttagctgggaagaaagtcaggagagccctctctccagtggcagtgaggtgccatataaggactcccagctaagtagcgcagacctaagtttaattagcaaacttggtgacaacactggggagttacaggagaaaatggacccattgcctgtagcctgtcgactcccacatagctctagtagtgaaaacataaagagtctcagccacagccccggtgtggtgaaggagcgtgctaaagaaatcgagtctcgagtggttttccaggcagggctcaccaaaccatcccaaatgaggcgctcagcttctctcgccaaattaggttacttggacctctgtaaagactgcttaccagagagggagcctgcctcctgtgaatcccctcatctcaaactgcttcagcctttcctcagaacagactcaggcatgcacgcgatggaggaccaagagtccctagaaaacccaggtgccccccacaacccagagcccaccaagtcttttgtagaacaactcacaacaacagagtgtattgtgcagagcaagccagtggagaggccccttgtgcagtatgccaaagaatttggttctagtcagcagtatttgctccccagggcaggacttgaattgactagttctgaaggaggccttcccgtgctacagacccagggactgcagtgtgcatgcccagctccagggctggccgtggcaccccgtcagcaacacggcagaactcacccccttaggagactgaaaaaggcaaatgacaaaaaacggacaaccaaccccttctataataccatgtgattctgagcctacacatgtgactttctagaagaaatgtttgtaaaaggggcaggtgtaatatgtaaggaacatgcactttattggttaattttataatattttggtcattttactgtttctggtgcatgcagggtttgggtgtttttcagtgtgtatgtgtgtgtatatgtaaggggaaagagagattgatctggatggcaagaccgtttatcattttttatttaaaaaaatcaaacctcaaaaaagtcattttcagagaacacctttatcaaaggcaaattgctgtttttcagtcagctgccacctgcttctcattttgccctctgagaaaaggcatggtttcttaattgagggaaggaagcagattcggaggggtggagataaagctggggattggagatgttcccctgcctttgtgatgatggtttggtttccagacctgaggcatcgaatgggctaaaggtcagccagaagtcagagggctctcagccttcatccagccgcagccctttagagttcctgaaggaggcaggttccgctttgctttaaaagagggtcttccggtgttccagagtgtatcgttacagtaagacatgataatggccggctctgcaaatttatcatatagtttttttcccaagaaaattatttttgaaattaaaacaggaccccaaatgaaatccaagtggtcttctgtagaggaaagcatgataagaggaggaagacataaagttgggggtggagaggctgctgcccagaaactgctgggttggtgggatccacacagatgggcatcttggctctccctgccagaaaaatgtgctctgcagtgtcctcccaactgaaaacaacagtgacatgtttgaaaagcagcaatcgaaagtcagtgtgttcttgtaaaatgaatatgtatgtagggttttaacccttccattacttgaataattctttgggccttctgagtttaatggccatattttcttccagtttattttccttccccatgctgttgtccccatgctgcctatttttttaaatttcatagattatatttgaattgttacatatgtttaacatccattgaatgcaacgttttatttttggtattatcactgttaacacttttttttccttttcctggaaggtttgtcatttctctaaagtttgtacacagtatttatgtacataatattgtcactgtcttagtgtcttgttcatgttgtagggtaattttgatttattctttttaagaaggagtagagttgcaactggaaaacacagacaccagaaatgaaagtgttgggtgttgataggaatctgtacaatatgttgatggtggctgtagttgtttaaatggagacttccaatcaccagctcctgccaaattatgcattagtaactttttcctcagagacacccctaaaggctcccattaggtcacagcgtgactgaaagctgatttctctgtgagactgaaatcccagaacattgtttgccagtatctcaaccacagccaggaagtatatgtgagttgcccagagtggaagctcctagtagaggctgaaggccacaggggaggcctcagccaggggcaagtgcccacagtgactccatttaggatgctgtcgttttgctactgttgtggagatccttaacgcagcagcgcctgtcataaacaagcctcttgtagcttcttacagaaaacagatttagtctagcatgaaacacctctgcatctcattgaaactgaagaggcttgcagatttgctttcgttgatgtccacgttactgaggattgactgagtatagactggagacaggtttttggcttatcacagcactgaggaaaatacaaatgcacagactgtcagcatgatgtcagaggccagagtttggtgggggcagatggcagggcgacccaaaagatgcagaaaaggtagactggggccactgggtcttaagaggagctgtgaagttgtgtggaagccaaggctgggtctgacatccctgccaggaagcaggttggacagaaaccacttgctaaaagcgtctctatggtgcagtgattatgtgtaccctgtgctgttgctcagtagtctccttgaatgttcaagtatctcatccactcagttttgtgattcctggatatttgtgtgttgtaaagtgttttgttaggtggtatgaaccaatgtgaggaggcttgagacagggttatggatttccagagctcttccatgtagaataccctgccttcttgaagcagttccaccaccaatatgatggggaagggcaggaacttatggcagggtggggagagggtttgcctggaagttaagagagtggcatccacttgtggtaaccccttacgatgatgacatcccacacactaagaggtacaagcaggaccaaagttttggactgttccctcttctcccctccactgtgtttaatgttcactcactgcattaaataacaacaaagatgggacaaaacccactaatactgtggggaaaaaaaattttcaagagcagaggaaagtctttctgcctttttataattactttttttatcatttaatttacctgcctaaataaacatcttctacagaatatctgtcattcaaccatgccaaggagtttgtgccagccttttcagactcccagaattgggtgttcctgggttatttacatagctgagcagtgtccaggggaggtgcgcagtgaactgtcaaggactttccagactgtcttctcttcagacttttataatctccagtggcatctttcccttttcttttgttcatgacctgacctgaagcagcagatttgatagactggcaaagatgaataggaaaaactttgactcttgcccagtgcctgcctgcctctctctctctcctctctctctctctctttttaaaccaccatagactctcacttattttggaggagtgtatgtgcatgtgtacacatatgtacatatataaaaacagttgatgttttggtgtatggggtaaaagccccaggagcatacagaacttgagctgaacctggtcagtagaaagggaaaccccaaccctttcttgatttttggagacacccaggactaatggatactgtagtagacatgtagtactatagtaccgtaatattcatctctcctcattttagttgcctttcagattctaaatgtttgggatcattcctatcatcttagtctcttcaggatctttagtattttcctggttctgaggaggcttgagacagggttatggatttccttgttctgtgtctttatccctactgatagttcctctttctcattttgcaaactacccagagctccaaggacagcctgaagatctcagtgcctcaggctctgaggtactctgctcacaggccccagacagatgctgttgggtaaactcaaagcttcctatgagaagcttctgagatgtagcaggtcacagaagtgttcacctgtttcatctgaggatttcagttctgaagtgatctaggcatgtttggtaaaaatgtttttgtgagagttctttttttaagaaagcattatgcaaaaagtcacttttaagggcatttaaaaatttttaagtaaagccattctttggcttttttggactatttgtggatactttgtttacattttgaatattaaaatgtgcatcatcttgtcggccatgcagtcctgcaggcatcagtgccctggctgtcctgtgagtcctcatgcagagcagggccatcatggtcagcc

SEQ ID NO: 25839 - protein, 1423 aa, Homo sapiens; identical to SEQ ID NO: 3435

SEQ ID NO: 25840 - DNA, 2544 bp, Homo sapiens
gtcaggagagccctctctccagtggcagtgaggtgccatataaggactcccagctaagtagcgcagacctaagtttaattagcaaacttggtgacaacactggggagttacaggagaaaatggacccattgcctgtagcctgtcgactcccacatagctctagtagtgaaaacataaagagtctcagccacagccccggtgtggtgaaggagcgtgctaaagaaatcgagtctcgagtggttttccaggcagggctcaccaaaccatcccaaatgaggcgctcagcttctctcgccaaattaggttacttggacctctgtaaagactgcttaccagagagggagcctgcctcctgtgaatcccctcatctcaaactgcttcagcctttcctcagaacagactcaggcatgcacgcgatggaggaccaagagtccctagaaaacccaggtgtaatatgtaaggaacatgcactttattggttaattttataatattttggtcattttactgtttctggtgcatgcagggtttgggtgtttttcagtgtgtatgtgtgtgtatatgtaaggggaaagagagattgatctggatggcaagaccgtttatcattttttatttaaaaaaatcaaacctcaaaaaagtcattttcagagaacacctttatcaaaggcaaattgctgtttttcagtcagctgccacctgcttctcattttgccctctgagaaaaggcatggtttcttaattgagggaaggaagcagattcggaggggtggagataaagctggggattggagatgttcccctgcctttgtgatgatggtttggtttccagacctgaggcatcgaatgggctaaaggtcagccagaagtcagagggctctcagccttcatccagccgcagccctttagagttcctgaaggaggcaggttccgctttgctttaaaagagggtcttccggtgttccagagtgtatcgttacagtaagacatgataatggccggctctgcaaatttatcatatagtttttttcccaagaaaattatttttgaaattaaaacaggaccccaaatgaaatccaagtggtcttctgtagaggaaagcatgataagaggaggaagacataaagttgggggtggagaggctgctgcccagaaactgctgggttggtgggatccacacagatgggcatcttggctctccctgccagaaaaatgtgctctgcagtgtcctcccaactgaaaacaacagtgacatgtttgaaaagcagcaatcgaaagtcagtgtgttcttgtaaaatgaatatgtatgtagggttttaacccttccattacttgaataattctttgggccttctgagtttaatggccatattttcttccagtttattttccttccccatgctgttgtccccatgctgcctatttttttaaatttcatagattatatttgaattgttacatatgtttaacatccattgaatgcaacgttttatttttggtattatcactgttaacacttttttttccttttcctggaaggtttgtcatttctctaaagtttgtacacagtatttatgtacataatattgtcactgtcttagtgtcttgttcatgttgtagggtaattttgatttattctttttaagaaggagtagagttgcaactggaaaacacagacaccagaaatgaaagtgttgggtgttgataggaatctgtacaatatgttgatggtggctgtagttgtttaaatggagacttccaatcaccagctcctgccaaattatgcattagtaactttttcctcagagacacccctaaaggctcccattaggtcacagcgtgactgaaagctgatttctctgtgagactgaaatcccagaacattgtttgccagtatctcaaccacagccaggaagtatatgtgagttgcccagagtggaagctcctagtagaggctgaaggccacaggggaggcctcagccaggggcaagtgcccacagtgactccatttaggatgctgtcgttttgctactgttgtggagatccttaacgcagcagcgcctgtcataaacaagcctcttgtagcttcttacagaaaacagatttagtctagcatgaaacacctctgcatctcattgaaactgaagaggcttgcagatttgctttcgttgatgtccacgttactgaggattgactgagtatagactggagacaggtttttggcttatcacagcactgaggaaaatacaaatgcacagactgtcagcatgatgtcagaggccagagtttggtgggggcagatggcagggcgacccaaaagatgcagaaaaggtagactggggccactgggtcttaagaggagctgtgaagttgtgtggaagccaaggctgggtctgacatccctgccaggaagcaggttggacagaaaccacttgctaaaagcgtctctatggtgcagtgattatgtgtaccctgtgctgttgctcagtagtctccttgaatgttcaagtatctcatccactcagttttgtgattcctggatat

SEQ ID NO: 25841 - protein, 123 aa, Homo sapiens
MDPLPVACRLPHSSSSENIKSLSHSPGVVKERAKEIESRVVFQAGLTKPSQMRRSASLAKLGYLDLCKDCLPEREPASCESPHLKLLQPFLRTDSGMHAMEDQESLENPGVICKEHALYWLIL

SEQ ID NO: 25842 - DNA, 270 bp, Homo sapiens
acaagctgtaatcaatcagctgggtataagatggggttttcaccctttccaagctgcatgagctccagccacccctaggaggagacaacatatcacgcatctcaagacctggagggagaatggcaagcagctgattcatctccattgcctgtgaaacactgctactccacgtgtcacttctcactcaggggtcccctcctcactcctccctactcaagggtaacctccatcctgaattttgtgcttatcattccctttttttttctttat

SEQ ID NO: 25843 - protein, 63 aa, Homo sapiens
EETTYHASQDLEGEWQAADSSPLPVKHCYSTCHFSLRGPLLTPPYSRVTSILNFVLIIPFFFL

SEQ ID NO: 25844 - DNA, 2057 bp, Homo sapiens
gcggagtctgcggccgttcccgcggcctcctcctcctccccgttcccttcacccccaccccgcacccctttccccatcccggctccgtcaccctcccgtcccccacactcaggacaagaatgccctgcccggaacaacccagcagcgcctagatggctttggtcacggtccagcggtcacctacccccagcaccacctccagcccctgcgcctcggaggcagacagtggggaggaagaatgccggtcacagcccaggagcatcagcgagagctttctaactgtcaaaggtgctgccctttttctaccacggggaaatggctcatccacaccaagaatcagccacagacggaacaagcatgcaggcgatctccaacagcatctccaagcaatgttcattttactccgcccagaagacaacatcaggctggctgtaagactggaaagtacttaccagaatcgaacacgctatatggtagtggtttcaactaatggtagacaagacactgaagaaagcatcgtcctaggaatggatttctcctctaatgacagtagcacttgtaccatgggcttagttttgcctctctggagcgacacgctaattcatttggatggtgatggtgggttcagtgtatcgacggataacagagttcacatattcaaacctgtatctgtgcaggcaatgtggtctgcactacagagcttacacaaggcttgtgaagtcgccagagcgcataactactacccaggcagcctatttctcacttgggtgagttattatgagagccatatcaactcagatcaatcctcagtcaatgaatggaatgcaatgcaagatgtacagtcccaccggcccgactctccagctctcttcaccgacatacctactgaacgtgaacgaacagaaaggctaattaaaaccaaattaagggagatcatgatgcagaaggatttggagaatattacatccaaagagataagaacagagttggaaatgcaaatggtgtgcaacttgcgggaattcaaggaatttatagacaatgaaatgatagtgatccttggtcaaatggatagccctacacagatatttgagcatgtgttcctgggctcagaatggaatgcctccaacttagaggacttacagaaccgaggggtacggtatatcttgaatgtcactcgagagatagataacttcttcccaggagtctttgagtatcataacattcgggtatatgatgaagaggcaacggatctcctggcgtactggaatgacacttacaaattcatctctaaagcaaagaaacatggatctaaatgccttgtgcactgcaaaatgggggtgagtcgctcagcctccaccgtgattgcctatgcaatgaaggaatatggctggaatctggaccgagcctatgactatgtgaaagaaagacgaacggtaaccaagcccaacccaagcttcatgagacaactggaagagtatcaggggatcttgctggcaaggtgagtcagtgactttctccaattctccctccttttaagttccctaaagcaagatgaagtgtccttctctgtagctacttctcaagctgatttggatgtgatattttttcaaaaaagacttatttctctatcaatccagttttcaaaacataagtgtaagcatttaagatttgcatgggctggccgggcacagtggctcacgcctgtaatcccagcactttgggaggctgaggcaagcggatcatttgaggtcaggagttcgagaccagcctggccaacatggtgaaaccccgtctctacttaaaatacaaatattagctgggcatgatgatgggcccctgtaatcccagctacttgggaggctgaggcaggacaatcgcttgaacctgggaggcagaggttgcagtgagctgagattgtaccatgcactccagcctgggtaacagagcgaaacaacatctcaaaaaaagaaaagaaagatttccctggacacactgccagtgggatagctctgccccataaggagcagtaccaaaaattttttttaaagaaaaaaaag

SEQ ID NO: 25845 - protein, 449 aa, Homo sapiens
MALVTVQRSPTPSTTSSPCASEADSGEEECRSQPRSISESFLTVKGAALFLPRGNGSSTPRISHRRNKHAGDLQQHLQAMFILLRPEDNIRLAVRLESTYQNRTRYMVVVSTNGRQDTEESIVLGMDFSSNDSSTCTMGLVLPLWSDTLIHLDGDGGFSVSTDNRVHIFKPVSVQAMWSALQSLHKACEVARAHNYYPGSLFLTWVSYYESHINSDQSSVNEWNAMQDVQSHRPDSPALFTDIPTERERTERLIKTKLREIMMQKDLENITSKEIRTELEMQMVCNLREFKEFIDNEMIVILGQMDSPTQIFEHVFLGSEWNASNLEDLQNRGVRYILNVTREIDNFFPGVFEYHNIRVYDEEATDLLAYWNDTYKFISKAKKHGSKCLVHCKMGVSRSASTVIAYAMKEYGWNLDRAYDYVKERRTVTKPNPSFMRQLEEYQGILLAR

SEQ ID NO: 25846 - DNA, 516 bp, Homo sapiens
aagccagggtgtttctagaaaaagagattctacacccttacaagcatatcacttctctgagctggaagcctttgcccaactaagtttcagtatcatcagctctcctggaggctgtccgatttggctgagaaaaagctagatgttgatagagaccctttgcagaaaagcaggcaaacaagtatattggacacataaccaataattttgctcatgaatttgaaaaatagaacttttactgctgattatctttttcaagatttgacattacaagatttgacatcttttgggaaagtgtttccttttcataaaaaaatccagcctggcgacagagcgagactgcaatctaaaaaaaaaaaaaaaaggagaggttaggcagttggccctaatgtccccacccacagtaggaagggcagtcagaacttgaacctaagtcttctaatgctaaattccattaatgcctctaattctgaaagagtaaactcttattataaaatgtctgccctgaccaggcgtggt

SEQ ID NO: 25847 - protein, 53 aa, Homo sapiens
MNLKNRTFTADYLFQDLTLQDLTSFGKVFPFHKKIQPGDRARLQSKKKKKRRG

SEQ ID NO: 25848 - DNA, 995 bp, Homo sapiens
gctgcggaaccgcccgcccgccgcccgttcggagcgtcagtcggcgacagtctggtggtgggtgcggagtctgcggccgttcccgcggcctcctcctcctccccgttcccttcacccccaccccgcacccctttccccatcccggctccgtcaccctcccgtcccccacactcaggacaagaatgccctgcccggaacaacccagcagcgcctagatggctttggtcacggtccagcggtcacctacccccagcaccacctccagcccctgcgcctcggaggcagacagtggggaggaagaatgccggtcacagcccaggagcatcagcgagagctttctaactgtcaaaggtgctgccctttttctaccacggggaaatggctcatccacaccaagaatcagccacagacggaacaagcatgcaggcgatctccaacagcatctccaagcaatgttcattttactccgcccagaagacaacatcaggctggctgtaagactggaaagtacttaccagaatcgaacacgctatatggtagtggtttcaactaatggtagacaagacactgaagaaagcatcgtcctaggaatggatttctcctctaatgacagtagcacttgtaccatgggcttagttttgcctctctggagcgacacgctaattcatttggatggtgatggtgggttcagtgtatcgacggataacagagttcacatattcaaacctgtatctgtgcaggcaatgtgggttgacagggattcaaggaacaaacactgtgatgtactattggtggaagaatgaactggagcagcctttctggagagtgatttgccaatatgccttatcattttgcatgatctttgtcctagtaactctatttctatggatttactctaagtttgtaaacatggatgtgtgcaaagattttagctctaagaatgtttgtcagtgttctaataatagcaaaaaataaaaaacaaatgattgaaaaat

SEQ ID NO: 25849 - protein, 195 aa, Homo sapiens
MALVTVQRSPTPSTTSSPCASEADSGEEECRSQPRSISESFLTVKGAALFLPRGNGSSTPRISHRRNKHAGDLQQHLQAMFILLRPEDNIRLAVRLESTYQNRTRYMVVVSTNGRQDTEESIVLGMDFSSNDSSTCTMGLVLPLWSDTLIHLDGDGGFSVSTDNRVHIFKPVSVQAMWVDRDSRNKHCDVLLVEE

SEQ ID NO: 25850 - DNA, 908 bp, Homo sapiens
ctccgcgcgacccggcgggcccgcctccgccgccgggtgcacgcgcagcctgcgcctcgtgccggagcagagcagaggccaggatgcggagttgtgcactttgagccggccccatgaccctgagcacgttggcccgcaagaggaaggcgcccctcgcttgcacctgcagcctcggtggccccgacatgattccttacttctccgccaacgcggtcatctcgcagaacgccatcaaccagctcatcagcgagagctttctaactgtcaaaggtgctgccctttttctaccacggggaaatggctcatccacaccaagaatcagccacagacggaacaagcatgcaggcgatctccaacagcatctccaagcaatgttcattttactccgcccagaagacaacatcaggctggctgtaagactggaaagtacttaccagaatcgaacacgctatatggtagtggtttcaactaatggtagacaagacactgaagaaagcatcgtcctaggaatggatttctcctctaatgacagtagcacttgtaccatgggcttagttttgcctctctggagcgacacgctaattcatttggatggtgatggtgggttcagtgtatcgacggataacagagttcacatattcaaacctgtatctgtgcaggcaatgtgggttgacagggattcaaggaacaaacactgtgatgtactattggtggaagaatgaactggagcagcctttctggagagtgatttgccaatatgccttatcattttgcatgatctttgtcctagtaactctatttctatggatttactctaagtttgtaaacatggatgtgtgcaaagattttagctctaagaatgtttgtcagtgttctaataatagcaaaaaataaaaaacaaatgattg

SEQ ID NO: 25851 - protein, 202 aa, Homo sapiens
MTLSTLARKRKAPLACTCSLGGPDMIPYFSANAVISQNAINQLISESFLTVKGAALFLPRGNGSSTPRISHRRNKHAGDLQQHLQAMFILLRPEDNIRLAVRLESTYQNRTRYMVVVSTNGRQDTEESIVLGMDFSSNDSSTCTMGLVLPLWSDTLIHLDGDGGFSVSTDNRVHIFKPVSVQAMWVDRDSRNKHCDVLLVEE

SEQ ID NO: 25852 - DNA, 301 bp, Homo sapiens
caggagaattggttgaatcctggaggtggaggttgcagtgagccgagatcaagccactgcacgccagcctgggcagcagagcaagactccgtctcaaaaattaataataataataataataaatcttaaccaaatgccatttattgacaaatgctgggattacaagtgtgagccaccatggctggccacctttttgtgatatttgaactccagcaatattttttttttctcagaagacaggcataaaaagataacataattacagaaaatcaggttttatatcattgactattgttgcagt

SEQ ID NO: 25853 - protein, 42 aa, Homo sapiens
QENWLNPGGGGCSEPRSSHCTPAWAAEQDSVSKINNNNNNKS

SEQ ID NO: 25854 - DNA, 882 bp, Homo sapiens
ggagtttcactctgccacccaggctggaatacagtggcacgatctaggcttactgaagcctccgcctcctgggttcaagcaattctcctacctcagcctcctgagtagctgagattacaggcgcctgccatcacgcccagctaattttttgtatttttaatagagatggggtttcatcatggtggccaggctggtcttaaactcctgacctcaggtgatccacccacctcggcctcccaaagtgcaggggtacaggcgtgagccaccgcgcccagcctagtattgaatgagataagaaatctgaaatgctttacctatggtagctgtccatcaaagttactttcatagaagctggcatcctcagttgcttttgtacactcaggaatcttttcaaagtttaagggtgataaattttatccaaagtaattactcgtaaaataattggatcccaacaattacacccctgtgcatctgtagaagtgcagacatagaagatgtgggacttactctccaagcacacaaaatctacttatagatttaggattctttcttttgaagtaccagaataccatattaaaagtgagataatgtttaagatgagaaggccaggagcaaggcaattatagacttgatacagtgattaatgcagttgtcaaggttctgagttctgtctgtctgctctaccatctttaacttgcttccttttgtccttgggcctctctttttgaggtcacaaaatggctgtcacagctctagatatcaaatctgcataactgcatccaaaggcatagaaagggcagtttgttttctcaaatctcctttgtcatggtggaaaacttttcccacaagccacagcagacttgtcctcaagccttgaagacc

SEQ ID NO: 25855 - protein, 43 aa, Homo sapiens
MWDLLSKHTKSTYRFRILSFEVPEYHIKSEIMFKMRRPGARQL

SEQ ID NO: 25856 - DNA, 961 bp, Homo sapiens
ttagaggtgcccgccactgcgcccagctaatttttgcagagtttgagaccagcctggtcaacatggtgaaaccccatctctactaaaaatacaaaaattacctgggtgcggtggcaggtgcctataatcccagctactcgggaggctcaggcaggagaattgcttgaacgtgggaggcagaggttgcagtgagccaagattgtgccactgcactccagcctgagtgacagagcaagactctgtctcggaaaaaaagaaagaaagagaaagagagagagaaaagaaaggaagaaaaggaagaaagaatgaaagaacaaacaaaagaaagacaggagggaaaataggcactacagattgttcacaattccctaactccatttaatataaggattttgatttctccttttcactgaaaaactatcctactgttctttggtggccaatgataacaaacttagtttatagctactataactgaggtttgggaaatcttcaatacttcacatatgtatagatgctggcagtgtatcaaattctagtttctagtctttagttctttaaaaactctttagtcactttgttattcttacatttcatttgtgataattgattaacatgtttgtatttgaagacattaatcacaatttagaatatataaggagcacacagatactactctgtatcttttagatttccttatacctatgaaagatgttattcagaattcaatatgttcatttaagtttgatataaatatttttctgaaaagaaagaattgagccataaatgaattgttgtgggatatgctgtttggtcctttgggctcaaggcttaatattaataagactcctgaactgagccaggaatccccaggtctagccctaattggctttgtaaccatgagcaaattcatttatctttgcatccttataaaatgtcctacacaaaaaatgttattttt

SEQ ID NO: 25857 - protein, 51 aa, Homo sapiens
MLFGPLGSRLNINKTPELSQESPGLALIGFVTMSKFIYLCILIKCPTQKML

SEQ ID NO: 25858 - DNA, 548 bp, Homo sapiens
gagaggcggtagctgacaggtggcgcctgcgcactgggagcgctcattgtgccccgcagctgcggaaccgcccgcccgccgcccgttcggagcgtcagtcggcgacagtctggtggacaagaatgccctgcccggaacaacccagcagcgcctagatggctttggtcacggtccagcggtcacctacccccagcaccacctccagcccctgcgcctcgagatggggacttgcttggggtcttgctgcccaggctggtcttgaactcgtggcgtcaagggatcctcctgtctcagcctcctaaagaattgggattatagtcatgagccactgtgaccggctacaattttcaagtctacaatatattattattgactgtagaaaccatattgtacaatagctcttcataacttactcctcctgtctaatggaaactttgtaccctttgaccatcatctcctccccattctcccaccaatccccaatctggtgtgaattttctgaattgatacctatattgatccagggttaaataaacaaagtataatac

SEQ ID NO: 25859 - protein, 48 aa, Homo sapiens
MALVTVQRSPTPSTTSSPCASRWGLAWGLAAQAGLELVASRDPPVSAS

SEQ ID NO: 25860 - DNA, 517 bp, Homo sapiens
gcggagtctgcggccgttcccgcggcctcctcctcctccccgttcccttcacccccaccccgcacccctttccccatcccggctccgtcaccctcccgtcccccacactcaggacaagaatgccctgcccggaacaacccagcagcgcctagatggctttggtcacggtccagcggtcacctacccccagcaccacctccagcccctgcgcctcgagagcagaactgggattcttggttcagggaggcagatttccagtgattgtaaggaagaatttgtaacagtggagtgcactgccttgcaaaatagtgagtgcacattgctggaaatattcaagcaaaggctggagaacattttgcctgggaggtggtataaagaattcctgcagtgggggacttctaagactatttctaatctaagattttgtgatttgagaatacttgtacttcaaagctggtaaaacattttagggtcatctgaagacaagtatcataggaataaatctttaatataattt

SEQ ID NO: 25861 - protein, 42 aa, Homo sapiens
MALVTVQRSPTPSTTSSPCASRAELGFLVQGGRFPVIVRKNL

SEQ ID NO: 25862 - DNA, 3958 bp, Homo sapiens
aggagtgagggagcttttttaacttctggagtactttgtgatgtttattaatattttctttctttttgttattaatactggtctagtaatattcttctataccatttggtgataacttttggagtccaaatgaatgagtcagcatctcaagaggaactcagacctgctcaggaaaacagaaaagaagacaaagagaggaaatggaacttaactgaagtgaaagagcttcatgagaccttacagagtgtgccagacgttcctgtaaaagaggacaccaacagtgtggtggagaaagcaatggatgaaatcaaatcccaagaattaaacctggaggggcagcgaaaaatttcacctggttcaataaaggactctaaaactgaagcctcaggtaatattgcaattagaaaatctgcaaaagtgatttttgctttagatgaaactgaactgaaatcaaagccagagcacacatggaagaaaaacctttttgaaagaatggaggcaagagcccaagcaatgcagcagaaaataatagataaggaaaatctgaagaaggaactagaaaaaaaggctgaaaaaaaactccctagggataatttggccaaagagtggtttaatactgacagcatgacactgaataatactgcatatttgcttgacaaacttctacccaccttagttcctggagtagaaaacatgttaactcaagtagaaaagaagaaggttttgacagaagctgatactccaagcaagtttgacccaattaattatttgggggaatatttaataagaaacaatcctaattatatcaaagacccaggaatgtctggttaccagaggttgatgaaagaagtcacagaagacctgaagatatatgttcctgacactatctgcaacagagtatccaagatgaaggagaatgttaaacagaatagaaaacaaagagaaagcatagacaaaatcatagtcaaggtggccaacacacggaaacaggctctgcaggagcaattcgatgaatggattctagaccctaaaggaatgattcctaagtcagtgattcagaatgttcttcaagaattctttcaaaatccagatttcaagcttggatcacactgcaaacaactggatattactgactcaacagaaccaagattgaacaaaatggaatttacagaatacatctcttcacatattaaagacttgaagagtgaaatgtttgaggaacttcttaagcacctttgccactctgcagatgaatttcgggaggtcataaaagctgacatgcggaggcagatgttcgctgaactcttcctacattgtgaccacgggaaggtagggtttttggatcggcagaggacattggccctgctggaattgttctatgaccatagttcacaaatgcttaggagtttacttcgaaacccacgacaatggccattcattgaatttgaagagataaacttgactgagttgtggggagacatggataatcagaaacacatttatgaaggttttgacaaagtgctcttggagatgaatacattactttctgcaaatcatgctagcaaaacccaaagtaaattattagaaagtccagatcaacctaaacttaacgaacagagaacatcaacaccatcaccaaacccgccagaacagcagagaggagtaactgcagaacaaggaccacaaagaatttcaattgaagaacaacaacaaggcaaaaagccaactgcagagcaagaactgtacatagaatcagtaatagaaccaggaacacacacagagtcaactctagaacaagggtcaagtagaaggttactgacagaacaagaaacacacagagagtcaactacagaacaaggacagcacaaagggtcaatagaaggacaaggaccacgcagagtgtcagtttcagaacaaggatcaagcagagagtcagttgcagaacaagggtcacgcagagagtctattgcagaacaagatcgacacaaagggtcagtagcagaacaaggatcacgcagaatgtcagctgcagaacagggatcactcagagagtcagtaatagaagaaccataccaaaaatcagaacaaggaccttatggagagataatttcagaagagcaagaagacataggctcaacttcacaatcaagaaaagatagtatcttaaaaagtacaaaatatggggaacctataacctctgagtacattgaagtccctctacaggaaaagaggtcttgggaacaaacatatgaagaggaaatattcctgagttctgaactgcaagaggaagttccaaccttaagcagaaaagatcactttccagaaactacaaaaaaggaagttcagaaagacaagccctgtgaacccaagtcccaaaaaatagaaggaaagtcatggtcaggtgaattttttacttgtaactggaaaatgaagtatgtcacatttgaagatgaggaacaggcaaacttaatctatggtaactccaggttcacagatttacactcaattatcagaaatattcagtcttgcaaggaggtaaaaggcagaactgccttcaatggagtttcattcaatctgctccagtttgtgcaactcctggagacatttgttggtgaagacgctcccttgagtgtcagcgagactctcacctccttttttaaggagggctatgttgaaacagaacaagagaaaatgaatgccttagaacagtttagccaaaatgctttccaagtccgacagaggcttctcctagaagccatctttcagaagtgggacagtgatggctcaggcttcctggatctgaaggaagttgatgaactcttgtacacatacaaggagggaatggaaaaagaatctatgaagaaaggtctcactctgtcgccaggctggagtgcagtggcgcaactgtagctcactgcagcctccaactcccggactcaagcgatcatcccatcacagactcctgagcaactgggactacagggaaagaaggaagttttttcctcttgagaccaaatttccataaaatgagatgcaaaaattttaagtgtatatttgctgagttttgacaaatacatgccctatgcatcccatactcctatcaagatacagaacaaagagcactgtgacactcacctgtaatcccagctactcaagaggcagaggcaggaagattgcttgagcccaggagttcaagatcagcctgggtaacattgcaaaaaccatctcttaaaaaaaataaataaaagatatagaacaaaaaaagtccccacacctctttcccattcagtcgtccaccctccaatccccaaagcaaccacttttctattttctaccataaattagttttatctcttctggaatttcataaaaatgaaattatacagtatgcatctttttttacagagtttaaactctatgtactctttttgtaaggcttctttcactcagcataatttttacttttttaaaaattttttgggggagacagagtctcactctgttgcccaagctggagtgtagtggcatgtgatcataactcactgcagccttgaactcttgggctcaagcaatcctcccgcctcagcatcccgagtagctgggagactacaggtgcacaccaccatgcctggctagtttataaactttttgtagagacaaggtctcaccatgttgcccaggctggccactaactcctggcctcaagtgatcctccctccttagcctcccaaagctctgaattatattcataagccactgggcctggttgactcagcataatttttcttgagagtcttaatatgttgctacatgtatcagcaatttgcttctttttattgctgagtagtattccattgtatgaatacaccatggtttgtttatccgttttcctatgtatggacacctgggctgtttccagttcttagctattataaataaagctactctgcacaatctt

SEQ ID NO: 25863 - protein, 926 aa, Homo sapiens
MNESASQEELRPAQENRKEDKERKWNLTEVKELHETLQSVPDVPVKEDTNSVVEKAMDEIKSQELNLEGQRKISPGSIKDSKTEASGNIAIRKSAKVIFALDETELKSKPEHTWKKNLFERMEARAQAMQQKIIDKENLKKELEKKAEKKLPRDNLAKEWFNTDSMTLNNTAYLLDKLLPTLVPGVENMLTQVEKKKVLTEADTPSKFDPINYLGEYLIRNNPNYIKDPGMSGYQRLMKEVTEDLKIYVPDTICNRVSKMKENVKQNRKQRESIDKIIVKVANTRKQALQEQFDEWILDPKGMIPKSVIQNVLQEFFQNPDFKLGSHCKQLDITDSTEPRLNKMEFTEYISSHIKDLKSEMFEELLKHLCHSADEFREVIKADMRRQMFAELFLHCDHGKVGFLDRQRTLALLELFYDHSSQMLRSLLRNPRQWPFIEFEEINLTELWGDMDNQKHIYEGFDKVLLEMNTLLSANHASKTQSKLLESPDQPKLNEQRTSTPSPNPPEQQRGVTAEQGPQRISIEEQQQGKKPTAEQELYIESVIEPGTHTESTLEQGSSRRLLTEQETHRESTTEQGQHKGSIEGQGPRRVSVSEQGSSRESVAEQGSRRESIAEQDRHKGSVAEQGSRRMSAAEQGSLRESVIEEPYQKSEQGPYGEIISEEQEDIGSTSQSRKDSILKSTKYGEPITSEYIEVPLQEKRSWEQTYEEEIFLSSELQEEVPTLSRKDHFPETTKKEVQKDKPCEPKSQKIEGKSWSGEFFTCNWKMKYVTFEDEEQANLIYGNSRFTDLHSIIRNIQSCKEVKGRTAFNGVSFNLLQFVQLLETFVGEDAPLSVSETLTSFFKEGYVETEQEKMNALEQFSQNAFQVRQRLLLEAIFQKWDSDGSGFLDLKEVDELLYTYKEGMEKESMKKGLTLSPGWSAVAQL

SEQ ID NO: 25864 - DNA, 3986 bp, Homo sapiens
aagaagaaggttttgacagaagctgatactccaagcaagtttgacccaattaattatttgggggaatatttaataagaaacaatcctaattatatcaaagacccaggaatgtctggttaccagaggttgatgaaagaagtcacagaagacctgaagatatatgttcctgacactatctgcaacagagtatccaagatgaaggagaatgttaaacagaatagaaaacaaagagaaagcatagacaaaatcatagtcaaggtggccaacacacggaaacaggctctgcaggagcaattcgatgaatggattctagaccctaaaggaatgattcctaagtcagtgattcagaatgttcttcaagaattctttcaaaatccagatttcaagcttggatcacactgcaaacaactggatattactgactcaacagaaccaagattgaacaaaatggaatttacagaatacatctcttcacatattaaagacttgaagagtgaaatgtttgaggaacttcttaagcacctttgccactctgcagatgaatttcgggaggtcataaaagctgacatgcggaggcagatgttcgctgaactcttcctacattgtgaccacgggaaggtagggtttttggatcggcagaggacattggccctgctggaattgttctatgaccatagttcacaaatgcttaggagtttacttcgaaacccacgacaatggccattcattgaatttgaagagataaacttgactgagttgtggggagacatggataatcagaaacacatttatgaaggttttgacaaagtgctcttggagatgaatacattactttctgcaaatcatgctagcaaaacccaaagtaaattattagaaagtccagatcaacctaaacttaacgaacagagaacatcaacaccatcaccaaacccgccagaacagcagagaggagtaactgcagaacaaggaccacaaagaatttcaattgaagaacaacaacaaggcaaaaagccaactgcagagcaagaactgtacatagaatcagtaatagaaccaggaacacacacagagtcaactctagaacaagggtcaagtagaaggttactgacagaacaagaaacacacagagagtcaactacagaacaaggacagcacaaagggtcaatagaaggacaaggaccacgcagagtgtcagtttcagaacaaggatcaagcagagagtcagttgcagaacaagggtcacgcagagagtctattgcagaacaagatcgacacaaagggtcagtagcagaacaaggatcacgcagaatgtcagctgcagaacagggatcactcagagagtcagtaatagaagaaccataccaaaaatcagaacaaggaccttatggagagataatttcagaagagcaagaagacataggctcaacttcacaatcaagaaaagatagtatcttaaaaagtacaaaatatggggaacctataacctctgagtacattgaagtccctctacaggaaaagaggtcttgggaacaaacatatgaagaggaaatattcctgagttctgaactgcaagaggaagttccaaccttaagcagaaaagatcactttccagaaactacaaaaaaggaagttcagaaagacaagccctgtgaacccaagtcccaaaaaatagaaggaaagtcatggtcaggtgaattttttacttgtaactggaaaatgaagtatgtcacatttgaagatgaggaacaggcaaacttaatctatggtaactccaggttcacagctaaactacacatccaatttccaaagccacaccctggtcacgaagtgagattgtcttcaaaacaatttcagaattacatagaattggttgtgtctgaactcaggggcaatgaagaccaagttctggaaagtgttgtggaatttctgatgaatgctttagagaggagccacattgagagtctgaggaattctgccaggcggaaatggctgcaccaaatccaatgtgctgcagagacaagtggggtgtccctagagccggtgtatagtgagacctttaaggccctcatgcaggatgctgaagcccatggaaataaaaagatcagtgctcacatttccctcttagaagaaaacctactactgcctgagaaagggaatgttctattgaggaatgtggcttgtaccttagatgatgctcaatttgtactgaacagagtgctctacagggacatgaaaggaatcagctttacagtagtggatgaagggaagccaatccatgttccccaagttcagtaccatgggaacatcttcttctggaaccagtcccgtaataagcatgattataatggttcattcctggctctgcctcttcaagatgcatatatgaggatctttggggtcttggctgttgatacccttagagatccccacgaaataaacatctttctacctcatgagatcagattctatcagggtgttgctaatgtctttagcactgcctatcactacgtccacagccgggagcacattctgcatattgtgatcactggcataggctggctttatgacgtcacatccagcatcacctccatcactacgtactttgtagagcctagcccagcccaggattcagactatgttttacgcaacatgatggttacagggcagctgggtctaacagaaatccacaaaaatcctcctaccatccacaggaagtcatgcatcttcagagatttcctctttaaatgtactgacagttcagaagttgttctggcttctgcctgtggagaaacgcatatagtagttccacttcgtgagagaacaggagaggctctgggagtcctcgattttaacatcggccaaaataggatgttgttgtgtcaagaatataaagatctacagaaaatgatgaaagtggtccaagtggcctgctatgaaatacttggcgagttctctggagagataaagaaaaaatatatcttagagattgaaaatgtcagggaagtccagcgggcaggaattctcttcttccgaatcatgctgctcgagctacaggaaagcatccaactactcaattccatggaatttgtgtcactgttgctctatgaccatactcttgtaacagagccaaattctcctcaagacagcaaatctatggagttggaagccaacgtgaaactagtgcgtgacatcctgaaggcggttatcttgttctttcatccagagttggaattttcaagtgactttggaagttgggataagtgtaaattttatgttaacaaatatttagtcaacaatatttgtgcctttgatccaactgccaagcatgtggaagttaatgtacagcttattgatgaatatatcagagatcattcccgaactgaagtatggaaatttggtaatgttgtcattgaacatctataccactggatacacatctgttcagctctcatgaagataaccaaacaactaaatagtggtattacacctccgttgccctccaagactgacaattatatgtatgcaaaaatgccaggggaaggtttgcaagagaagtgataatggatgataatggaattgatactgtatttaggatcctttgtttgttatcagttttgtttgttaactataaaatattttccattggaaaggggtacctataaatgtcttctgctgctaatatttatctcagcactttctaaacccaaaagtgctacctaagaagaaatttagccaaaaaatacccagctaaggtagccatagccaagtgtatttaagtatgttatagaatatatttgaaagcttcctttcagtttgagctttgtatctgctgtggaactgttatggttgattgggtagttatttttcattcttataaggttcaaagtaacagctgaggatttagaaaacaagaataccaaatagaatacgaaataataaagataaaccaaaagaataccaaataataaagatttttaagaaatgga

SEQ ID NO: 25865 - protein, 1149 aa, Homo sapiens
MSGYQRLMKEVTEDLKIYVPDTICNRVSKMKENVKQNRKQRESIDKIIVKVANTRKQALQEQFDEWILDPKGMIPKSVIQNVLQEFFQNPDFKLGSHCKQLDITDSTEPRLNKMEFTEYISSHIKDLKSEMFEELLKHLCHSADEFREVIKADMRRQMFAELFLHCDHGKVGFLDRQRTLALLELFYDHSSQMLRSLLRNPRQWPFIEFEEINLTELWGDMDNQKHIYEGFDKVLLEMNTLLSANHASKTQSKLLESPDQPKLNEQRTSTPSPNPPEQQRGVTAEQGPQRISIEEQQQGKKPTAEQELYIESVIEPGTHTESTLEQGSSRRLLTEQETHRESTTEQGQHKGSIEGQGPRRVSVSEQGSSRESVAEQGSRRESIAEQDRHKGSVAEQGSRRMSAAEQGSLRESVIEEPYQKSEQGPYGEIISEEQEDIGSTSQSRKDSILKSTKYGEPITSEYIEVPLQEKRSWEQTYEEEIFLSSELQEEVPTLSRKDHFPETTKKEVQKDKPCEPKSQKIEGKSWSGEFFTCNWKMKYVTFEDEEQANLIYGNSRFTAKLHIQFPKPHPGHEVRLSSKQFQNYIELVVSELRGNEDQVLESVVEFLMNALERSHIESLRNSARRKWLHQIQCAAETSGVSLEPVYSETFKALMQDAEAHGNKKISAHISLLEENLLLPEKGNVLLRNVACTLDDAQFVLNRVLYRDMKGISFTVVDEGKPIHVPQVQYHGNIFFWNQSRNKHDYNGSFLALPLQDAYMRIFGVLAVDTLRDPHEINIFLPHEIRFYQGVANVFSTAYHYVHSREHILHIVITGIGWLYDVTSSITSITTYFVEPSPAQDSDYVLRNMMVTGQLGLTEIHKNPPTIHRKSCIFRDFLFKCTDSSEVVLASACGETHIVVPLRERTGEALGVLDFNIGQNRMLLCQEYKDLQKMMKVVQVACYEILGEFSGEIKKKYILEIENVREVQRAGILFFRIMLLELQESIQLLNSMEFVSLLLYDHTLVTEPNSPQDSKSMELEANVKLVRDILKAVILFFHPELEFSSDFGSWDKCKFYVNKYLVNNICAFDPTAKHVEVNVQLIDEYIRDHSRTEVWKFGNVVIEHLYHWIHICSALMKITKQLNSGITPPLPSKTDNYMYAKMPGEGLQEK

SEQ ID NO: 25866 - DNA, 497 bp, Homo sapiens
atactcctgcctcagcctcttgagtggctggctttacagggatgcaccactgctgaatcactgcattttcccttaatatcatgcttagcctcaaagtaaacctgttttaatagaagacgctggactttttttggaataaacacagaatgctagctagcacaatgaacatatatcttccgtgctttattatcctgtttgtatcctagtttagccaaaatgctttccaagtccgacagaggcttctcctagaagccatctttcagaagtgggacagtgatggctcaggcttcctggatctgaaggaagttgatgaactcttgtacacatacaaggagggaatggaaaaagaatctatgaagaaaggtctcactctgtcgccaggctggagtgcagtggcgcaactgtagctcactgcagcctccaactcccggactcaagcgatcatcccatcacagactcctgagcaactgggactacagggaaagaaggaagttttt

SEQ ID NO: 25867 - protein, 49 aa, Homo sapiens
TLVHIQGGNGKRIYEERSHSVARLECSGATVAHCSLQLPDSSDHPITDS

SEQ ID NO: 25868 - DNA, 384 bp, Homo sapiens
atcagatccaactcctttagtttctcacgttttggcctttaagatgcggagatcacgggaggccgcatcaaaagtaaggattacacatcaaaggtaaaactttcaaagaactcgccaagtatttcatagcaggccacttggaccactttcatcattttctgtagatctttatattcttgacacaacaacatcctattttggccgatgttaaaatcgaggactcccagagcctctcctgttctctcacgaagtggaactactatatgcgtttctccacaggcagaagccagaacaacttctgaactgtcagtacatttaaagaggaaatctctgaaatcaaaaccaaataagcacaaggatattaaacatctgtctgttcacatc

SEQ ID NO: 25869 - protein, 59 aa, Homo sapiens
MLKSRTPRASPVLSRSGTTICVSPQAEARTTSELSVHLKRKSLKSKPNKHKDIKHLSVH

SEQ ID NO: 25870 - DNA, 452 bp, Homo sapiens
cagagattgaaaatgtcagggaagtccagcgggcaggaattctcttcttccgaatcatgctgctcgagctacaggaaagcatccaactactcaattccatggaatttgtgtcactgttgctctatgaccatactcttgtaacagagccaaattctcctcaagacagcaaatctatggagttggaagccaacgtgaaactagtgcgtgacatcctgaaggcggttatcttgttctttcatccagagttggaattttcaagtgactttggaagttgggataagtgtaaattttatgttaacaaatatttagtcaacaatatttgtgcctttgatccaactgccaagcatgtggaagttaatgtacagcttattgatgaatatatcagaggtaaatttccacttaattacagcctaaatctatgccaacagcaataaaacacagttgtgattttt

SEQ ID NO: 25871 - protein, 125 aa, Homo sapiens
MLLELQESIQLLNSMEFVSLLLYDHTLVTEPNSPQDSKSMELEANVKLVRDILKAVILFFHPELEFSSDFGSWDKCKFYVNKYLVNNICAFDPTAKHVEVNVQLIDEYIRGKFPLNYSLNLCQQQ

SEQ ID NO: 25872 - DNA, 4388 bp, Homo sapiens
gggccgttctcgccgcgagccgatgggggcggggaaaagtccggctgggccgggacaaaagccggatcccgggaagctaccggctgctggggtgctccggattttgcggggttcgtcgggcctgtggaagaagcgccgcgcacggacttcggcagaggtagagcaggtctctctgcagccatgtcggccaaggcaatttcagagcagacgggcaaagaactcctttacaagttcatctgtaccacctcagccatccagaatcggttcaagtatgctcgggtcactcctgacacagactgggcccgcttgctgcaggaccacccctggctgctcagccagaacttggtagtcaagccagaccagctgatcaaacgtcgtggaaaacttggtctcgttggggtcaacctcactctggatggggtcaagtcctggctgaagccacggctgggacaggaagccacagttggcaaggccacaggcttcctcaagaactttctgatcgagcccttcgtcccccacagtcaggctgaggagttctatgtctgcatctatgccacccgagaaggggactacgtcctgttccaccacgaggggggtgtggacgtgggtgatgtggacgccaaggcccagaagctgcttgttggcgtggatgagaaactgaatcctgaggacatcaaaaaacacctgttggtccacgcccctgaagacaagaaagaaattctggccagttttatctccggcctcttcaatttctacgaggacttgtacttcacctacctcgagatcaatccccttgtagtgaccaaagatggagtctatgtccttgacttggcggccaaggtggacgccactgccgactacatctgcaaagtgaagtggggtgacatcgagttccctccccccttcgggcgggaggcatatccagaggaagcctacattgcagacctcgatgccaaaagtggggcaagcctgaagctgaccttgctgaaccccaaagggaggatctggaccatggtggccgggggtggcgcctctgtcgtgtacagcgataccatctgtgatctagggggtgtcaacgagctggcaaactatggggagtactcaggcgcccccagcgagcagcagacctatgactatgccaagactatcctctccctcatgacccgagagaagcacccagatggcaagatcctcatcattggaggcagcatcgcaaacttcaccaacgtggctgccacgttcaagggcatcgtgagagcaattcgagattaccagggccccctgaaggagcacgaagtcacaatctttgtccgaagaggtggccccaactatcaggagggcttacgggtgatgggagaagtcgggaagaccactgggatccccatccatgtctttggcacagagactcacatgacggccattgtgggcatggccctgggccaccggcccatccccaaccagccacccacagcggcccacactgcaaacttcctcctcaacgccagcgggagcacatcgacgccagcccccagcaggacagcatctttttctgagtccagggccgatgaggtggcgcctgcaaagaaggccaagcctgccatgccacaagattcagtcccaagtccaagatccctgcaaggaaagagcaccaccctcttcagccgccacaccaaggccattgtgtggggcatgcagacccgggccgtgcaaggcatgctggactttgactatgtctgctcccgagacgagccctcagtggctgccatggtctaccctttcactggggaccacaagcagaagttttactgggggcacaaagagatcctgatccctgtcttcaagaacatggctgatgccatgaggaagcatccggaggtagatgtgctcatcaactttgcctctctccgctctgcctatgacagcaccatggagaccatgaactatgcccagatccggaccatcgccatcatagctgaaggcatccctgaggccctcacgagaaagctgatcaagaaggcggaccagaagggagtgaccatcatcggacctgccactgttggaggcatcaagcctgggtgctttaagattggcaacacaggtgggatgctggacaacatcctggcctccaaactgtaccgcccaggcagcgtggcctatgtctcacgttccggaggcatgtccaacgagctcaacaatatcatctctcggaccacggatggcgtctatgagggcgtggccattggtggggacaggtacccgggctccacattcatggatcatgtgttacgctatcaggacactccaggagtcaaaatgattgtggttcttggagagattgggggcactgaggaatataagatttgccggggcatcaaggagggccgcctcactaagcccatcgtctgctggtgcatcgggacgtgtgccaccatgttctcctctgaggtccagtttggccatgctggagcttgtgccaaccaggcttctgaaactgcagtagccaagaaccaggctttgaaggaagcaggagtgtttgtgccccggagctttgatgagcttggagagatcatccagtctgtatacgaagatctcgtggccaatggagtcattgtacctgcccaggaggtgccgcccccaaccgtgcccatggactactcctgggccagggagcttggtttgatccgcaaacctgcctcgttcatgaccagcatctgcgatgagcgaggacaggagctcatctacgcgggcatgcccatcactgaggtcttcaaggaagagatgggcattggcggggtcctcggcctcctctggttccagaaaaggttgcctaagtactcttgccagttcattgagatgtgtctgatggtgacagctgatcacgggccagccgtctctggagcccacaacaccatcatttgtgcgcgagctgggaaagacctggtctccagcctcacctcggggctgctcaccatcggggatcggtttgggggtgccttggatgcagcagccaagatgttcagtaaagcctttgacagtggcattatccccatggagtttgtgaacaagatgaagaaggaagggaagctgatcatgggcattggtcaccgagtgaagtcgataaacaacccagacatgcgagtgcagatcctcaaagattacgtcaggcagcacttccctgccactcctctgctcgattatgcactggaagtagagaagattaccacctcgaagaagccaaatcttatcctgaatgtagatggtctcatcggagtcgcatttgtagacatgcttagaaactgtgggtcctttactcgggaggaagctgatgaatatattgacattggagccctcaatggcatctttgtgctgggaaggagtatggggttcattggacactatcttgatcagaagaggctgaagcaggggctgtatcgtcatccgtgggatgatatttcatatgttcttccggaacacatgagcatgtaacagagccaggaaccctactgcagtaaactgaagacaagatctcttcccccaagaaaaagtgtacagacagctggcagtggagcctgctttatttagcaggggcctggaatgtaaacagccactggggtacaggcaccgaagaccaacatccacaggctaacaccccttcagtccacacaaagaagcttcatattttttttataagcatagaaataaaaaccaagccaatatttgtgactttgctctgctacctgctgtatttattatatggaagcatctaagtactgtcaggatggggtcttcctcattgtagggcgttaggatgttgctttctttttccattagttaaacatttttttctcctttggaggaagggaatgaaacatttatggcctcaagatactatacatttaaagcaccccaatgtctctctttttttttttttacttccctttcttcttccttatataacatgaagaacattgtattaatctgatttttaaagatctttttgtatgttacgtgttaagggcttgtttggtatcccactgaaatgttctgtgttgcagaccagagtctgtttatgtcagggggatggggccattgcatccttagccattgtcacaaaatatgtggagtagtaacttaatatgtaaagttgtaacatacatacatttaaaatggaaatgcagaaagctgtgaaatgtcttgtgtcttatgttctctgtatttatgcagctgatttgtctgtctgtaactgaagtgtgggtccaaggactcctaactactttgcatctgtaatccacaaagattctgggcagctgccacctcagtctcttctctgtattatcatagtctggtttaaataaactatatagtaacaatgaaggcatactgctggc

SEQ ID NO: 25873 - protein, 1101 aa, Homo sapiens; identical to SEQ ID NO: 3441

SEQ ID NO: 25874 - DNA, 4358 bp, Homo sapiens
gggccgttctcgccgcgagccgatgggggcggggaaaagtccggctgggccgggacaaaagccggatcccgggaagctaccggctgctggggtgctccggattttgcggggttcgtcgggcctgtggaagaagcgccgcgcacggacttcggcagaggtagagcaggtctctctgcagccatgtcggccaaggcaatttcagagcagacgggcaaagaactcctttacaagttcatctgtaccacctcagccatccagaatcggttcaagtatgctcgggtcactcctgacacagactgggcccgcttgctgcaggaccacccctggctgctcagccagaacttggtagtcaagccagaccagctgatcaaacgtcgtggaaaacttggtctcgttggggtcaacctcactctggatggggtcaagtcctggctgaagccacggctgggacaggaagccacagttggcaaggccacaggcttcctcaagaactttctgatcgagcccttcgtcccccacagtcaggctgaggagttctatgtctgcatctatgccacccgagaaggggactacgtcctgttccaccacgaggggggtgtggacgtgggtgatgtggacgccaaggcccagaagctgcttgttggcgtggatgagaaactgaatcctgaggacatcaaaaaacacctgttggtccacgcccctgaagacaagaaagaaattctggccagttttatctccggcctcttcaatttctacgaggacttgtacttcacctacctcgagatcaatccccttgtagtgaccaaagatggagtctatgtccttgacttggcggccaaggtggacgccactgccgactacatctgcaaagtgaagtggggtgacatcgagttccctccccccttcgggcgggaggcatatccagaggaagcctacattgcagacctcgatgccaaaagtggggcaagcctgaagctgaccttgctgaaccccaaagggaggatctggaccatggtggccgggggtggcgcctctgtcgtgtacagcgataccatctgtgatctagggggtgtcaacgagctggcaaactatggggagtactcaggcgcccccagcgagcagcagacctatgactatgccaagactatcctctccctcatgacccgagagaagcacccagatggcaagatcctcatcattggaggcagcatcgcaaacttcaccaacgtggctgccacgttcaagggcatcgtgagagcaattcgagattaccagggccccctgaaggagcacgaagtcacaatctttgtccgaagaggtggccccaactatcaggagggcttacgggtgatgggagaagtcgggaagaccactgggatccccatccatgtctttggcacagagactcacatgacggccattgtgggcatggccctgggccaccggcccatccccaaccagccacccacagcggcccacactgcaaacttcctcctcaacgccagcgggagcacatcgacgccagcccccagcaggacagcatctttttctgagtccagggccgatgaggtggcgcctgcaaagaaggccaagcctgccatgccacaaggaaagagcaccaccctcttcagccgccacaccaaggccattgtgtggggcatgcagacccgggccgtgcaaggcatgctggactttgactatgtctgctcccgagacgagccctcagtggctgccatggtctaccctttcactggggaccacaagcagaagttttactgggggcacaaagagatcctgatccctgtcttcaagaacatggctgatgccatgaggaagcatccggaggtagatgtgctcatcaactttgcctctctccgctctgcctatgacagcaccatggagaccatgaactatgcccagatccggaccatcgccatcatagctgaaggcatccctgaggccctcacgagaaagctgatcaagaaggcggaccagaagggagtgaccatcatcggacctgccactgttggaggcatcaagcctgggtgctttaagattggcaacacaggtgggatgctggacaacatcctggcctccaaactgtaccgcccaggcagcgtggcctatgtctcacgttccggaggcatgtccaacgagctcaacaatatcatctctcggaccacggatggcgtctatgagggcgtggccattggtggggacaggtacccgggctccacattcatggatcatgtgttacgctatcaggacactccaggagtcaaaatgattgtggttcttggagagattgggggcactgaggaatataagatttgccggggcatcaaggagggccgcctcactaagcccatcgtctgctggtgcatcgggacgtgtgccaccatgttctcctctgaggtccagtttggccatgctggagcttgtgccaaccaggcttctgaaactgcagtagccaagaaccaggctttgaaggaagcaggagtgtttgtgccccggagctttgatgagcttggagagatcatccagtctgtatacgaagatctcgtggccaatggagtcattgtacctgcccaggaggtgccgcccccaaccgtgcccatggactactcctgggccagggagcttggtttgatccgcaaacctgcctcgttcatgaccagcatctgcgatgagcgaggacaggagctcatctacgcgggcatgcccatcactgaggtcttcaaggaagagatgggcattggcggggtcctcggcctcctctggttccagaaaaggttgcctaagtactcttgccagttcattgagatgtgtctgatggtgacagctgatcacgggccagccgtctctggagcccacaacaccatcatttgtgcgcgagctgggaaagacctggtctccagcctcacctcggggctgctcaccatcggggatcggtttgggggtgccttggatgcagcagccaagatgttcagtaaagcctttgacagtggcattatccccatggagtttgtgaacaagatgaagaaggaagggaagctgatcatgggcattggtcaccgagtgaagtcgataaacaacccagacatgcgagtgcagatcctcaaagattacgtcaggcagcacttccctgccactcctctgctcgattatgcactggaagtagagaagattaccacctcgaagaagccaaatcttatcctgaatgtagatggtctcatcggagtcgcatttgtagacatgcttagaaactgtgggtcctttactcgggaggaagctgatgaatatattgacattggagccctcaatggcatctttgtgctgggaaggagtatggggttcattggacactatcttgatcagaagaggctgaagcaggggctgtatcgtcatccgtgggatgatatttcatatgttcttccggaacacatgagcatgtaacagagccaggaaccctactgcagtaaactgaagacaagatctcttcccccaagaaaaagtgtacagacagctggcagtggagcctgctttatttagcaggggcctggaatgtaaacagccactggggtacaggcaccgaagaccaacatccacaggctaacaccccttcagtccacacaaagaagcttcatattttttttataagcatagaaataaaaaccaagccaatatttgtgactttgctctgctacctgctgtatttattatatggaagcatctaagtactgtcaggatggggtcttcctcattgtagggcgttaggatgttgctttctttttccattagttaaacatttttttctcctttggaggaagggaatgaaacatttatggcctcaagatactatacatttaaagcaccccaatgtctctctttttttttttttacttccctttcttcttccttatataacatgaagaacattgtattaatctgatttttaaagatctttttgtatgttacgtgttaagggcttgtttggtatcccactgaaatgttctgtgttgcagaccagagtctgtttatgtcagggggatggggccattgcatccttagccattgtcacaaaatatgtggagtagtaacttaatatgtaaagttgtaacatacatacatttaaaatggaaatgcagaaagctgtgaaatgtcttgtgtcttatgttctctgtatttatgcagctgatttgtctgtctgtaactgaagtgtgggtccaaggactcctaactactttgcatctgtaatccacaaagattctgggcagctgccacctcagtctcttctctgtattatcatagtctggtttaaataaactatatagtaacaatgaaggcatactgctggc

SEQ ID NO: 25875 - protein, 1091 aa, Homo sapiens; identical to SEQ ID NO: 3443

SEQ ID NO: 25876 - DNA, 341 bp, Homo sapiens
gaatcactggggatgctactaagggtgcctctgggaaagacaaaaacactcatttgaagacctccagggaccccataacggcagaactcggcactgcacggtatctgccaaggttggagaccgcggcaggcgctgggactggcccattgccaggctcgacaggagggcggcggcagcatcctccagccccttgaggacctttccccggccagacttggcgtcagctcaagggtggggtggcaccccggccatctgtcacttaggggctggactcgacgatacctccagtgcgaggagggtccttgctgcgagattccagtcctcgcggcgagacgaggcga

SEQ ID NO: 25877 - protein, 105 aa, Homo sapiens
GCLWERQKHSFEDLQGPHNGRTRHCTVSAKVGDRGRRWDWPIARLDRRAAAASSSPLRTFPRPDLASAQGWGGTPAICHLGAGLDDTSSARRVLAARFQSSRRDE

SEQ ID NO: 25878 - DNA, 1660 bp, Homo sapiens
catctcatggttgctaagaaacggagcttccacaaaccagatagaggttctccagcttttctttgattgtctctgctttagcgtctctaaatccggtcaccatgtcggaccccgaaggcgagaccttgcgaagcacctttccctcttatatggccgaaggcgagcggctctacctgtgcggggaattttctaaagccgcgcagagcttcagcaacgctctttaccttcaggatggagacaagaactgcctggttgctcgctcaaagtgcttcctgaagatgggagacttggagagatccctgaaggatgctgaggcttcgctccagagtgacccagctttctgtaaggggattttgcaaaaggctgagacactgtacaccatgggagactttgagtttgccttggtattctatcatcgaggctacaagctgaggcctgatcgggaattcagagttggcattcagaaagcccaggaagccatcaacaactcagtgggaagtccttcttccattaagctggagaacaaaggggacctctccttcttaagcaagcaggctgagaatataaaagcccagcagaagcctcagcccatgaaacacctcttacaccccaccaagggagagcccaagtggaaggcctcgctcaagagtgagaagactgtccgccagcttctgggggagctctacgtggacaaagagtatttggagaagctcctattggatgaagtgaccttcctgatgcaaaatcgagagcccttgacaacattggcagagtttttgccagagttgggaaattccagcaagccattgacacgtgagtgaagctgagagacttcgagtcagccgtgaacaattttgagaaggccctggagagagcaaagcttgtgcataacaacgaggcgcagcaggccatcatcagtgccttggacgatgccaacaagggtatcatcagagaactgaggaaaaccaactacgtggagaatctcaaagaaaaaagcgagggagaagcttcactgtatgaagatagaataataacaagagagaaggacatgaggagagtgagagatgagcccgagaaggtggtgaagcagtgggaccatagtgaggatgagaaagagacagatgaggacgatgaggcttttggggaagctctgcagagcccagcaagcggaaagcagagtgtggaagcaggaaaagccagaagcgatttgggagcagttgccaagggcctgtcaggagaattaggcacaagatcaggagaaacaggcaggaagctactagaagctggcagaagagagtcaagagaaatttataggaggccttcgggagaattagagcaaagactctcaggagaattcagcagacaggaaccagaagaactaaagaaactttcagaagtgggcagaagagagccagaagaactgggaaaaacacaatttggagaaataggagaaacgaaaaaaacaggaaatgagatggaaaaggaatatgaatgaagccatcggtagagatgaggatcaggaagctggtgttcagagggatcatgggattttattaaactggattttcaagcgatttgtctgttataggaaaaatgagggttttacttctgctgctttccatcactattttgccattaaataggtgtctttcactcttgc

SEQ ID NO: 25879 - protein, 239 aa, Homo sapiens
MSDPEGETLRSTFPSYMAEGERLYLCGEFSKAAQSFSNALYLQDGDKNCLVARSKCFLKMGDLERSLKDAEASLQSDPAFCKGILQKAETLYTMGDFEFALVFYHRGYKLRPDREFRVGIQKAQEAINNSVGSPSSIKLENKGDLSFLSKQAENIKAQQKPQPMKHLLHPTKGEPKWKASLKSEKTVRQLLGELYVDKEYLEKLLLDEVTFLMQNREPLTTLAEFLPELGNSSKPLTRE

SEQ ID NO: 25880 - DNA, 770 bp, Homo sapiens
gctaagaaacggagcttccacaaaccagatagaggttctccagcttttctttgattgtctctgctttagcgtctctaaatccggtcaccatgtcggaccccgaaggcgagaccttgcgaagcacctttccctcttatatggccgaaggcgagcggctctacctgtgcggggaattttctaaagccgcgcagagcttcagcaacgctctttaccttcaggatggagacaagaactgcctggttgctcgctcaaagtgcttcctgaagatgggagacttggagagatccctgaaggatgctgaggcttcgctccagagtgacccagctttctgtaaggtcattgcctaagtccctgccccctgtattccaaccttgaccttcaacccaggacccttctgttccaccacatgtccttcttccattaagctggagaacaaaggggacctctccttcttaagcaagcaggctgagaatataaaagcccagcagaagcctcagcccatgaaacacctcttacaccccaccaagggagagcccaagtggaaggcctcgctcaagagtgagaagactgtccgccagcttctgggggagctctacgtggacaaagagtatttggagaagctcctattggatgaagacctgatcaaaggcaccatgaagggcggcctgactgtggaggacctcatcatgacgggcatcaactacctggatactcacagcaacttctggaggcagcagaagccgatctacgccagggagcgggaccggaag

SEQ ID NO: 25881 - protein, 89 aa, Homo sapiens
MKHLLHPTKGEPKWKASLKSEKTVRQLLGELYVDKEYLEKLLLDEDLIKGTMKGGLTVEDLIMTGINYLDTHSNFWRQQKPIYARERDR

SEQ ID NO: 25882 - DNA, 2075 bp, Homo sapiens
aaacggagcttccacaaaccagatagaggttctccagcttttctttgattgtctctgctttagcgtctctaaatccggtcaccatgtcggaccccgaaggcgagaccttgcgaagcacctttccctcttatatggccgaaggcgagcggctctacctgtgcggggaattttctaaagccgcgcagagcttcagcaacgctctttaccttcaggatggagacaagaactgcctggttgctcgctcaaagtgcttcctgaagatgggagacttggagagatccctgaaggatgctgaggcttcgctccagagtgacccagctttctgtaaggggattttgcaaaaggctgagacactgtacaccatgggagactttgagtttgccttggtattctatcatcgaggctacaagctgaggcctgatcgggaattcagagttggcattcagaaagcccaggaagccatcaacaactcagtgggaagtccttcttccattaagctggagaacaaaggggacctctccttcttaagcaagcaggctgagaatataaaagcccagcagaagcctcagcccatgaaacacctcttacaccccaccaagggagagcccaagtggaaggcctcgctcaagagtgagaagactgtccgccagcttctgggggagctctacgtggacaaagagtatttggagaagctcctattggatgaagacctgatcaaaggcaccatgaagggcggcctgactgtggaggacctcatcatgacgggcatcaactacctggatactcacagcaacttctggaggcagcagaagccgatctacgccagggagcgggaccggaagctgatgcaagagaaatggctgcgggaccacaaacgccgtccctcacagacagcccattacatcctcaagagcctggaggacattgatatgttgctcacaagtggcagtgctgaagggagtcttcagaaagctgagaaagtgctgaagaaggtactggaatggaacaaggaagaggtacccaacaaggatgaactggttggaaacttgtatagctgcatagggaatgcccagattgagctggggcagatggaggcagccctgcagagccacagaaaggacctggagatcgccaaggaatatgaccttcctgatgcaaaatcgagagcccttgacaacattggcagagtttttgccagagttgggaaattccagcaagccattgacacgtgagtgaagctgagagacttcgagtcagccgtgaacaattttgagaaggccctggagagagcaaagcttgtgcataacaacgaggcgcagcaggccatcatcagtgccttggacgatgccaacaagggtatcatcagagaactgaggaaaaccaactacgtggagaatctcaaagaaaaaagcgagggagaagcttcactgtatgaagatagaataataacaagagagaaggacatgaggagagtgagagatgagcccgagaaggtggtgaagcagtgggaccatagtgaggatgagaaagagacagatgaggacgatgaggcttttggggaagctctgcagagcccagcaagcggaaagcagagtgtggaagcaggaaaagccagaagcgatttgggagcagttgccaagggcctgtcaggagaattaggcacaagatcaggagaaacaggcaggaagctactagaagctggcagaagagagtcaagagaaatttataggaggccttcgggagaattagagcaaagactctcaggagaattcagcagacaggaaccagaagaactaaagaaactttcagaagtgggcagaagagagccagaagaactgggaaaaacacaatttggagaaataggagaaacgaaaaaaacaggaaatgagatggaaaaggaatatgaatgaagccatcggtagagatgaggatcaggaagctggtgttcagagggatcatgggattttattaaactggattttcaagcgatttgtctgttataggaaaaatgagggttttacttctgctgctttccatcactattttgccattaaataggtgtctttcactcttgc

SEQ ID NO: 25883 - protein, 382 aa, Homo sapiens
MSDPEGETLRSTFPSYMAEGERLYLCGEFSKAAQSFSNALYLQDGDKNCLVARSKCFLKMGDLERSLKDAEASLQSDPAFCKGILQKAETLYTMGDFEFALVFYHRGYKLRPDREFRVGIQKAQEAINNSVGSPSSIKLENKGDLSFLSKQAENIKAQQKPQPMKHLLHPTKGEPKWKASLKSEKTVRQLLGELYVDKEYLEKLLLDEDLIKGTMKGGLTVEDLIMTGINYLDTHSNFWRQQKPIYARERDRKLMQEKWLRDHKRRPSQTAHYILKSLEDIDMLLTSGSAEGSLQKAEKVLKKVLEWNKEEVPNKDELVGNLYSCIGNAQIELGQMEAALQSHRKDLEIAKEYDLPDAKSRALDNIGRVFARVGKFQQAIDT

SEQ ID NO: 25884 - DNA, 466 bp, Homo sapiens
tccctgaaggatgctgaggcttcgctccagagtgacccagctttctgtaaggtcattgcctaagtccctgccccctgtattccaaccttgaccttcaacccaggacccttctgttccaccacatgtccttcttccattaagctggagaacaaaggggacctctccttcttaagcaagcaggctgagaatataaaagcccagcagaagcctcagcccatgaaacacctcttacaccccaccaagggagagcccaagtggaaggcctcgctcaagagtgagaagactgtccgccagcttctgggggagctctacgtggacaaagagtatttggagaagctcctattggatgaaggtttcggacactttgttggcacggggccttgggggaaaggaaatctgggtggatgcttcatgcatgagctgaaggcagaacctgtcatataatattagctgacgtgtacctgtg

SEQ ID NO: 25885 - protein, 75 aa, Homo sapiens [sequence omitted]

SEQ ID NO: 25886 - DNA, 457 bp, Homo sapiens
ggagactttgagtttgccttggtattctatcatcgaggctacaagctgaggcctgatcgggaattcagagttggcattcagaaagcccaggaagccatcaacaactcagtgggaagtccttcttccattaagctggagaacaaaggggacctctccttcttaagcaagcaggctgagaatataaaagcccagcagaagcctcagcccatgaaacacctcttacaccccaccaagggagagcccaagtggaaggcctcgctcaagagtgagaagactgtccgccagcttctgggggagctctacgtggacaaagagtatttggagaagctcctattggatgaaggtttcggacactttgttggcacggggccttgggggaaaggaaatctgggtggatgcttcatgcatgagctgaaggcagaacctgtcatataatattagctgacgtgtacctgtg

SEQ ID NO: 25887 - protein, 75 aa, Homo sapiens [sequence omitted]

SEQ ID NO: 25888 - DNA, 2662 bp, Homo sapiens
gggtgcccgctccgccccccgggctatgtaaagcggccgggctcgggtcgtgccaccgctggactcccgtgtccctccgcgcaggcgggcggccccggagcgctggtgccggcagaggcggcgacggtggcgcccctcctcatcatgaacagaggcttctcccgaaaaagccacacattcctgcccaagatcttcttccgcaagatgtcatcctcaggggccaaggacaagcctgagctgcagtttcccttccttcaggatgaggacacagtggccacgctgctagagtgcaagacgctcttcatcttgcgcggcctgccaggaagcggcaagtccacgctggcacgggtcatcgtggacaagtaccgtgatggcaccaagatggtgtcggctgacgcttacaagatcacccccggcgctcgaggagccttctccgaggagtacaagcggctcgatgaggacctggctgcctactgccgccgccgggacatcagaattcttgtgcttgatgacaccaaccacgaacgggaacggctggagcagctctttgaaatggccgaccagtaccagtaccaggtggtgctggtggagcccaagacggcgtggcggctggactgtgcccagctcaaggagaagaaccagtggcagctgtcggctgatgacctgaagaagctgaagcctgggctggagaaggacttcctgccgctctacttcggctggttcctgaccaagaagagctctgagaccctccgcaaagccggccaggtcttcctggaagagctggggaaccacaaggccttcaagaaggagctgcgacaattcgtccctggggatgagcccagggagaagatggacttggtcacctactttggaaagagacccccaggcgtgctgcattgcacaaccaagttttgtgactacgggaaggctcccggggcagaggagtacgctcaacaagatgtgttaaagaaatcttactccaaggccttcacgctgaccatctctgccctctttgtgacacccaagacgactggggcccgggtggagttaagcgagcagcaactgcagttgtggccgagtgatgtggacaagctgtcacccactgacaacctgccgcgggggagccgcgcccacatcaccctcggctgtgcagctgacgtagaggccgtgcagacgggccttgacctcttagagattctgcggcaggagaaggggggcagccgaggcgaggaggtgggcgagctaagccggggcaagctctattccttgggcaatgggcgctggatgctgaccctggccaagaacatggaggtcagggccatcttcacggggtactacgggaaaggcaaacctgtgcccacgcaaggtagccggaaggggggcgccttgcagtcctgcaccatcatatgagtgttctcaccaccacttatgcccctagaagggaaggggagagggaaacgtgccctctgtttgatccttgttttgtgacattttttttttttttttttttactcaaagttaacctacctgtaactttttaaaaacttgtaaaataactgaccctcccttcctgtccgccctcttcccctctaatgctcacgctcccaacacaaggtgggcagggaggcaccattcaggaacctggaccaaagctgacgaggctgggccaagccagggatggggccacagccagaaccccgagccctacttccaggttctggttagctcagccccagcccagcccagctgctctgcccagagctgggtgagtggggagacacctcagagccccgcaaaacccactgaccggaggcaaaaggcagtggggctgggggtagttttccatggtcacagagaactagtggtggctctgagaaggggaggacctctgggctttgattccatctccttgtcttttttctttgtttttagagacagggtcctgctatttcccaagctggagtgcagtggtgcgatcatggctcactgcagcctcgaactcctgggctcaagcaatcctcctgagtgatcccatttcttaatcagtgtagccccaagaaggctggggctatttaccagggtagaaaaaggagcttacctcccacctttggtcctaagtccctgccccctccccttcacaccataactaggtaacagtttgataactagggaagaaagcagaacagttaagcagccgccacatccccgctggctgggggcctcactccaggaaggggctggactggctgtcctttccagtggcctggctccgctgtgtggatggggagatcggggccagaggcagaaccctggtgaggaagctccagtcctgctctctacccagcccatcttgcctccatggtgcctctggaggcctctgggcctcctctaacaggggctggtgggcaccaagagccaatggagtagacccctggctggtaagggccaagtcccaccggttgcttctgggaaggggtttctaacactagtctgtgtgctgtggttcctggggtgccctccactgccctctgttcagtaacagggccttgctaatcgggttgtcactcaacaaaagtgctttggatttaagttactatcctggctttgcccaacctcagcaacctgtaagactgataatgaaataaatcatgttaatcctagc

SEQ ID NO: 25889 - protein, 421 aa, Homo sapiens; identical to SEQ ID NO: 3447

SEQ ID NO: 25890 - DNA, 5728 bp, Homo sapiens
gggtgcccgctccgccccccgggctatgtaaagcggccgggctcgggtcgtgccaccgctggactcccgtgtccctccgcgcaggcgggcggccccggagcgctggtgccggcagaggcggcgacggtggcgcccctcctcatcatgaacagaggcttctcccgaaaaagccacacattcctgcccaagatcttcttccgcaagatgtcatcctcaggggccaaggacaagcctgagctgcagtttcccttccttcaggatgaggacacagtggccacgctgctagagtgcaagacgctcttcatcttgcgcggcctgccaggaagcggcaagtccacgctggcacgggtcatcgtggacaagtaccgtgatggcaccaagatggtgtcggctgacgcttacaagatcacccccggcgctcgaggagccttctccgaggagtacaagcggctcgatgaggacctggctgcctactgccgccgccgggacatcagaattcttgtgcttgatgacaccaaccacgaacgggaacggctggagcagctctttgaaatggccgaccagtaccagtaccaggtggtgctggtggagcccaagacggcgtggcggctggactgtgcccagctcaaggagaagaaccagtggcagctgtcggctgatgacctgaagaagctgaagcctgggctggagaaggacttcctgccgctctacttcggctggttcctgaccaagaagagctctgagaccctccgcaaagccggccaggtcttcctggaagagctggggaaccacaaggccttcaagaaggagctgcgacaattcgtccctggggatgagcccagggagaagatggacttggtcacctactttggaaagagacccccaggcgtgctgcattgcacaaccaagttttgtgactacgggaaggctcccggggcagaggagtacgctcaacaagatgtgttaaagaaatcttactccaaggccttcacgctgaccatctctgccctctttgtgacacccaagacgactggggcccgggtggagttaagcgagcagcaactgcagttgtggccgagtgatgtggacaagctgtcacccactgacaacctgccgcgggggagccgcgcccacatcaccctcggctgtgcagctgacgtagaggccgtgcagacgggccttgacctcttagagattctgcggcaggagaaggggggcagccgaggcgaggaggtgggcgagctaagccggggcaagctctattccttgggcaatgggcgctggatgctgaccctggccaagaacatggaggtcagggccatcttcacggggtactacgggaaaggcaaacctgtgcccacgcaaggtagccggaaggggggcgccttgcagtcctgcaccatcatatgagtgttctcaccaccacttatgcccctagaagggaaggggagagggaaacgtgccctctgtttgatccttgttttgtgacattttttttttttttttttttactcaaagttaacctacctgtaactttttaaaaacttgtaaaataactgaccctcccttcctgtccgccctcttcccctctaatgctcacgctcccaacacaaggtgggcagggaggcaccattcaggaacctggaccaaagctgacgaggctgggccaagccagggatggggccacagccagaaccccgagccctacttccaggttctggttagctcagccccagcccagcccagctgctctgcccagagctgggtgagtggggagacacctcagagccccgcaaaacccactgaccggaggcaaaaggcagtggggctgggggtagttttccatggtcacagagaactagtggtggctctgagaaggggaggacctctgggctttgattccatctccttgtcttttttctttgtttttagagacagggtcctgctatttcccaagctggagtgcagtggtgcgatcatggctcactgcagcctcgaactcctgggctcaagcaatcctcctgagtgatcccatttcttaatcagtgtagccccaagaaggctggggctatttaccagggtagaaaaaggagcttacctcccacctttggtcctaagtccctgccccctccccttcacaccataactaggtaacagtttgataactagggaagaaagcagaacagttaagcagccgccacatccccgctggctgggggcctcactccaggaaggggctggactggctgtcctttccagtggcctggctccgctgtgtggatggggagatcggggccagaggcagaaccctggtgaggaagctccagtcctgctctctacccagcccatcttgcctccatggtgcctctggaggcctctgggcctcctctaacaggggctggtgggcaccaagagccaatggagtagacccctggctggtaagggccaagtcccaccggttgcttctgggaaggggtttctaacactagtctgtgtgctgtggttcctggggtgccctccactgccctctgttcagtaacagggccttgctaatcgggttgtcactcaacaaaagtgctttggatttaagttactatcctggctttgcccaacctcagcaacctgtaagactgataatgaaataaatcatgttaatcctagctgtgtgcagtctctcttacccttctgtgcccagctcagtcttccctagggctgggtgtattaggactggctttgtcccacagcttggggccatcggtcctgtctcccctctgctggccgggcacagctgtggtgaggttgggcagctgaacagtgttggctttcatgaggaggcagaaagcagaggctggcctcagactcatacagaaggtgggggttggctgggtacgagggatgtggagcacaaaagcctctcatcccccattaaccagggcaccaagcccacaggtgtccccagcccactggatcagaaagagttcagtaagaccggaagctcctggtatgggtttctcccagttctctagggaaggccacctgcaggtcactgaaacttcaagcaccagggaagatctaacatttgagtcccttccaggccatcagaggcctagtcagccacatgggaaacttccaagacctgactcaggcatcattccaccatggctaaggcaccagccggggaagacttgaaagaaaggggcaggagctcagatgaagagaaatcctaagttacctttctaggtcaaggcctgtccctggccatctctgaacttcagctagagcttcaagtctgtgcctggagctcctgggaaggctactcaccttgaacaccacgcttgacaggacagcatggtgcatgccgctgcatccgtgagcagtgtgtctcctgcatgcagaaagggagcagagaaggccaggggcttttgctaaaaatagtggccagaccagagctctggagccacctgtcccacctcaaatgggtctgggggtcaggaggcagggttttatctctgtctaccatctccctcgaacccacactgcaacaggaactgtgagagtctttgtaagtaaactgccctgtctaggtcagtacccacctgagctttggacgcacacagcttttagtacccacctgagctttggacacacacagcttctagtgatttctggggccccaccgtaaagtgagcatgctttctgaactcgcttctctgtgactgatgttaggctgggcccagaggcacagccggggcctgcctagcactcacatgctggacaggtctgggagaggcagagtgccccacctgccactaggctgggtgcccacagcccgcatgcagcagcttgctgcaccccaagtccaggtcgggctcagctctggctcacagactggagacaatgcagatgccagagcaaagggccaggaagggtcaaaacattttattctcttttttttttcttttttaataaagttaaacagtaaaacaaaaattcacaagctgcctccctgtccacccccgcctccctcccctgccctcggtcttcggcattggttccctttgctccaccccactcacagagacacagggcatccaactgagaaaacgaaactgctctaagcacacggagacgtgatgaagggaggaggtgaactgtttccacattcaagattaaactgagtgaatctgcattttctgggttctgggtggttgcccttcattagccaaattgaaaaaagaaattccctggaccagatgctgaaagagaaaagaggggttggtagttggctatggattttctaaggaagatcactttgctctgattatggaaaagtcttcaagggctgcttcaaactcaaacacagagagaaactctatgggtatcaaacagctcaggctgtttttgggtgcaagagggagcacgtgactgtattatacatgggtagcttctgacctcagcattatctatatagtacctttgctcttgcagagaagccttggtactaggcagttagagatgcctccctgaccctgcagagatgcggtggctaaaggtcccaaggcaaggggtgcctgggaaccttcctgtcttcatccttagcaacagccgagtggatagatgccctgctagatgagaattcagctgcccccgctcatgggcccctctgactcccaaagagctgcctaagaggcaatgagtgtgttggcttgtgatctgggaactcccaagaacagcaggcccacctaccttcaaagctgaagccgccaggaccgccaaagaatgccttgaagatattgtttggatcaaaatctgtagagcagggcaagtaacatggaagggaagaaaaggtgaaaaattagaaatgttcgaagagaactgatgacactgagaacagatctccaaagctttcctggagagtctcactcccctcctttcccaacacttcagactgcaagtgagcaaacctgccccatcccgtgcaaaacatgctacctgatcccactcctaggacatgttcccttctccttccaactgctgccccaaaggaagctttctctgcttcagcttgcttcattgggctgttttctcaacaaatggaatgccatttgcacttacacaagactttccccatactctgtctccctataatgctggagcggctactaaaaaggataaaatgtatcacttaaatgttaccaaaaataaatataagagcaagatctaggatttactgtatttgattccatgtcttttactccgtagactctaggctagaaaaaaagctatggtttattagctgggcgtggtggctcacacctataatcccagtgctttgggagtctaaggtgggaggatcacttgagcccaggagttcaaggctgcagtaagctatgatcacaacactgcaccccagcctgggtgacagcaagaccctgtcttaataacaacaacaaaccaacaaaaacacctactaggtgcaaagtactaggtactttgcatacattacattacttaatcctagtaatgttttgtcagggtaagtatcattcccaattaatactcaacaaaacatatgtaggtggttcaagtaacttgcccacgatcacatggcagcgaaagcagcagaactggaaaatccaactcctgcctgactggctctgtgcacttttgcaaggccacagcatgtctggtggccccatccctgactgactgcccaagcttcacagaa

SEQ ID NO: 25891 - protein, 421 aa, Homo sapiens; identical to SEQ ID NO: 3447

SEQ ID NO: 25892 - DNA, 2537 bp, Homo sapiens
cccgggctatgtaaagcggccgggctcgggtcgtgccaccgctggactcccgtgtccctccgcgcaggcgggcggccccggagcgctggtgccggcagaggcggcgacggtggcgcccctcctcatcatgaacagaggcttctcccgaaaaagccacacattcctgcccaagatcttcttccgcaagatgtcatcctcaggggccaaggacaagcctgagctgcagtttcccttccttcaggatgaggacacagtggccacgctgctagagtgcaagacgctcttcatcttgcgcggcctgccaggaagcggcaagtccacgctggcacgggtcatcgtggacaagtaccgtgatggcaccaagatggtgtcggctgacgcttacaagatcacccccggcgctcgaggagccttctccgaggagtacaagcggctcgatgaggacctggctgcctactgccgccgccgggacatcagaattcttgtgcttgatgacaccaaccacgaacgggaacggctggagcagctctttgaaatggccgaccagtaccagtaccaggtggtgctggtggagcccaagacggcgtggcggtggttcctgaccaagaagagctctgagaccctccgcaaagccggccaggtcttcctggaagagctggggaaccacaaggccttcaagaaggagctgcgacaattcgtccctggggatgagcccagggagaagatggacttggtcacctactttggaaagagacccccaggcgtgctgcattgcacaaccaagttttgtgactacgggaaggctcccggggcagaggagtacgctcaacaagatgtgttaaagaaatcttactccaaggccttcacgctgaccatctctgccctctttgtgacacccaagacgactggggcccgggtggagttaagcgagcagcaactgcagttgtggccgagtgatgtggacaagctgtcacccactgacaacctgccgcgggggagccgcgcccacatcaccctcggctgtgcagctgacgtagaggccgtgcagacgggccttgacctcttagagattctgcggcaggagaaggggggcagccgaggcgaggaggtgggcgagctaagccggggcaagctctattccttgggcaatgggcgctggatgctgaccctggccaagaacatggaggtcagggccatcttcacggggtactacgggaaaggcaaacctgtgcccacgcaaggtagccggaaggggggcgccttgcagtcctgcaccatcatatgagtgttctcaccaccacttatgcccctagaagggaaggggagagggaaacgtgccctctgtttgatccttgttttgtgacattttttttttttttttttttactcaaagttaacctacctgtaactttttaaaaacttgtaaaataactgaccctcccttcctgtccgccctcttcccctctaatgctcacgctcccaacacaaggtgggcagggaggcaccattcaggaacctggaccaaagctgacgaggctgggccaagccagggatggggccacagccagaaccccgagccctacttccaggttctggttagctcagccccagcccagcccagctgctctgcccagagctgggtgagtggggagacacctcagagccccgcaaaacccactgaccggaggcaaaaggcagtggggctgggggtagttttccatggtcacagagaactagtggtggctctgagaaggggaggacctctgggctttgattccatctccttgtcttttttctttgtttttagagacagggtcctgctatttcccaagctggagtgcagtggtgcgatcatggctcactgcagcctcgaactcctgggctcaagcaatcctcctgagtgatcccatttcttaatcagtgtagccccaagaaggctggggctatttaccagggtagaaaaaggagcttacctcccacctttggtcctaagtccctgccccctccccttcacaccataactaggtaacagtttgataactagggaagaaagcagaacagttaagcagccgccacatccccgctggctgggggcctcactccaggaaggggctggactggctgtcctttccagtggcctggctccgctgtgtggatggggagatcggggccagaggcagaaccctggtgaggaagctccagtcctgctctctacccagcccatcttgcctccatggtgcctctggaggcctctgggcctcctctaacaggggctggtgggcaccaagagccaatggagtagacccctggctggtaagggccaagtcccaccggttgcttctgggaaggggtttctaacactagtctgtgtgctgtggttcctggggtgccctccactgccctctgttcagtaacagggccttgctaatcgggttgtcactcaacaaaagtgctttggatttaagttactatcctggctttgcccaacctcagcaacctgtaagactgataatgaaataaatcatgttaatcctagc

SEQ ID NO: 25893 - protein, 385 aa, Homo sapiens
MNRGFSRKSHTFLPKIFFRKMSSSGAKDKPELQFPFLQDEDTVATLLECKTLFILRGLPGSGKSTLARVIVDKYRDGTKMVSADAYKITPGARGAFSEEYKRLDEDLAAYCRRRDIRILVLDDTNHERERLEQLFEMADQYQYQVVLVEPKTAWRWFLTKKSSETLRKAGQVFLEELGNHKAFKKELRQFVPGDEPREKMDLVTYFGKRPPGVLHCTTKFCDYGKAPGAEEYAQQDVLKKSYSKAFTLTISALFVTPKTTGARVELSEQQLQLWPSDVDKLSPTDNLPRGSRAHITLGCAADVEAVQTGLDLLEILRQEKGGSRGEEVGELSRGKLYSLGNGRWMLTLAKNMEVRAIFTGYYGKGKPVPTQGSRKGGALQSCTII

SEQ ID NO: 25894 - DNA, 5603 bp, Homo sapiens
cccgggctatgtaaagcggccgggctcgggtcgtgccaccgctggactcccgtgtccctccgcgcaggcgggcggccccggagcgctggtgccggcagaggcggcgacggtggcgcccctcctcatcatgaacagaggcttctcccgaaaaagccacacattcctgcccaagatcttcttccgcaagatgtcatcctcaggggccaaggacaagcctgagctgcagtttcccttccttcaggatgaggacacagtggccacgctgctagagtgcaagacgctcttcatcttgcgcggcctgccaggaagcggcaagtccacgctggcacgggtcatcgtggacaagtaccgtgatggcaccaagatggtgtcggctgacgcttacaagatcacccccggcgctcgaggagccttctccgaggagtacaagcggctcgatgaggacctggctgcctactgccgccgccgggacatcagaattcttgtgcttgatgacaccaaccacgaacgggaacggctggagcagctctttgaaatggccgaccagtaccagtaccaggtggtgctggtggagcccaagacggcgtggcggtggttcctgaccaagaagagctctgagaccctccgcaaagccggccaggtcttcctggaagagctggggaaccacaaggccttcaagaaggagctgcgacaattcgtccctggggatgagcccagggagaagatggacttggtcacctactttggaaagagacccccaggcgtgctgcattgcacaaccaagttttgtgactacgggaaggctcccggggcagaggagtacgctcaacaagatgtgttaaagaaatcttactccaaggccttcacgctgaccatctctgccctctttgtgacacccaagacgactggggcccgggtggagttaagcgagcagcaactgcagttgtggccgagtgatgtggacaagctgtcacccactgacaacctgccgcgggggagccgcgcccacatcaccctcggctgtgcagctgacgtagaggccgtgcagacgggccttgacctcttagagattctgcggcaggagaaggggggcagccgaggcgaggaggtgggcgagctaagccggggcaagctctattccttgggcaatgggcgctggatgctgaccctggccaagaacatggaggtcagggccatcttcacggggtactacgggaaaggcaaacctgtgcccacgcaaggtagccggaaggggggcgccttgcagtcctgcaccatcatatgagtgttctcaccaccacttatgcccctagaagggaaggggagagggaaacgtgccctctgtttgatccttgttttgtgacattttttttttttttttttttactcaaagttaacctacctgtaactttttaaaaacttgtaaaataactgaccctcccttcctgtccgccctcttcccctctaatgctcacgctcccaacacaaggtgggcagggaggcaccattcaggaacctggaccaaagctgacgaggctgggccaagccagggatggggccacagccagaaccccgagccctacttccaggttctggttagctcagccccagcccagcccagctgctctgcccagagctgggtgagtggggagacacctcagagccccgcaaaacccactgaccggaggcaaaaggcagtggggctgggggtagttttccatggtcacagagaactagtggtggctctgagaaggggaggacctctgggctttgattccatctccttgtcttttttctttgtttttagagacagggtcctgctatttcccaagctggagtgcagtggtgcgatcatggctcactgcagcctcgaactcctgggctcaagcaatcctcctgagtgatcccatttcttaatcagtgtagccccaagaaggctggggctatttaccagggtagaaaaaggagcttacctcccacctttggtcctaagtccctgccccctccccttcacaccataactaggtaacagtttgataactagggaagaaagcagaacagttaagcagccgccacatccccgctggctgggggcctcactccaggaaggggctggactggctgtcctttccagtggcctggctccgctgtgtggatggggagatcggggccagaggcagaaccctggtgaggaagctccagtcctgctctctacccagcccatcttgcctccatggtgcctctggaggcctctgggcctcctctaacaggggctggtgggcaccaagagccaatggagtagacccctggctggtaagggccaagtcccaccggttgcttctgggaaggggtttctaacactagtctgtgtgctgtggttcctggggtgccctccactgccctctgttcagtaacagggccttgctaatcgggttgtcactcaacaaaagtgctttggatttaagttactatcctggctttgcccaacctcagcaacctgtaagactgataatgaaataaatcatgttaatcctagctgtgtgcagtctctcttacccttctgtgcccagctcagtcttccctagggctgggtgtattaggactggctttgtcccacagcttggggccatcggtcctgtctcccctctgctggccgggcacagctgtggtgaggttgggcagctgaacagtgttggctttcatgaggaggcagaaagcagaggctggcctcagactcatacagaaggtgggggttggctgggtacgagggatgtggagcacaaaagcctctcatcccccattaaccagggcaccaagcccacaggtgtccccagcccactggatcagaaagagttcagtaagaccggaagctcctggtatgggtttctcccagttctctagggaaggccacctgcaggtcactgaaacttcaagcaccagggaagatctaacatttgagtcccttccaggccatcagaggcctagtcagccacatgggaaacttccaagacctgactcaggcatcattccaccatggctaaggcaccagccggggaagacttgaaagaaaggggcaggagctcagatgaagagaaatcctaagttacctttctaggtcaaggcctgtccctggccatctctgaacttcagctagagcttcaagtctgtgcctggagctcctgggaaggctactcaccttgaacaccacgcttgacaggacagcatggtgcatgccgctgcatccgtgagcagtgtgtctcctgcatgcagaaagggagcagagaaggccaggggcttttgctaaaaatagtggccagaccagagctctggagccacctgtcccacctcaaatgggtctgggggtcaggaggcagggttttatctctgtctaccatctccctcgaacccacactgcaacaggaactgtgagagtctttgtaagtaaactgccctgtctaggtcagtacccacctgagctttggacgcacacagcttttagtacccacctgagctttggacacacacagcttctagtgatttctggggccccaccgtaaagtgagcatgctttctgaactcgcttctctgtgactgatgttaggctgggcccagaggcacagccggggcctgcctagcactcacatgctggacaggtctgggagaggcagagtgccccacctgccactaggctgggtgcccacagcccgcatgcagcagcttgctgcaccccaagtccaggtcgggctcagctctggctcacagactggagacaatgcagatgccagagcaaagggccaggaagggtcaaaacattttattctcttttttttttcttttttaataaagttaaacagtaaaacaaaaattcacaagctgcctccctgtccacccccgcctccctcccctgccctcggtcttcggcattggttccctttgctccaccccactcacagagacacagggcatccaactgagaaaacgaaactgctctaagcacacggagacgtgatgaagggaggaggtgaactgtttccacattcaagattaaactgagtgaatctgcattttctgggttctgggtggttgcccttcattagccaaattgaaaaaagaaattccctggaccagatgctgaaagagaaaagaggggttggtagttggctatggattttctaaggaagatcactttgctctgattatggaaaagtcttcaagggctgcttcaaactcaaacacagagagaaactctatgggtatcaaacagctcaggctgtttttgggtgcaagagggagcacgtgactgtattatacatgggtagcttctgacctcagcattatctatatagtacctttgctcttgcagagaagccttggtactaggcagttagagatgcctccctgaccctgcagagatgcggtggctaaaggtcccaaggcaaggggtgcctgggaaccttcctgtcttcatccttagcaacagccgagtggatagatgccctgctagatgagaattcagctgcccccgctcatgggcccctctgactcccaaagagctgcctaagaggcaatgagtgtgttggcttgtgatctgggaactcccaagaacagcaggcccacctaccttcaaagctgaagccgccaggaccgccaaagaatgccttgaagatattgtttggatcaaaatctgtagagcagggcaagtaacatggaagggaagaaaaggtgaaaaattagaaatgttcgaagagaactgatgacactgagaacagatctccaaagctttcctggagagtctcactcccctcctttcccaacacttcagactgcaagtgagcaaacctgccccatcccgtgcaaaacatgctacctgatcccactcctaggacatgttcccttctccttccaactgctgccccaaaggaagctttctctgcttcagcttgcttcattgggctgttttctcaacaaatggaatgccatttgcacttacacaagactttccccatactctgtctccctataatgctggagcggctactaaaaaggataaaatgtatcacttaaatgttaccaaaaataaatataagagcaagatctaggatttactgtatttgattccatgtcttttactccgtagactctaggctagaaaaaaagctatggtttattagctgggcgtggtggctcacacctataatcccagtgctttgggagtctaaggtgggaggatcacttgagcccaggagttcaaggctgcagtaagctatgatcacaacactgcaccccagcctgggtgacagcaagaccctgtcttaataacaacaacaaaccaacaaaaacacctactaggtgcaaagtactaggtactttgcatacattacattacttaatcctagtaatgttttgtcagggtaagtatcattcccaattaatactcaacaaaacatatgtaggtggttcaagtaacttgcccacgatcacatggcagcgaaagcagcagaactggaaaatccaactcctgcctgactggctctgtgcacttttgcaaggccacagcatgtctggtggccccatccctgactgactgcccaagcttcacagaa

SEQ ID NO: 25895 - protein, 385 aa, Homo sapiens; identical to SEQ ID NO: 25893

SEQ ID NO: 25896 - DNA, 1967 bp, Homo sapiens
gctatgtaaagcggccgggctcgggtcgtgccaccgctggactcccgtgtccctccgcgcaggcgggcggccccggagcgctggtgccggcagaggcggcgacggtggcgcccctcctcatcatgtcgtccctggggatgagcccagggagaagatggacttggtcacctactttggaaagagacccccaggcgtgctgcattgcacaaccaagttttgtgactacgggaaggctcccggggcagaggagtacgctcaacaagatgtgttaaagaaatcttactccaaggccttcacgctgaccatctctgccctctttgtgacacccaagacgactggggcccgggtggagttaagcgagcagcaactgcagttgtggccgagtgatgtggacaagctgtcacccactgacaacctgccgcgggggagccgcgcccacatcaccctcggctgtgcagctgacgtagaggccgtgcagacgggccttgacctcttagagattctgcggcaggagaaggggggcagccgaggcgaggaggtgggcgagctaagccggggcaagctctattccttgggcaatgggcgctggatgctgaccctggccaagaacatggaggtcagggccatcttcacggggtactacgggaaaggcaaacctgtgcccacgcaaggtagccggaaggggggcgccttgcagtcctgcaccatcatatgagtgttctcaccaccacttatgcccctagaagggaaggggagagggaaacgtgccctctgtttgatccttgttttgtgacattttttttttttttttttttactcaaagttaacctacctgtaactttttaaaaacttgtaaaataactgaccctcccttcctgtccgccctcttcccctctaatgctcacgctcccaacacaaggtgggcagggaggcaccattcaggaacctggaccaaagctgacgaggctgggccaagccagggatggggccacagccagaaccccgagccctacttccaggttctggttagctcagccccagcccagcccagctgctctgcccagagctgggtgagtggggagacacctcagagccccgcaaaacccactgaccggaggcaaaaggcagtggggctgggggtagttttccatggtcacagagaactagtggtggctctgagaaggggaggacctctgggctttgattccatctccttgtcttttttctttgtttttagagacagggtcctgctatttcccaagctggagtgcagtggtgcgatcatggctcactgcagcctcgaactcctgggctcaagcaatcctcctgagtgatcccatttcttaatcagtgtagccccaagaaggctggggctatttaccagggtagaaaaaggagcttacctcccacctttggtcctaagtccctgccccctccccttcacaccataactaggtaacagtttgataactagggaagaaagcagaacagttaagcagccgccacatccccgctggctgggggcctcactccaggaaggggctggactggctgtcctttccagtggcctggctccgctgtgtggatggggagatcggggccagaggcagaaccctggtgaggaagctccagtcctgctctctacccagcccatcttgcctccatggtgcctctggaggcctctgggcctcctctaacaggggctggtgggcaccaagagccaatggagtagacccctggctggtaagggccaagtcccaccggttgcttctgggaaggggtttctaacactagtctgtgtgctgtggttcctggggtgccctccactgccctctgttcagtaacagggccttgctaatcgggttgtcactcaacaaaagtgctttggatttaagttactatcctggctttgcccaacctcagcaacctgtaagactgataatgaaataaatcatgttaatcctagc

SEQ ID NO: 25897 - protein, 186 aa, Homo sapiens
MDLVTYFGKRPPGVLHCTTKFCDYGKAPGAEEYAQQDVLKKSYSKAFTLTISALFVTPKTTGARVELSEQQLQLWPSDVDKLSPTDNLPRGSRAHITLGCAADVEAVQTGLDLLEILRQEKGGSRGEEVGELSRGKLYSLGNGRWMLTLAKNMEVRAIFTGYYGKGKPVPTQGSRKGGALQSCTII

SEQ ID NO: 25898 - DNA, 5033 bp, Homo sapiens
gctatgtaaagcggccgggctcgggtcgtgccaccgctggactcccgtgtccctccgcgcaggcgggcggccccggagcgctggtgccggcagaggcggcgacggtggcgcccctcctcatcatgtcgtccctggggatgagcccagggagaagatggacttggtcacctactttggaaagagacccccaggcgtgctgcattgcacaaccaagttttgtgactacgggaaggctcccggggcagaggagtacgctcaacaagatgtgttaaagaaatcttactccaaggccttcacgctgaccatctctgccctctttgtgacacccaagacgactggggcccgggtggagttaagcgagcagcaactgcagttgtggccgagtgatgtggacaagctgtcacccactgacaacctgccgcgggggagccgcgcccacatcaccctcggctgtgcagctgacgtagaggccgtgcagacgggccttgacctcttagagattctgcggcaggagaaggggggcagccgaggcgaggaggtgggcgagctaagccggggcaagctctattccttgggcaatgggcgctggatgctgaccctggccaagaacatggaggtcagggccatcttcacggggtactacgggaaaggcaaacctgtgcccacgcaaggtagccggaaggggggcgccttgcagtcctgcaccatcatatgagtgttctcaccaccacttatgcccctagaagggaaggggagagggaaacgtgccctctgtttgatccttgttttgtgacattttttttttttttttttttactcaaagttaacctacctgtaactttttaaaaacttgtaaaataactgaccctcccttcctgtccgccctcttcccctctaatgctcacgctcccaacacaaggtgggcagggaggcaccattcaggaacctggaccaaagctgacgaggctgggccaagccagggatggggccacagccagaaccccgagccctacttccaggttctggttagctcagccccagcccagcccagctgctctgcccagagctgggtgagtggggagacacctcagagccccgcaaaacccactgaccggaggcaaaaggcagtggggctgggggtagttttccatggtcacagagaactagtggtggctctgagaaggggaggacctctgggctttgattccatctccttgtcttttttctttgtttttagagacagggtcctgctatttcccaagctggagtgcagtggtgcgatcatggctcactgcagcctcgaactcctgggctcaagcaatcctcctgagtgatcccatttcttaatcagtgtagccccaagaaggctggggctatttaccagggtagaaaaaggagcttacctcccacctttggtcctaagtccctgccccctccccttcacaccataactaggtaacagtttgataactagggaagaaagcagaacagttaagcagccgccacatccccgctggctgggggcctcactccaggaaggggctggactggctgtcctttccagtggcctggctccgctgtgtggatggggagatcggggccagaggcagaaccctggtgaggaagctccagtcctgctctctacccagcccatcttgcctccatggtgcctctggaggcctctgggcctcctctaacaggggctggtgggcaccaagagccaatggagtagacccctggctggtaagggccaagtcccaccggttgcttctgggaaggggtttctaacactagtctgtgtgctgtggttcctggggtgccctccactgccctctgttcagtaacagggccttgctaatcgggttgtcactcaacaaaagtgctttggatttaagttactatcctggctttgcccaacctcagcaacctgtaagactgataatgaaataaatcatgttaatcctagctgtgtgcagtctctcttacccttctgtgcccagctcagtcttccctagggctgggtgtattaggactggctttgtcccacagcttggggccatcggtcctgtctcccctctgctggccgggcacagctgtggtgaggttgggcagctgaacagtgttggctttcatgaggaggcagaaagcagaggctggcctcagactcatacagaaggtgggggttggctgggtacgagggatgtggagcacaaaagcctctcatcccccattaaccagggcaccaagcccacaggtgtccccagcccactggatcagaaagagttcagtaagaccggaagctcctggtatgggtttctcccagttctctagggaaggccacctgcaggtcactgaaacttcaagcaccagggaagatctaacatttgagtcccttccaggccatcagaggcctagtcagccacatgggaaacttccaagacctgactcaggcatcattccaccatggctaaggcaccagccggggaagacttgaaagaaaggggcaggagctcagatgaagagaaatcctaagttacctttctaggtcaaggcctgtccctggccatctctgaacttcagctagagcttcaagtctgtgcctggagctcctgggaaggctactcaccttgaacaccacgcttgacaggacagcatggtgcatgccgctgcatccgtgagcagtgtgtctcctgcatgcagaaagggagcagagaaggccaggggcttttgctaaaaatagtggccagaccagagctctggagccacctgtcccacctcaaatgggtctgggggtcaggaggcagggttttatctctgtctaccatctccctcgaacccacactgcaacaggaactgtgagagtctttgtaagtaaactgccctgtctaggtcagtacccacctgagctttggacgcacacagcttttagtacccacctgagctttggacacacacagcttctagtgatttctggggccccaccgtaaagtgagcatgctttctgaactcgcttctctgtgactgatgttaggctgggcccagaggcacagccggggcctgcctagcactcacatgctggacaggtctgggagaggcagagtgccccacctgccactaggctgggtgcccacagcccgcatgcagcagcttgctgcaccccaagtccaggtcgggctcagctctggctcacagactggagacaatgcagatgccagagcaaagggccaggaagggtcaaaacattttattctcttttttttttcttttttaataaagttaaacagtaaaacaaaaattcacaagctgcctccctgtccacccccgcctccctcccctgccctcggtcttcggcattggttccctttgctccaccccactcacagagacacagggcatccaactgagaaaacgaaactgctctaagcacacggagacgtgatgaagggaggaggtgaactgtttccacattcaagattaaactgagtgaatctgcattttctgggttctgggtggttgcccttcattagccaaattgaaaaaagaaattccctggaccagatgctgaaagagaaaagaggggttggtagttggctatggattttctaaggaagatcactttgctctgattatggaaaagtcttcaagggctgcttcaaactcaaacacagagagaaactctatgggtatcaaacagctcaggctgtttttgggtgcaagagggagcacgtgactgtattatacatgggtagcttctgacctcagcattatctatatagtacctttgctcttgcagagaagccttggtactaggcagttagagatgcctccctgaccctgcagagatgcggtggctaaaggtcccaaggcaaggggtgcctgggaaccttcctgtcttcatccttagcaacagccgagtggatagatgccctgctagatgagaattcagctgcccccgctcatgggcccctctgactcccaaagagctgcctaagaggcaatgagtgtgttggcttgtgatctgggaactcccaagaacagcaggcccacctaccttcaaagctgaagccgccaggaccgccaaagaatgccttgaagatattgtttggatcaaaatctgtagagcagggcaagtaacatggaagggaagaaaaggtgaaaaattagaaatgttcgaagagaactgatgacactgagaacagatctccaaagctttcctggagagtctcactcccctcctttcccaacacttcagactgcaagtgagcaaacctgccccatcccgtgcaaaacatgctacctgatcccactcctaggacatgttcccttctccttccaactgctgccccaaaggaagctttctctgcttcagcttgcttcattgggctgttttctcaacaaatggaatgccatttgcacttacacaagactttccccatactctgtctccctataatgctggagcggctactaaaaaggataaaatgtatcacttaaatgttaccaaaaataaatataagagcaagatctaggatttactgtatttgattccatgtcttttactccgtagactctaggctagaaaaaaagctatggtttattagctgggcgtggtggctcacacctataatcccagtgctttgggagtctaaggtgggaggatcacttgagcccaggagttcaaggctgcagtaagctatgatcacaacactgcaccccagcctgggtgacagcaagaccctgtcttaataacaacaacaaaccaacaaaaacacctactaggtgcaaagtactaggtactttgcatacattacattacttaatcctagtaatgttttgtcagggtaagtatcattcccaattaatactcaacaaaacatatgtaggtggttcaagtaacttgcccacgatcacatggcagcgaaagcagcagaactggaaaatccaactcctgcctgactggctctgtgcacttttgcaaggccacagcatgtctggtggccccatccctgactgactgcccaagcttcacagaa

SEQ ID NO: 25899 - protein, 186 aa, Homo sapiens; identical to SEQ ID NO: 25897

SEQ ID NO: 25900 - DNA, 1990 bp, Homo sapiens
tggactcccgtgtccctccgcgcaggcgggcggccccggagcgctggtgccggcagaggcggcgacggtggcgcccctcctcatcatgccgtggcagctgtggcttggcccagacacagagacccccacctccaaagaggacgtccttagtaggtgccaagcatataagagtgaggccagtcccagaaccgcaggctcctggcgcgccccgcatgcctccagcacgtttacctttccgaagtggcaggaatggggaaagcgcacgcttaggagagcttcagacaagcttccctcttcctcctccacgaccagaagcggaaaggtgctcccggaccgaaagggaaagaaggtccagcactgccccgcttgggaaggcacccacaaccagtctagggactaggggtaaggccggcggggagcccgcgaatgacctgggctgacatctcttcccctccttacacagaacagaggcttctcccgaaaaagccacacattcctgcccaagatcttcttccgcaagatgtcatcctcaggggccaaggacaagcctgagctgcagtttcccttccttcaggatgaggacacagtggccacgctgctagagtgcaagacgctcttcatcttgcgcggcctgccaggaagcggcaagtccacgctggcacgggtcatcgtggacaagtaccgtgatggcaccaagatggtgtcggctgacgcttacaagatcacccccggcgctcgaggagccttctccgaggagtacaagcggctcgatgaggacctggctgcctactgccgccgccgggacatcagaattcttgtgcttgatgacaccaaccacgaacgggaacggctggagcagctctttgaaatggccgaccagtaccagtaccaggtggtgctggtggagcccaagacggcgtggcggctggactgtgcccagctcaaggagaagaaccagtggcagctgtcggctgatgacctgaagaagctgaagcctgggctggagaaggacttcctgccgctctacttcggctggttcctgaccaagaagagctctgagaccctccgcaaagccggccaggtcttcctggaagagctggggaaccacaaggccttcaagaaggagctgcgacaatgtaggtggcaggttggggccttataagcccaccttgctgggcacagggtgctgcgggcaaaggaccatcattgtactcaaaggatggagcacgaagcagcaggaggcagagagaggctcacctcagcgggggcaggggcaagcggtgcgtcccagtggtagccttggggagttggcagcacattgggaacacgggggcttcccagagcgcctttcctcccaccacacctatccttctagccctcttctctccgacacccttttcccagcctgaatgtagaccactgtcccttgtcttggaggtgggaaaaacaaattactgtagtaacaggaaacatgtcctcttctaatgtaaccttagagggggaatcaagcccagtgttttccaacgcatttttagcagcagaatcatgttccaaaaaataataataataatcacatgaaattgtaagctgcaaaaaaattaaaactaggactattgtggcttcactggggatggttctcaggcctcggactgctcaatttactcatgggtttgtggcatctgcagctccagaggacacaagtctcacacttaggccaaaacccgttttcagatggaaaaacatggacccaggagggatgtggggtttacgggctggaaccctggactctggccactctagcagggttctctcttggcatgggctttttgctccaatgataggtttgagataaagaagggtcctggtggctctcctggagtgacctgttggagaagtgccacccactaatccatctatatgcctttaggccatttctggttgcctccaattttatttatttatttattgtgacacggagtctccctctgtt

SEQ ID NO: 25901 - protein, 104 aa, Homo sapiens
MPWQLWLGPDTETPTSKEDVLSRCQAYKSEASPRTAGSWRAPHASSTFTFPKWQEWGKRTLRRASDKLPSSSSTTRSGKVLPDRKGKKVQHCPAWEGTHNQSRD

SEQ ID NO: 25902 - DNA, 1611 bp, Homo sapiens
ctcccgtgtccctccgcgcaggcgggcggccccggagcgctggtgccggcagaggcggcgacggtggcgcccctcctcatcatgaacagaggcttctcccgaaaaagccacacattcctgcccaagatcttcttccgcaagatgtcatcctcaggggccaaggacaagcctgagctgcagtttcccttccttcaggatgaggacacagtggccacgctgctagagtgcaagacgctcttcatcttgcgcggcctgccaggaagcggcaagtccacgctggcacgggtcatcgtggacaagtaccgtgatggcaccaagatggtgtcggctgacgcttacaagatcacccccggcgctcgaggagccttctccgaggagtacaagcggctcgatgaggacctggctgcctactgccgccgccgggacatcagaattcttgtgcttgatgacaccaaccacgaacgggaacggctggagcagctctttgaaatggccgaccagtaccagtaccaggtggtgctggtggagcccaagacggcgtggcggctggactgtgcccagctcaaggagaagaaccagtggcagctgtcggctgatgacctgaagaagctgaagcctgggctggagaaggacttcctgccgctctacttcggctggttcctgaccaagaagagctctgagaccctccgcaaagccggccaggtcttcctggaagagctggggaaccacaaggccttcaagaaggagctgcgacaatgtaggtggcaggttggggccttataagcccaccttgctgggcacagggtgctgcgggcaaaggaccatcattgtactcaaaggatggagcacgaagcagcaggaggcagagagaggctcacctcagcgggggcaggggcaagcggtgcgtcccagtggtagccttggggagttggcagcacattgggaacacgggggcttcccagagcgcctttcctcccaccacacctatccttctagccctcttctctccgacacccttttcccagcctgaatgtagaccactgtcccttgtcttggaggtgggaaaaacaaattactgtagtaacaggaaacatgtcctcttctaatgtaaccttagagggggaatcaagcccagtgttttccaacgcatttttagcagcagaatcatgttccaaaaaataataataataatcacatgaaattgtaagctgcaaaaaaattaaaactaggactattgtggcttcactggggatggttctcaggcctcggactgctcaatttactcatgggtttgtggcatctgcagctccagaggacacaagtctcacacttaggccaaaacccgttttcagatggaaaaacatggacccaggagggatgtggggtttacgggctggaaccctggactctggccactctagcagggttctctcttggcatgggctttttgctccaatgataggtttgagataaagaagggtcctggtggctctcctggagtgacctgttggagaagtgccacccactaatccatctatatgcctttaggccatttctggttgcctccaattttatttatttatttattgtgacacggagtctccctctgtt

SEQ ID NO: 25903 - protein, 233 aa, Homo sapiens
MNRGFSRKSHTFLPKIFFRKMSSSGAKDKPELQFPFLQDEDTVATLLECKTLFILRGLPGSGKSTLARVIVDKYRDGTKMVSADAYKITPGARGAFSEEYKRLDEDLAAYCRRRDIRILVLDDTNHERERLEQLFEMADQYQYQVVLVEPKTAWRLDCAQLKEKNQWQLSADDLKKLKPGLEKDFLPLYFGWFLTKKSSETLRKAGQVFLEELGNHKAFKKELRQCRWQVGAL

SEQ ID NO: 25904 - DNA, 1600 bp, Homo sapiens
gtcggggcccctcgggaggaagcgtcttgcaaacgaggacccggggctccgggttcgacttccagttttcttgaacagaggcttctcccgaaaaagccacacattcctgcccaagatcttcttccgcaagatgtcatcctcaggggccaaggacaagcctgagctgcagtttcccttccttcaggatgaggacacagtggccacgctgctagagtgcaagacgctcttcatcttgcgcggcctgccaggaagcggcaagtccacgctggcacgggtcatcgtggacaagtaccgtgatggcaccaagatggtgtcggctgacgcttacaagatcacccccggcgctcgaggagccttctccgaggagtacaagcggctcgatgaggacctggctgcctactgccgccgccgggacatcagaattcttgtgcttgatgacaccaaccacgaacgggaacggctggagcagctctttgaaatggccgaccagtaccagtaccaggtggtgctggtggagcccaagacggcgtggcggctggactgtgcccagctcaaggagaagaaccagtggcagctgtcggctgatgacctgaagaagctgaagcctgggctggagaaggacttcctgccgctctacttcggctggttcctgaccaagaagagctctgagaccctccgcaaagccggccaggtcttcctggaagagctggggaaccacaaggccttcaagaaggagctgcgacaatgtaggtggcaggttggggccttataagcccaccttgctgggcacagggtgctgcgggcaaaggaccatcattgtactcaaaggatggagcacgaagcagcaggaggcagagagaggctcacctcagcgggggcaggggcaagcggtgcgtcccagtggtagccttggggagttggcagcacattgggaacacgggggcttcccagagcgcctttcctcccaccacacctatccttctagccctcttctctccgacacccttttcccagcctgaatgtagaccactgtcccttgtcttggaggtgggaaaaacaaattactgtagtaacaggaaacatgtcctcttctaatgtaaccttagagggggaatcaagcccagtgttttccaacgcatttttagcagcagaatcatgttccaaaaaataataataataatcacatgaaattgtaagctgcaaaaaaattaaaactaggactattgtggcttcactggggatggttctcaggcctcggactgctcaatttactcatgggtttgtggcatctgcagctccagaggacacaagtctcacacttaggccaaaacccgttttcagatggaaaaacatggacccaggagggatgtggggtttacgggctggaaccctggactctggccactctagcagggttctctcttggcatgggctttttgctccaatgataggtttgagataaagaagggtcctggtggctctcctggagtgacctgttggagaagtgccacccactaatccatctatatgcctttaggccatttctggttgcctccaattttatttatttatttattgtgacacggagtctccctctgtt

SEQ ID NO: 25905 - protein, 213 aa, Homo sapiens [sequence omitted]

SEQ ID NO: 25906 - DNA, 2125 bp, Homo sapiens
aggctggtcttgaattcctgaccttgtgatccacccacctcggcctcccagagtgctgggattacaggtgtgaaccaccgcacctggcctgagaattttaactttttattgctctaaagttgccattagtttgaccaactaaccaatgaatgagctgtagtgggttgctggagaggtgatgcttagtgtccgagtgttttgcgctgggcctcggtggtcctggtggcggatgttggtatgcccctgctcccctgccctgactgcacccgttttctcccggcagtcgtccctggggatgagcccagggagaagatggacttggtcacctactttggaaagagacccccaggcgtgctgcattgcacaaccaagttttgtgactacgggaaggctcccggggcagaggagtacgctcaacaagatgtgttaaagaaatcttactccaaggccttcacgctgaccatctctgccctctttgtgacacccaagacgactggggcccgggtggagttaagcgagcagcaactgcagttgtggccgagtgatgtggacaagctgtcacccactgacaacctgccgcgggggagccgcgcccacatcaccctcggctgtgcagctgacgtagaggccgtgcagacgggccttgacctcttagagattctgcggcaggagaaggggggcagccgaggcgaggaggtgggcgagctaagccggggcaagctctattccttgggcaatgggcgctggatgctgaccctggccaagaacatggaggtcagggccatcttcacggggtactacgggaaaggcaaacctgtgcccacgcaaggtagccggaaggggggcgccttgcagtcctgcaccatcatatgagtgttctcaccaccacttatgcccctagaagggaaggggagagggaaacgtgccctctgtttgatccttgttttgtgacattttttttttttttttttttactcaaagttaacctacctgtaactttttaaaaacttgtaaaataactgaccctcccttcctgtccgccctcttcccctctaatgctcacgctcccaacacaaggtgggcagggaggcaccattcaggaacctggaccaaagctgacgaggctgggccaagccagggatggggccacagccagaaccccgagccctacttccaggttctggttagctcagccccagcccagcccagctgctctgcccagagctgggtgagtggggagacacctcagagccccgcaaaacccactgaccggaggcaaaaggcagtggggctgggggtagttttccatggtcacagagaactagtggtggctctgagaaggggaggacctctgggctttgattccatctccttgtcttttttctttgtttttagagacagggtcctgctatttcccaagctggagtgcagtggtgcgatcatggctcactgcagcctcgaactcctgggctcaagcaatcctcctgagtgatcccatttcttaatcagtgtagccccaagaaggctggggctatttaccagggtagaaaaaggagcttacctcccacctttggtcctaagtccctgccccctccccttcacaccataactaggtaacagtttgataactagggaagaaagcagaacagttaagcagccgccacatccccgctggctgggggcctcactccaggaaggggctggactggctgtcctttccagtggcctggctccgctgtgtggatggggagatcggggccagaggcagaaccctggtgaggaagctccagtcctgctctctacccagcccatcttgcctccatggtgcctctggaggcctctgggcctcctctaacaggggctggtgggcaccaagagccaatggagtagacccctggctggtaagggccaagtcccaccggttgcttctgggaaggggtttctaacactagtctgtgtgctgtggttcctggggtgccctccactgccctctgttcagtaacagggccttgctaatcgggttgtcactcaacaaaagtgctttggatttaagttactatcctggctttgcccaacctcagcaacctgtaagactgataatgaaataaatcatgttaatcctagc

SEQ ID NO: 25907 - protein, 211 aa, Homo sapiens [sequence omitted]

SEQ ID NO: 25908 - DNA, 5191 bp, Homo sapiens
aggctggtcttgaattcctgaccttgtgatccacccacctcggcctcccagagtgctgggattacaggtgtgaaccaccgcacctggcctgagaattttaactttttattgctctaaagttgccattagtttgaccaactaaccaatgaatgagctgtagtgggttgctggagaggtgatgcttagtgtccgagtgttttgcgctgggcctcggtggtcctggtggcggatgttggtatgcccctgctcccctgccctgactgcacccgttttctcccggcagtcgtccctggggatgagcccagggagaagatggacttggtcacctactttggaaagagacccccaggcgtgctgcattgcacaaccaagttttgtgactacgggaaggctcccggggcagaggagtacgctcaacaagatgtgttaaagaaatcttactccaaggccttcacgctgaccatctctgccctctttgtgacacccaagacgactggggcccgggtggagttaagcgagcagcaactgcagttgtggccgagtgatgtggacaagctgtcacccactgacaacctgccgcgggggagccgcgcccacatcaccctcggctgtgcagctgacgtagaggccgtgcagacgggccttgacctcttagagattctgcggcaggagaaggggggcagccgaggcgaggaggtgggcgagctaagccggggcaagctctattccttgggcaatgggcgctggatgctgaccctggccaagaacatggaggtcagggccatcttcacggggtactacgggaaaggcaaacctgtgcccacgcaaggtagccggaaggggggcgccttgcagtcctgcaccatcatatgagtgttctcaccaccacttatgcccctagaagggaaggggagagggaaacgtgccctctgtttgatccttgttttgtgacattttttttttttttttttttactcaaagttaacctacctgtaactttttaaaaacttgtaaaataactgaccctcccttcctgtccgccctcttcccctctaatgctcacgctcccaacacaaggtgggcagggaggcaccattcaggaacctggaccaaagctgacgaggctgggccaagccagggatggggccacagccagaaccccgagccctacttccaggttctggttagctcagccccagcccagcccagctgctctgcccagagctgggtgagtggggagacacctcagagccccgcaaaacccactgaccggaggcaaaaggcagtggggctgggggtagttttccatggtcacagagaactagtggtggctctgagaaggggaggacctctgggctttgattccatctccttgtcttttttctttgtttttagagacagggtcctgctatttcccaagctggagtgcagtggtgcgatcatggctcactgcagcctcgaactcctgggctcaagcaatcctcctgagtgatcccatttcttaatcagtgtagccccaagaaggctggggctatttaccagggtagaaaaaggagcttacctcccacctttggtcctaagtccctgccccctccccttcacaccataactaggtaacagtttgataactagggaagaaagcagaacagttaagcagccgccacatccccgctggctgggggcctcactccaggaaggggctggactggctgtcctttccagtggcctggctccgctgtgtggatggggagatcggggccagaggcagaaccctggtgaggaagctccagtcctgctctctacccagcccatcttgcctccatggtgcctctggaggcctctgggcctcctctaacaggggctggtgggcaccaagagccaatggagtagacccctggctggtaagggccaagtcccaccggttgcttctgggaaggggtttctaacactagtctgtgtgctgtggttcctggggtgccctccactgccctctgttcagtaacagggccttgctaatcgggttgtcactcaacaaaagtgctttggatttaagttactatcctggctttgcccaacctcagcaacctgtaagactgataatgaaataaatcatgttaatcctagctgtgtgcagtctctcttacccttctgtgcccagctcagtcttccctagggctgggtgtattaggactggctttgtcccacagcttggggccatcggtcctgtctcccctctgctggccgggcacagctgtggtgaggttgggcagctgaacagtgttggctttcatgaggaggcagaaagcagaggctggcctcagactcatacagaaggtgggggttggctgggtacgagggatgtggagcacaaaagcctctcatcccccattaaccagggcaccaagcccacaggtgtccccagcccactggatcagaaagagttcagtaagaccggaagctcctggtatgggtttctcccagttctctagggaaggccacctgcaggtcactgaaacttcaagcaccagggaagatctaacatttgagtcccttccaggccatcagaggcctagtcagccacatgggaaacttccaagacctgactcaggcatcattccaccatggctaaggcaccagccggggaagacttgaaagaaaggggcaggagctcagatgaagagaaatcctaagttacctttctaggtcaaggcctgtccctggccatctctgaacttcagctagagcttcaagtctgtgcctggagctcctgggaaggctactcaccttgaacaccacgcttgacaggacagcatggtgcatgccgctgcatccgtgagcagtgtgtctcctgcatgcagaaagggagcagagaaggccaggggcttttgctaaaaatagtggccagaccagagctctggagccacctgtcccacctcaaatgggtctgggggtcaggaggcagggttttatctctgtctaccatctccctcgaacccacactgcaacaggaactgtgagagtctttgtaagtaaactgccctgtctaggtcagtacccacctgagctttggacgcacacagcttttagtacccacctgagctttggacacacacagcttctagtgatttctggggccccaccgtaaagtgagcatgctttctgaactcgcttctctgtgactgatgttaggctgggcccagaggcacagccggggcctgcctagcactcacatgctggacaggtctgggagaggcagagtgccccacctgccactaggctgggtgcccacagcccgcatgcagcagcttgctgcaccccaagtccaggtcgggctcagctctggctcacagactggagacaatgcagatgccagagcaaagggccaggaagggtcaaaacattttattctcttttttttttcttttttaataaagttaaacagtaaaacaaaaattcacaagctgcctccctgtccacccccgcctccctcccctgccctcggtcttcggcattggttccctttgctccaccccactcacagagacacagggcatccaactgagaaaacgaaactgctctaagcacacggagacgtgatgaagggaggaggtgaactgtttccacattcaagattaaactgagtgaatctgcattttctgggttctgggtggttgcccttcattagccaaattgaaaaaagaaattccctggaccagatgctgaaagagaaaagaggggttggtagttggctatggattttctaaggaagatcactttgctctgattatggaaaagtcttcaagggctgcttcaaactcaaacacagagagaaactctatgggtatcaaacagctcaggctgtttttgggtgcaagagggagcacgtgactgtattatacatgggtagcttctgacctcagcattatctatatagtacctttgctcttgcagagaagccttggtactaggcagttagagatgcctccctgaccctgcagagatgcggtggctaaaggtcccaaggcaaggggtgcctgggaaccttcctgtcttcatccttagcaacagccgagtggatagatgccctgctagatgagaattcagctgcccccgctcatgggcccctctgactcccaaagagctgcctaagaggcaatgagtgtgttggcttgtgatctgggaactcccaagaacagcaggcccacctaccttcaaagctgaagccgccaggaccgccaaagaatgccttgaagatattgtttggatcaaaatctgtagagcagggcaagtaacatggaagggaagaaaaggtgaaaaattagaaatgttcgaagagaactgatgacactgagaacagatctccaaagctttcctggagagtctcactcccctcctttcccaacacttcagactgcaagtgagcaaacctgccccatcccgtgcaaaacatgctacctgatcccactcctaggacatgttcccttctccttccaactgctgccccaaaggaagctttctctgcttcagcttgcttcattgggctgttttctcaacaaatggaatgccatttgcacttacacaagactttccccatactctgtctccctataatgctggagcggctactaaaaaggataaaatgtatcacttaaatgttaccaaaaataaatataagagcaagatctaggatttactgtatttgattccatgtcttttactccgtagactctaggctagaaaaaaagctatggtttattagctgggcgtggtggctcacacctataatcccagtgctttgggagtctaaggtgggaggatcacttgagcccaggagttcaaggctgcagtaagctatgatcacaacactgcaccccagcctgggtgacagcaagaccctgtcttaataacaacaacaaaccaacaaaaacacctactaggtgcaaagtactaggtactttgcatacattacattacttaatcctagtaatgttttgtcagggtaagtatcattcccaattaatactcaacaaaacatatgtaggtggttcaagtaacttgcccacgatcacatggcagcgaaagcagcagaactggaaaatccaactcctgcctgactggctctgtgcacttttgcaaggccacagcatgtctggtggccccatccctgactgactgcccaagcttcacagaa

SEQ ID NO: 25909 - protein, 211 aa, Homo sapiens [sequence omitted]

SEQ ID NO: 25910 - DNA, 4439 bp, Homo sapiens
gtgttaaagaaatcttactccaaggccttcacgctgaccatctctgccctctttgtgacacccaagacgactggggcccgggtggagttaagcgagcagcaactgcagttgtggccgagtgatgtggacaagctgtcacccactgacaacctgccgcgggggagccgcgcccacatcaccctcggctgtgcagctgacgtagaggccgtgcagacgggccttgacctcttagagattctgcggcaggagaaggggggcagccgaggcgaggaggtgggcgagctaagccggggcaagctctattccttgggcaatgggcgctggatgctgaccctggccaagaacatggaggtcagggccatcttcacggggtactacgggaaaggcaaacctgtgcccacgcaaggtagccggaaggggggcgccttgcagtcctgcaccatcatatgagtgttctcaccaccacttatgcccctagaagggaaggggagagggaaacgtgccctctgtttgatccttgttttgtgacattttttttttttttttttttactcaaagttaacctacctgtaactttttaaaaacttgtaaaataactgaccctcccttcctgtccgccctcttcccctctaatgctcacgctcccaacacaaggtgggcagggaggcaccattcaggaacctggaccaaagctgacgaggctgggccaagccagggatggggccacagccagaaccccgagccctacttccaggttctggttagctcagccccagcccagcccagctgctctgcccagagctgggtgagtggggagacacctcagagccccgcaaaacccactgaccggaggcaaaaggcagtggggctgggggtagttttccatggtcacagagaactagtggtggctctgagaaggggaggacctctgggctttgattccatctccttgtcttttttctttgtttttagagacagggtcctgctatttcccaagctggagtgcagtggtgcgatcatggctcactgcagcctcgaactcctgggctcaagcaatcctcctgagtgatcccatttcttaatcagtgtagccccaagaaggctggggctatttaccagggtagaaaaaggagcttacctcccacctttggtcctaagtccctgccccctccccttcacaccataactaggtaacagtttgataactagggaagaaagcagaacaccctccactgccctctgttcagtaacagggccttgctaatcgggttgtcactcaacaaaagtgctttggatttaagttactatcctggctttgcccaacctcagcaacctgtaagactgataatgaaataaatcatgttaatcctagctgtgtgcagtctctcttacccttctgtgcccagctcagtcttccctagggctgggtgtattaggactggctttgtcccacagcttggggccatcggtcctgtctcccctctgctggccgggcacagctgtggtgaggttgggcagctgaacagtgttggctttcatgaggaggcagaaagcagaggctggcctcagactcatacagaaggtgggggttggctgggtacgagggatgtggagcacaaaagcctctcatcccccattaaccagggcaccaagcccacaggtgtccccagcccactggatcagaaagagttcagtaagaccggaagctcctggtatgggtttctcccagttctctagggaaggccacctgcaggtcactgaaacttcaagcaccagggaagatctaacatttgagtcccttccaggccatcagaggcctagtcagccacatgggaaacttccaagacctgactcaggcatcattccaccatggctaaggcaccagccggggaagacttgaaagaaaggggcaggagctcagatgaagagaaatcctaagttacctttctaggtcaaggcctgtccctggccatctctgaacttcagctagagcttcaagtctgtgcctggagctcctgggaaggctactcaccttgaacaccacgcttgacaggacagcatggtgcatgccgctgcatccgtgagcagtgtgtctcctgcatgcagaaagggagcagagaaggccaggggcttttgctaaaaatagtggccagaccagagctctggagccacctgtcccacctcaaatgggtctgggggtcaggaggcagggttttatctctgtctaccatctccctcgaacccacactgcaacaggaactgtgagagtctttgtaagtaaactgccctgtctaggtcagtacccacctgagctttggacgcacacagcttttagtacccacctgagctttggacacacacagcttctagtgatttctggggccccaccgtaaagtgagcatgctttctgaactcgcttctctgtgactgatgttaggctgggcccagaggcacagccggggcctgcctagcactcacatgctggacaggtctgggagaggcagagtgccccacctgccactaggctgggtgcccacagcccgcatgcagcagcttgctgcaccccaagtccaggtcgggctcagctctggctcacagactggagacaatgcagatgccagagcaaagggccaggaagggtcaaaacattttattctcttttttttttcttttttaataaagttaaacagtaaaacaaaaattcacaagctgcctccctgtccacccccgcctccctcccctgccctcggtcttcggcattggttccctttgctccaccccactcacagagacacagggcatccaactgagaaaacgaaactgctctaagcacacggagacgtgatgaagggaggaggtgaactgtttccacattcaagattaaactgagtgaatctgcattttctgggttctgggtggttgcccttcattagccaaattgaaaaaagaaattccctggaccagatgctgaaagagaaaagaggggttggtagttggctatggattttctaaggaagatcactttgctctgattatggaaaagtcttcaagggctgcttcaaactcaaacacagagagaaactctatgggtatcaaacagctcaggctgtttttgggtgcaagagggagcacgtgactgtattatacatgggtagcttctgacctcagcattatctatatagtacctttgctcttgcagagaagccttggtactaggcagttagagatgcctccctgaccctgcagagatgcggtggctaaaggtcccaaggcaaggggtgcctgggaaccttcctgtcttcatccttagcaacagccgagtggatagatgccctgctagatgagaattcagctgcccccgctcatgggcccctctgactcccaaagagctgcctaagaggcaatgagtgtgttggcttgtgatctgggaactcccaagaacagcaggcccacctaccttcaaagctgaagccgccaggaccgccaaagaatgccttgaagatattgtttggatcaaaatctgtagagcagggcaagtaacatggaagggaagaaaaggtgaaaaattagaaatgttcgaagagaactgatgacactgagaacagatctccaaagctttcctggagagtctcactcccctcctttcccaacacttcagactgcaagtgagcaaacctgccccatcccgtgcaaaacatgctacctgatcccactcctaggacatgttcccttctccttccaactgctgccccaaaggaagctttctctgcttcagcttgcttcattgggctgttttctcaacaaatggaatgccatttgcacttacacaagactttccccatactctgtctccctataatgctggagcggctactaaaaaggataaaatgtatcacttaaatgttaccaaaaataaatataagagcaagatctaggatttactgtatttgattccatgtcttttactccgtagactctaggctagaaaaaaagctatggtttattagctgggcgtggtggctcacacctataatcccagtgctttgggagtctaaggtgggaggatcacttgagcccaggagttcaaggctgcagtaagctatgatcacaacactgcaccccagcctgggtgacagcaagaccctgtcttaataacaacaacaaaccaacaaaaacacctactaggtgcaaagtactaggtactttgcatacattacattacttaatcctagtaatgttttgtcagggtaagtatcattcccaattaatactcaacaaaacatatgtaggtggttcaagtaacttgcccacgatcacatggcagcgaaagcagcagaactggaaaatccaactcctgcctgactggctctgtgcacttttgcaaggccacagcatgtctggtggccccatccctgactgactgcccaagcttcacagaa

SEQ ID NO: 25911 - protein, 132 aa, Homo sapiens
MLGWAQRHSRGLPSTHMLDRSGRGRVPHLPLGWVPTARMQQLAAPQVQVGLSSGSQTGDNADARAKGQEGSKHFILFFFSFLIKLNSKTKIHKLPPCPPPPPSPALGLRHWFPLLHPTHRDTGHPTEKTKLL

SEQ ID NO: 25912 - DNA, 4024 bp, Homo sapiens
gtgttaaagaaatcttactccaaggccttcacgctgaccatctctgccctctttgtgacacccaagacgactggggcccgggtggagttaagcgagcagcaactgcagttgtggccgagtgatgtggacaagctgtcacccactgacaacctgccgcgggggagccgcgcccacatcaccctcggctgtgcagctgacgtagaggccgtgcagacgggccttgacctcttagagattctgcggcaggagaaggggggcagccgaggcgaggaggtgggcgagctaagccggggcaagctctattccttgggcaatgggcgctggatgctgaccctggccaagaacatggaggtcagggccatcttcacggggtactacgggaaaggcaaacctgtgcccacgcaaggtagccggaaggggggcgccttgcagtcctgcaccatcatatgagtgttctcaccaccacttatgcccctagaagggaaggggagagggaaacgtgccctctgtttgatccttgttttgtgacattttttttttttttttttttactcaaagttaacctacctgtaactttttaaaaacttgtaaaataactgaccctcccttcctgtccgccctcttcccctctaatgctcacgctcccaacacaaggtgggcagggaggcaccattcaggaacctggaccaaagctgacgaggctgggccaagccagggatggggccacagccagaaccccgagccctacttccaggttctggttagctcagccccagcccagcccagctgctctgcccagagctgggtgagtggggagacaccctctgttcagtaacagggccttgctaatcgggttgtcactcaacaaaagtgctttggatttaagttactatcctggctttgcccaacctcagcaacctgtaagactgataatgaaataaatcatgttaatcctagctgtgtgcagtctctcttacccttctgtgcccagctcagtcttccctagggctgggtgtattaggactggctttgtcccacagcttggggccatcggtcctgtctcccctctgctggccgggcacagctgtggtgaggttgggcagctgaacagtgttggctttcatgaggaggcagaaagcagaggctggcctcagactcatacagaaggtgggggttggctgggtacgagggatgtggagcacaaaagcctctcatcccccattaaccagggcaccaagcccacaggtgtccccagcccactggatcagaaagagttcagtaagaccggaagctcctggtatgggtttctcccagttctctagggaaggccacctgcaggtcactgaaacttcaagcaccagggaagatctaacatttgagtcccttccaggccatcagaggcctagtcagccacatgggaaacttccaagacctgactcaggcatcattccaccatggctaaggcaccagccggggaagacttgaaagaaaggggcaggagctcagatgaagagaaatcctaagttacctttctaggtcaaggcctgtccctggccatctctgaacttcagctagagcttcaagtctgtgcctggagctcctgggaaggctactcaccttgaacaccacgcttgacaggacagcatggtgcatgccgctgcatccgtgagcagtgtgtctcctgcatgcagaaagggagcagagaaggccaggggcttttgctaaaaatagtggccagaccagagctctggagccacctgtcccacctcaaatgggtctgggggtcaggaggcagggttttatctctgtctaccatctccctcgaacccacactgcaacaggaactgtgagagtctttgtaagtaaactgccctgtctaggtcagtacccacctgagctttggacgcacacagcttttagtacccacctgagctttggacacacacagcttctagtgatttctggggccccaccgtaaagtgagcatgctttctgaactcgcttctctgtgactgatgttaggctgggcccagaggcacagccggggcctgcctagcactcacatgctggacaggtctgggagaggcagagtgccccacctgccactaggctgggtgcccacagcccgcatgcagcagcttgctgcaccccaagtccaggtcgggctcagctctggctcacagactggagacaatgcagatgccagagcaaagggccaggaagggtcaaaacattttattctcttttttttttcttttttaataaagttaaacagtaaaacaaaaattcacaagctgcctccctgtccacccccgcctccctcccctgccctcggtcttcggcattggttccctttgctccaccccactcacagagacacagggcatccaactgagaaaacgaaactgctctaagcacacggagacgtgatgaagggaggaggtgaactgtttccacattcaagattaaactgagtgaatctgcattttctgggttctgggtggttgcccttcattagccaaattgaaaaaagaaattccctggaccagatgctgaaagagaaaagaggggttggtagttggctatggattttctaaggaagatcactttgctctgattatggaaaagtcttcaagggctgcttcaaactcaaacacagagagaaactctatgggtatcaaacagctcaggctgtttttgggtgcaagagggagcacgtgactgtattatacatgggtagcttctgacctcagcattatctatatagtacctttgctcttgcagagaagccttggtactaggcagttagagatgcctccctgaccctgcagagatgcggtggctaaaggtcccaaggcaaggggtgcctgggaaccttcctgtcttcatccttagcaacagccgagtggatagatgccctgctagatgagaattcagctgcccccgctcatgggcccctctgactcccaaagagctgcctaagaggcaatgagtgtgttggcttgtgatctgggaactcccaagaacagcaggcccacctaccttcaaagctgaagccgccaggaccgccaaagaatgccttgaagatattgtttggatcaaaatctgtagagcagggcaagtaacatggaagggaagaaaaggtgaaaaattagaaatgttcgaagagaactgatgacactgagaacagatctccaaagctttcctggagagtctcactcccctcctttcccaacacttcagactgcaagtgagcaaacctgccccatcccgtgcaaaacatgctacctgatcccactcctaggacatgttcccttctccttccaactgctgccccaaaggaagctttctctgcttcagcttgcttcattgggctgttttctcaacaaatggaatgccatttgcacttacacaagactttccccatactctgtctccctataatgctggagcggctactaaaaaggataaaatgtatcacttaaatgttaccaaaaataaatataagagcaagatctaggatttactgtatttgattccatgtcttttactccgtagactctaggctagaaaaaaagctatggtttattagctgggcgtggtggctcacacctataatcccagtgctttgggagtctaaggtgggaggatcacttgagcccaggagttcaaggctgcagtaagctatgatcacaacactgcaccccagcctgggtgacagcaagaccctgtcttaataacaacaacaaaccaacaaaaacacctactaggtgcaaagtactaggtactttgcatacattacattacttaatcctagtaatgttttgtcagggtaagtatcattcccaattaatactcaacaaaacatatgtaggtggttcaagtaacttgcccacgatcacatggcagcgaaagcagcagaactggaaaatccaactcctgcctgactggctctgtgcacttttgcaaggccacagcatgtctggtggccccatccctgactgactgcccaagcttcacagaa

SEQ ID NO: 25913 - protein, 132 aa, Homo sapiens; identical to SEQ ID NO: 25911

SEQ ID NO: 25914 - DNA, 4254 bp, Homo sapiens
gtgttaaagaaatcttactccaaggccttcacgctgaccatctctgccctctttgtgacacccaagacgactggggcccgggtggagttaagcgagcagcaactgcagttgtggccgagtgatgtggacaagctgtcacccactgacaacctgccgcgggggagccgcgcccacatcaccctcggctgtgcagctgacgtagaggccgtgcagacgggccttgacctcttagagattctgcggcaggagaaggggggcagccgaggcgaggaggtgggcgagctaagccggggcaagctctattccttgggcaatgggcgctggatgctgaccctggccaagaacatggaggtcagggccatcttcacggggtactacgggaaaggcaaacctgtgcccacgcaaggtagccggaaggggggcgccttgcagtcctgcaccatcatatgagtgttctcaccaccacttatgcccctagaagggaaggggagagggaaacgtgccctctgtttgatccttgttttgtgacattttttttttttttttttttactcaaagttaacctacctgtaactttttaaaaacttgtaaaataactgaccctcccttcctgtccgccctcttcccctctaatgctcacgctcccaacacaaggtgggcagggaggcaccattcaggaacctggaccaaagctgacgaggctgggccaagccagggatggggccacagccagaaccccgagccctacttccaggttctggttagctcagccccagcccagcccagctgctctgcccagagctgggtgagtggggagacacctcagagccccgcaaaacccactgaccggaggcaaaaggcagtggggctgggggtagttttccatggtgcctctggaggcctctgggcctcctctaacaggggctggtgggcaccaagagccaatggagtagacccctggctggtaagggccaagtcccaccggttgcttctgggaaggggtttctaacactagtctgtgtgctgtggttcctggggtgccctccactgccctctgttcagtaacagggccttgctaatcgggttgtcactcaacaaaagtgctttggatttaagttactatcctggctttgcccaacctcagcaacctgtaagactgataatgaaataaatcatgttaatcctagctgtgtgcagtctctcttacccttctgtgcccagctcagtcttccctagggctgggtgtattaggactggctttgtcccacagcttggggccatcggtcctgtctcccctctgctggccgggcacagctgtggtgaggttgggcagctgaacagtgttggctttcatgaggaggcagaaagcagaggctggcctcagactcatacagaaggtgggggttggctgggtacgagggatgtggagcacaaaagcctctcatcccccattaaccagggcaccaagcccacaggtgtccccagcccactggatcagaaagagttcagtaagaccggaagctcctggtatgggtttctcccagttctctagggaaggccacctgcaggtcactgaaacttcaagcaccagggaagatctaacatttgagtcccttccaggccatcagaggcctagtcagccacatgggaaacttccaagacctgactcaggcatcattccaccatggctaaggcaccagccggggaagacttgaaagaaaggggcaggagctcagatgaagagaaatcctaagttacctttctaggtcaaggcctgtccctggccatctctgaacttcagctagagcttcaagtctgtgcctggagctcctgggaaggctactcaccttgaacaccacgcttgacaggacagcatggtgcatgccgctgcatccgtgagcagtgtgtctcctgcatgcagaaagggagcagagaaggccaggggcttttgctaaaaatagtggccagaccagagctctggagccacctgtcccacctcaaatgggtctgggggtcaggaggcagggttttatctctgtctaccatctccctcgaacccacactgcaacaggaactgtgagagtctttgtaagtaaactgccctgtctaggtcagtacccacctgagctttggacgcacacagcttttagtacccacctgagctttggacacacacagcttctagtgatttctggggccccaccgtaaagtgagcatgctttctgaactcgcttctctgtgactgatgttaggctgggcccagaggcacagccggggcctgcctagcactcacatgctggacaggtctgggagaggcagagtgccccacctgccactaggctgggtgcccacagcccgcatgcagcagcttgctgcaccccaagtccaggtcgggctcagctctggctcacagactggagacaatgcagatgccagagcaaagggccaggaagggtcaaaacattttattctcttttttttttcttttttaataaagttaaacagtaaaacaaaaattcacaagctgcctccctgtccacccccgcctccctcccctgccctcggtcttcggcattggttccctttgctccaccccactcacagagacacagggcatccaactgagaaaacgaaactgctctaagcacacggagacgtgatgaagggaggaggtgaactgtttccacattcaagattaaactgagtgaatctgcattttctgggttctgggtggttgcccttcattagccaaattgaaaaaagaaattccctggaccagatgctgaaagagaaaagaggggttggtagttggctatggattttctaaggaagatcactttgctctgattatggaaaagtcttcaagggctgcttcaaactcaaacacagagagaaactctatgggtatcaaacagctcaggctgtttttgggtgcaagagggagcacgtgactgtattatacatgggtagcttctgacctcagcattatctatatagtacctttgctcttgcagagaagccttggtactaggcagttagagatgcctccctgaccctgcagagatgcggtggctaaaggtcccaaggcaaggggtgcctgggaaccttcctgtcttcatccttagcaacagccgagtggatagatgccctgctagatgagaattcagctgcccccgctcatgggcccctctgactcccaaagagctgcctaagaggcaatgagtgtgttggcttgtgatctgggaactcccaagaacagcaggcccacctaccttcaaagctgaagccgccaggaccgccaaagaatgccttgaagatattgtttggatcaaaatctgtagagcagggcaagtaacatggaagggaagaaaaggtgaaaaattagaaatgttcgaagagaactgatgacactgagaacagatctccaaagctttcctggagagtctcactcccctcctttcccaacacttcagactgcaagtgagcaaacctgccccatcccgtgcaaaacatgctacctgatcccactcctaggacatgttcccttctccttccaactgctgccccaaaggaagctttctctgcttcagcttgcttcattgggctgttttctcaacaaatggaatgccatttgcacttacacaagactttccccatactctgtctccctataatgctggagcggctactaaaaaggataaaatgtatcacttaaatgttaccaaaaataaatataagagcaagatctaggatttactgtatttgattccatgtcttttactccgtagactctaggctagaaaaaaagctatggtttattagctgggcgtggtggctcacacctataatcccagtgctttgggagtctaaggtgggaggatcacttgagcccaggagttcaaggctgcagtaagctatgatcacaacactgcaccccagcctgggtgacagcaagaccctgtcttaataacaacaacaaaccaacaaaaacacctactaggtgcaaagtactaggtactttgcatacattacattacttaatcctagtaatgttttgtcagggtaagtatcattcccaattaatactcaacaaaacatatgtaggtggttcaagtaacttgcccacgatcacatggcagcgaaagcagcagaactggaaaatccaactcctgcctgactggctctgtgcacttttgcaaggccacagcatgtctggtggccccatccctgactgactgcccaagcttcacagaa

SEQ ID NO: 25915 - protein, 132 aa, Homo sapiens; identical to SEQ ID NO: 25911

SEQ ID NO: 25916 - DNA, 3807 bp, Homo sapiens
gtgttaaagaaatcttactccaaggccttcacgctgaccatctctgccctctttgtgacacccaagacgactggggcccgggtggagttaagcgagcagcaactgcagttgtggccgagtgatgtggacaagctgtcacccactgacaacctgccgcgggggagccgcgcccacatcaccctcggctgtgcagctgacgtagaggccgtgcagacgggccttgacctcttagagattctgcggcaggagaaggggggcagccgaggcgaggaggtgggcgagctaagccggggcaagctctattccttgggcaatgggcgctggatgctgaccctggccaagaacatggaggtcagggccatcttcacggggtactacgggaaaggcaaacctgtgcccacgcaaggtagccggaaggggggcgccttgcagtcctgcaccatcatatgagtgttctcaccaccacttatgcccctagaagggaaggggagagggaaacgtgccctctgtttgatccttgttttgtgacattttttttttttttttttttactcaaagttaacctacctgtaactttttaaaaacttgtaaaataactgaccctcccttcctgtccgccctcttcccctctaatgctcacgctcccaacacaaggtgggcagggaggcaccattcaggaacctggaccaaagctcagcaacctgtaagactgataatgaaataaatcatgttaatcctagctgtgtgcagtctctcttacccttctgtgcccagctcagtcttccctagggctgggtgtattaggactggctttgtcccacagcttggggccatcggtcctgtctcccctctgctggccgggcacagctgtggtgaggttgggcagctgaacagtgttggctttcatgaggaggcagaaagcagaggctggcctcagactcatacagaaggtgggggttggctgggtacgagggatgtggagcacaaaagcctctcatcccccattaaccagggcaccaagcccacaggtgtccccagcccactggatcagaaagagttcagtaagaccggaagctcctggtatgggtttctcccagttctctagggaaggccacctgcaggtcactgaaacttcaagcaccagggaagatctaacatttgagtcccttccaggccatcagaggcctagtcagccacatgggaaacttccaagacctgactcaggcatcattccaccatggctaaggcaccagccggggaagacttgaaagaaaggggcaggagctcagatgaagagaaatcctaagttacctttctaggtcaaggcctgtccctggccatctctgaacttcagctagagcttcaagtctgtgcctggagctcctgggaaggctactcaccttgaacaccacgcttgacaggacagcatggtgcatgccgctgcatccgtgagcagtgtgtctcctgcatgcagaaagggagcagagaaggccaggggcttttgctaaaaatagtggccagaccagagctctggagccacctgtcccacctcaaatgggtctgggggtcaggaggcagggttttatctctgtctaccatctccctcgaacccacactgcaacaggaactgtgagagtctttgtaagtaaactgccctgtctaggtcagtacccacctgagctttggacgcacacagcttttagtacccacctgagctttggacacacacagcttctagtgatttctggggccccaccgtaaagtgagcatgctttctgaactcgcttctctgtgactgatgttaggctgggcccagaggcacagccggggcctgcctagcactcacatgctggacaggtctgggagaggcagagtgccccacctgccactaggctgggtgcccacagcccgcatgcagcagcttgctgcaccccaagtccaggtcgggctcagctctggctcacagactggagacaatgcagatgccagagcaaagggccaggaagggtcaaaacattttattctcttttttttttcttttttaataaagttaaacagtaaaacaaaaattcacaagctgcctccctgtccacccccgcctccctcccctgccctcggtcttcggcattggttccctttgctccaccccactcacagagacacagggcatccaactgagaaaacgaaactgctctaagcacacggagacgtgatgaagggaggaggtgaactgtttccacattcaagattaaactgagtgaatctgcattttctgggttctgggtggttgcccttcattagccaaattgaaaaaagaaattccctggaccagatgctgaaagagaaaagaggggttggtagttggctatggattttctaaggaagatcactttgctctgattatggaaaagtcttcaagggctgcttcaaactcaaacacagagagaaactctatgggtatcaaacagctcaggctgtttttgggtgcaagagggagcacgtgactgtattatacatgggtagcttctgacctcagcattatctatatagtacctttgctcttgcagagaagccttggtactaggcagttagagatgcctccctgaccctgcagagatgcggtggctaaaggtcccaaggcaaggggtgcctgggaaccttcctgtcttcatccttagcaacagccgagtggatagatgccctgctagatgagaattcagctgcccccgctcatgggcccctctgactcccaaagagctgcctaagaggcaatgagtgtgttggcttgtgatctgggaactcccaagaacagcaggcccacctaccttcaaagctgaagccgccaggaccgccaaagaatgccttgaagatattgtttggatcaaaatctgtagagcagggcaagtaacatggaagggaagaaaaggtgaaaaattagaaatgttcgaagagaactgatgacactgagaacagatctccaaagctttcctggagagtctcactcccctcctttcccaacacttcagactgcaagtgagcaaacctgccccatcccgtgcaaaacatgctacctgatcccactcctaggacatgttcccttctccttccaactgctgccccaaaggaagctttctctgcttcagcttgcttcattgggctgttttctcaacaaatggaatgccatttgcacttacacaagactttccccatactctgtctccctataatgctggagcggctactaaaaaggataaaatgtatcacttaaatgttaccaaaaataaatataagagcaagatctaggatttactgtatttgattccatgtcttttactccgtagactctaggctagaaaaaaagctatggtttattagctgggcgtggtggctcacacctataatcccagtgctttgggagtctaaggtgggaggatcacttgagcccaggagttcaaggctgcagtaagctatgatcacaacactgcaccccagcctgggtgacagcaagaccctgtcttaataacaacaacaaaccaacaaaaacacctactaggtgcaaagtactaggtactttgcatacattacattacttaatcctagtaatgttttgtcagggtaagtatcattcccaattaatactcaacaaaacatatgtaggtggttcaagtaacttgcccacgatcacatggcagcgaaagcagcagaactggaaaatccaactcctgcctgactggctctgtgcacttttgcaaggccacagcatgtctggtggccccatccctgactgactgcccaagcttcacagaa

SEQ ID NO: 25917 - protein, 132 aa, Homo sapiens; identical to SEQ ID NO: 25911

SEQ ID NO: 25918 - DNA, 3993 bp, Homo sapiens
gtgttaaagaaatcttactccaaggccttcacgctgaccatctctgccctctttgtgacacccaagacgactggggcccgggtggagttaagcgagcagcaactgcagttgtggccgagtgatgtggacaagctgtcacccactgacaacctgccgcgggggagccgcgcccacatcaccctcggctgtgcagctgacgtagaggccgtgcagacgggccttgacctcttagagattctgcggcaggagaaggggggcagccgaggcgaggaggtgggcgagctaagccggggcaagctctattccttgggcaatgggcgctggatgctgaccctggccaagaacatggaggtcagggccatcttcacggggtactacgggaaaggcaaacctgtgcccacgcaaggtagccggaaggggggcgccttgcagtcctgcaccatcatatgagtgttctcaccaccacttatgcccctagaagggaaggggagagggaaacgtgccctctgtttgatccttgttttgtgacattttttttttttttttttttactcaaagttaacctacctgtaactttttaaaaacttgtaaaataactgaccctcccttcctgtccgccctcttcccctctaatgctcacgctcccaacacaaggtgggcagggaggcaccattcaggaacctggaccaaagctgacgaggtggtaagggccaagtcccaccggttgcttctgggaaggggtttctaacactagtctgtgtgctgtggttcctggggtgccctccactgccctctgttcagtaacagggccttgctaatcgggttgtcactcaacaaaagtgctttggatttaagttactatcctggctttgcccaacctcagcaacctgtaagactgataatgaaataaatcatgttaatcctagctgtgtgcagtctctcttacccttctgtgcccagctcagtcttccctagggctgggtgtattaggactggctttgtcccacagcttggggccatcggtcctgtctcccctctgctggccgggcacagctgtggtgaggttgggcagctgaacagtgttggctttcatgaggaggcagaaagcagaggctggcctcagactcatacagaaggtgggggttggctgggtacgagggatgtggagcacaaaagcctctcatcccccattaaccagggcaccaagcccacaggtgtccccagcccactggatcagaaagagttcagtaagaccggaagctcctggtatgggtttctcccagttctctagggaaggccacctgcaggtcactgaaacttcaagcaccagggaagatctaacatttgagtcccttccaggccatcagaggcctagtcagccacatgggaaacttccaagacctgactcaggcatcattccaccatggctaaggcaccagccggggaagacttgaaagaaaggggcaggagctcagatgaagagaaatcctaagttacctttctaggtcaaggcctgtccctggccatctctgaacttcagctagagcttcaagtctgtgcctggagctcctgggaaggctactcaccttgaacaccacgcttgacaggacagcatggtgcatgccgctgcatccgtgagcagtgtgtctcctgcatgcagaaagggagcagagaaggccaggggcttttgctaaaaatagtggccagaccagagctctggagccacctgtcccacctcaaatgggtctgggggtcaggaggcagggttttatctctgtctaccatctccctcgaacccacactgcaacaggaactgtgagagtctttgtaagtaaactgccctgtctaggtcagtacccacctgagctttggacgcacacagcttttagtacccacctgagctttggacacacacagcttctagtgatttctggggccccaccgtaaagtgagcatgctttctgaactcgcttctctgtgactgatgttaggctgggcccagaggcacagccggggcctgcctagcactcacatgctggacaggtctgggagaggcagagtgccccacctgccactaggctgggtgcccacagcccgcatgcagcagcttgctgcaccccaagtccaggtcgggctcagctctggctcacagactggagacaatgcagatgccagagcaaagggccaggaagggtcaaaacattttattctcttttttttttcttttttaataaagttaaacagtaaaacaaaaattcacaagctgcctccctgtccacccccgcctccctcccctgccctcggtcttcggcattggttccctttgctccaccccactcacagagacacagggcatccaactgagaaaacgaaactgctctaagcacacggagacgtgatgaagggaggaggtgaactgtttccacattcaagattaaactgagtgaatctgcattttctgggttctgggtggttgcccttcattagccaaattgaaaaaagaaattccctggaccagatgctgaaagagaaaagaggggttggtagttggctatggattttctaaggaagatcactttgctctgattatggaaaagtcttcaagggctgcttcaaactcaaacacagagagaaactctatgggtatcaaacagctcaggctgtttttgggtgcaagagggagcacgtgactgtattatacatgggtagcttctgacctcagcattatctatatagtacctttgctcttgcagagaagccttggtactaggcagttagagatgcctccctgaccctgcagagatgcggtggctaaaggtcccaaggcaaggggtgcctgggaaccttcctgtcttcatccttagcaacagccgagtggatagatgccctgctagatgagaattcagctgcccccgctcatgggcccctctgactcccaaagagctgcctaagaggcaatgagtgtgttggcttgtgatctgggaactcccaagaacagcaggcccacctaccttcaaagctgaagccgccaggaccgccaaagaatgccttgaagatattgtttggatcaaaatctgtagagcagggcaagtaacatggaagggaagaaaaggtgaaaaattagaaatgttcgaagagaactgatgacactgagaacagatctccaaagctttcctggagagtctcactcccctcctttcccaacacttcagactgcaagtgagcaaacctgccccatcccgtgcaaaacatgctacctgatcccactcctaggacatgttcccttctccttccaactgctgccccaaaggaagctttctctgcttcagcttgcttcattgggctgttttctcaacaaatggaatgccatttgcacttacacaagactttccccatactctgtctccctataatgctggagcggctactaaaaaggataaaatgtatcacttaaatgttaccaaaaataaatataagagcaagatctaggatttactgtatttgattccatgtcttttactccgtagactctaggctagaaaaaaagctatggtttattagctgggcgtggtggctcacacctataatcccagtgctttgggagtctaaggtgggaggatcacttgagcccaggagttcaaggctgcagtaagctatgatcacaacactgcaccccagcctgggtgacagcaagaccctgtcttaataacaacaacaaaccaacaaaaacacctactaggtgcaaagtactaggtactttgcatacattacattacttaatcctagtaatgttttgtcagggtaagtatcattcccaattaatactcaacaaaacatatgtaggtggttcaagtaacttgcccacgatcacatggcagcgaaagcagcagaactggaaaatccaactcctgcctgactggctctgtgcacttttgcaaggccacagcatgtctggtggccccatccctgactgactgcccaagcttcacagaa

SEQ ID NO: 25919 - protein, 132 aa, Homo sapiens; identical to SEQ ID NO: 25911

SEQ ID NO: 25920 - DNA, 1520 bp, Homo sapiens
cttcacgctgaccatctctgccctctttgtgacacccaagacgactggggcccgggtggagttaagcgagcagcaactgcagttgtggccgagtgatgtggacaagctgtcacccactgacaacctgccgcgggggagccgcgcccacatcaccctcggctgtgcagctgacgtagaggccgtgcagacgggccttgacctcttagagattctgcggcaggagaaggggggcagccgaggcgaggaggtgggcgagctaagccggggcaagctctattccttgggcaatgggcgctggatgctgaccctggccaagaacatggaggtcagggccatcttcacggggtactacgggaaaggcaaacctgtgcccacgcaaggtagccggaaggggggcgccttgcagtcctgcaccatcatatgagtgttctcaccaccacttatgcccctctaatgctcacgctcccaacacaaggtgggcagggaggcaccattcaggaacctggaccaaagctgacgaggctgggccaagccagggatggggccacagccagaaccccgagccctacttccaggttctggttagctcagccccagcccagcccagctgctctgcccagagctgggtgagtggggagacacctcagagccccgcaaaacccactgaccggaggcaaaaggcagtggggctgggggtagttttccatggtcacagagaactagtggtggctctgagaaggggaggacctctgggctttgattccatctccttgtcttttttctttgtttttagagacagggtcctgctatttcccaagctggagtgcagtggtgcgatcatggctcactgcagcctcgaactcctgggctcaagcaatcctcctgagtgatcccatttcttaatcagtgtagccccaagaaggctggggctatttaccagggtagaaaaaggagcttacctcccacctttggtcctaagtccctgccccctccccttcacaccataactaggtaacagtttgataactagggaagaaagcagaacagttaagcagccgccacatccccgctggctgggggcctcactccaggaaggggctggactggctgtcctttccagtggcctggctccgctgtgtggatggggagatcggggccagaggcagaaccctggtgaggaagctccagtcctgctctctacccagcccatcttgcctccatggtgcctctggaggcctctgggcctcctctaacaggggctggtgggcaccaagagccaatggagtagacccctggctggtaagggccaagtcccaccggttgcttctgggaaggggtttctaacactagtctgtgtgctgtggttcctggggtgccctccactgccctctgttcagtaacagggccttgctaatcgggttgtcactcaacaaaagtgctttggatttaagttactatcctggctttgcccaacctcagcaacctgtaagactgataatgaaataaatcatgttaatcct

SEQ ID NO: 25921 - protein, 69 aa, Homo sapiens [sequence omitted]

SEQ ID NO: 25922 - DNA, 4589 bp, Homo sapiens
cttcacgctgaccatctctgccctctttgtgacacccaagacgactggggcccgggtggagttaagcgagcagcaactgcagttgtggccgagtgatgtggacaagctgtcacccactgacaacctgccgcgggggagccgcgcccacatcaccctcggctgtgcagctgacgtagaggccgtgcagacgggccttgacctcttagagattctgcggcaggagaaggggggcagccgaggcgaggaggtgggcgagctaagccggggcaagctctattccttgggcaatgggcgctggatgctgaccctggccaagaacatggaggtcagggccatcttcacggggtactacgggaaaggcaaacctgtgcccacgcaaggtagccggaaggggggcgccttgcagtcctgcaccatcatatgagtgttctcaccaccacttatgcccctctaatgctcacgctcccaacacaaggtgggcagggaggcaccattcaggaacctggaccaaagctgacgaggctgggccaagccagggatggggccacagccagaaccccgagccctacttccaggttctggttagctcagccccagcccagcccagctgctctgcccagagctgggtgagtggggagacacctcagagccccgcaaaacccactgaccggaggcaaaaggcagtggggctgggggtagttttccatggtcacagagaactagtggtggctctgagaaggggaggacctctgggctttgattccatctccttgtcttttttctttgtttttagagacagggtcctgctatttcccaagctggagtgcagtggtgcgatcatggctcactgcagcctcgaactcctgggctcaagcaatcctcctgagtgatcccatttcttaatcagtgtagccccaagaaggctggggctatttaccagggtagaaaaaggagcttacctcccacctttggtcctaagtccctgccccctccccttcacaccataactaggtaacagtttgataactagggaagaaagcagaacagttaagcagccgccacatccccgctggctgggggcctcactccaggaaggggctggactggctgtcctttccagtggcctggctccgctgtgtggatggggagatcggggccagaggcagaaccctggtgaggaagctccagtcctgctctctacccagcccatcttgcctccatggtgcctctggaggcctctgggcctcctctaacaggggctggtgggcaccaagagccaatggagtagacccctggctggtaagggccaagtcccaccggttgcttctgggaaggggtttctaacactagtctgtgtgctgtggttcctggggtgccctccactgccctctgttcagtaacagggccttgctaatcgggttgtcactcaacaaaagtgctttggatttaagttactatcctggctttgcccaacctcagcaacctgtaagactgataatgaaataaatcatgttaatcctagctgtgtgcagtctctcttacccttctgtgcccagctcagtcttccctagggctgggtgtattaggactggctttgtcccacagcttggggccatcggtcctgtctcccctctgctggccgggcacagctgtggtgaggttgggcagctgaacagtgttggctttcatgaggaggcagaaagcagaggctggcctcagactcatacagaaggtgggggttggctgggtacgagggatgtggagcacaaaagcctctcatcccccattaaccagggcaccaagcccacaggtgtccccagcccactggatcagaaagagttcagtaagaccggaagctcctggtatgggtttctcccagttctctagggaaggccacctgcaggtcactgaaacttcaagcaccagggaagatctaacatttgagtcccttccaggccatcagaggcctagtcagccacatgggaaacttccaagacctgactcaggcatcattccaccatggctaaggcaccagccggggaagacttgaaagaaaggggcaggagctcagatgaagagaaatcctaagttacctttctaggtcaaggcctgtccctggccatctctgaacttcagctagagcttcaagtctgtgcctggagctcctgggaaggctactcaccttgaacaccacgcttgacaggacagcatggtgcatgccgctgcatccgtgagcagtgtgtctcctgcatgcagaaagggagcagagaaggccaggggcttttgctaaaaatagtggccagaccagagctctggagccacctgtcccacctcaaatgggtctgggggtcaggaggcagggttttatctctgtctaccatctccctcgaacccacactgcaacaggaactgtgagagtctttgtaagtaaactgccctgtctaggtcagtacccacctgagctttggacgcacacagcttttagtacccacctgagctttggacacacacagcttctagtgatttctggggccccaccgtaaagtgagcatgctttctgaactcgcttctctgtgactgatgttaggctgggcccagaggcacagccggggcctgcctagcactcacatgctggacaggtctgggagaggcagagtgccccacctgccactaggctgggtgcccacagcccgcatgcagcagcttgctgcaccccaagtccaggtcgggctcagctctggctcacagactggagacaatgcagatgccagagcaaagggccaggaagggtcaaaacattttattctcttttttttttcttttttaataaagttaaacagtaaaacaaaaattcacaagctgcctccctgtccacccccgcctccctcccctgccctcggtcttcggcattggttccctttgctccaccccactcacagagacacagggcatccaactgagaaaacgaaactgctctaagcacacggagacgtgatgaagggaggaggtgaactgtttccacattcaagattaaactgagtgaatctgcattttctgggttctgggtggttgcccttcattagccaaattgaaaaaagaaattccctggaccagatgctgaaagagaaaagaggggttggtagttggctatggattttctaaggaagatcactttgctctgattatggaaaagtcttcaagggctgcttcaaactcaaacacagagagaaactctatgggtatcaaacagctcaggctgtttttgggtgcaagagggagcacgtgactgtattatacatgggtagcttctgacctcagcattatctatatagtacctttgctcttgcagagaagccttggtactaggcagttagagatgcctccctgaccctgcagagatgcggtggctaaaggtcccaaggcaaggggtgcctgggaaccttcctgtcttcatccttagcaacagccgagtggatagatgccctgctagatgagaattcagctgcccccgctcatgggcccctctgactcccaaagagctgcctaagaggcaatgagtgtgttggcttgtgatctgggaactcccaagaacagcaggcccacctaccttcaaagctgaagccgccaggaccgccaaagaatgccttgaagatattgtttggatcaaaatctgtagagcagggcaagtaacatggaagggaagaaaaggtgaaaaattagaaatgttcgaagagaactgatgacactgagaacagatctccaaagctttcctggagagtctcactcccctcctttcccaacacttcagactgcaagtgagcaaacctgccccatcccgtgcaaaacatgctacctgatcccactcctaggacatgttcccttctccttccaactgctgccccaaaggaagctttctctgcttcagcttgcttcattgggctgttttctcaacaaatggaatgccatttgcacttacacaagactttccccatactctgtctccctataatgctggagcggctactaaaaaggataaaatgtatcacttaaatgttaccaaaaataaatataagagcaagatctaggatttactgtatttgattccatgtcttttactccgtagactctaggctagaaaaaaagctatggtttattagctgggcgtggtggctcacacctataatcccagtgctttgggagtctaaggtgggaggatcacttgagcccaggagttcaaggctgcagtaagctatgatcacaacactgcaccccagcctgggtgacagcaagaccctgtcttaataacaacaacaaaccaacaaaaacacctactaggtgcaaagtactaggtactttgcatacattacattacttaatcctagtaatgttttgtcagggtaagtatcattcccaattaatactcaacaaaacatatgtaggtggttcaagtaacttgcccacgatcacatggcagcgaaagcagcagaactggaaaatccaactcctgcctgactggctctgtgcacttttgcaaggccacagcatgtctggtggccccatccctgactgactgcccaagcttcacagaa

SEQ ID NO: 25923 - protein, 69 aa, Homo sapiens [sequence omitted]

SEQ ID NO: 25924 - DNA, 1104 bp, Homo sapiens
tggctcttggtgcccaccagcccctgttagaggaggcccagaggcctccagaggcaccatggaggcaagatgggctgggtagagagcaggactggagcttcctcaccagggttctgcctctggccccgatctccccatccacacagcggagccaggccactggaaaggacagccagtccagccccttcctggagtgaggcccccagccagcggggatgtggcggctgcttaactgttctgctttcttccctagttatcaaactgttacctagttatggtgtgaaggggagggggcagggacttaggaccaaaggtgggaggtaagctcctttttctaccctggtaaatagccccagccttcttggggctacactgattaagaaatgggatcactcaggaggattgcttgagcccaggagttcgaggctgcagtgagccatgatcgcaccactgcactccagcttgggaaatagcaggaccctgtctctaaaaacaaagaaaaaagacaaggagatggaatcaaagcccagaggtcctccccttctcagagccaccactagttctctgtgaccatggaaaactacccccagccccactgccttttgcctccggtcagtgggttttgcggggctctgaggtgtctccccactcacccagctctgggcagagcagctgggctgggctggggctgagctaaccagaacctggaagtagggctcggggttctggctgtggccccatccctggcttggcccagcctcgtcagctttggtccaggttcctgaatggtgcctccctgcccaccttgtgttgggagcgtgagactgcaaggcgccccccttccggctaccttgcgtgggcacaggtttgcctttcccgtagtaccccgtgaagatggccctgacctccatgttcttggccagggtcagcatccagcgcccattgcccaaggaatagagcttgccccggcttagctcgcccacctcctcgcctcggctgccccccttctcctgccgcagaatctctaagaggtcaaggcccgtctgcacggcctctacgtcagctgcacagccgagggtgatgtgggcgcggctcccccgcggc

SEQ ID NO: 25925 - protein, 62 aa, Homo sapiens [sequence omitted]

SEQ ID NO: 25926 - DNA, 4221 bp, Homo sapiens
gcaaacctgtgcccacgcaaggtagccggaaggggggcgccttgcagtcctgcaccatcatatgagtgttctcaccaccacttatgcccctagaagggaaggggagagggaaacgtgccctctgtttgatccttgttttgtgacattttttttttttttttttttactcaaagttaacctacctgtaactttttaaaaacttgtaaaataactgaccctcccttcctgtccgccctcttcccctctaatgctcacgctcccaacacaaggtgggcagggaggcaccattcaggaacctggaccaaagctgacgaggctgggccaagccagggatggggccacagccagaaccccgagccctacttccaggttctggttagctcagccccagcccagcccagctgctctgcccagagctgggtgagtggggagacacctcagagccccgcaaaacccactgaccggaggcaaaaggcagtggggctgggggtagttttccatggtcacagagaactagtggtggctctgagaaggggaggacctctgggctttgattccatctccttgtcttttttctttgtttttagagacagggtcctgctatttcccaagctggagtgcagtggtgcgatcatggctcactgcagcctcgaactcctgggctcaagcaatcctcctgagtgatcccatttcttaatcagtgtagccccaagaaggctggggctatttaccagggtagaaaaaggagcttacctcccacctttggtcctaagtccctgccccctccccttcacaccataactaggtaacagtttgataactagggaagaaagcagaacagttaagcagccgccacatccccgctggctgggggcctcactccaggaaggggctggactggctgtcctttccagtggcctggctccgctgtgtggatggggagatcggggccagaggcagaaccctggtgaggaagctccagtcctgctctctacccagcccatcttgcctccactgccctctgttcagtaacagggccttgctaatcgggttgtcactcaacaaaagtgctttggatttaagttactatcctggctttgcccaacctcagcaacctgtaagactgataatgaaataaatcatgttaatcctagctgtgtgcagtctctcttacccttctgtgcccagctcagtcttccctagggctgggtgtattaggactggctttgtcccacagcttggggccatcggtcctgtctcccctctgctggccgggcacagctgtggtgaggttgggcagctgaacagtgttggctttcatgaggaggcagaaagcagaggctggcctcagactcatacagaaggtgggggttggctgggtacgagggatgtggagcacaaaagcctctcatcccccattaaccagggcaccaagcccacaggtgtccccagcccactggatcagaaagagttcagtaagaccggaagctcctggtatgggtttctcccagttctctagggaaggccacctgcaggtcactgaaacttcaagcaccagggaagatctaacatttgagtcccttccaggccatcagaggcctagtcagccacatgggaaacttccaagacctgactcaggcatcattccaccatggctaaggcaccagccggggaagacttgaaagaaaggggcaggagctcagatgaagagaaatcctaagttacctttctaggtcaaggcctgtccctggccatctctgaacttcagctagagcttcaagtctgtgcctggagctcctgggaaggctactcaccttgaacaccacgcttgacaggacagcatggtgcatgccgctgcatccgtgagcagtgtgtctcctgcatgcagaaagggagcagagaaggccaggggcttttgctaaaaatagtggccagaccagagctctggagccacctgtcccacctcaaatgggtctgggggtcaggaggcagggttttatctctgtctaccatctccctcgaacccacactgcaacaggaactgtgagagtctttgtaagtaaactgccctgtctaggtcagtacccacctgagctttggacgcacacagcttttagtacccacctgagctttggacacacacagcttctagtgatttctggggccccaccgtaaagtgagcatgctttctgaactcgcttctctgtgactgatgttaggctgggcccagaggcacagccggggcctgcctagcactcacatgctggacaggtctgggagaggcagagtgccccacctgccactaggctgggtgcccacagcccgcatgcagcagcttgctgcaccccaagtccaggtcgggctcagctctggctcacagactggagacaatgcagatgccagagcaaagggccaggaagggtcaaaacattttattctcttttttttttcttttttaataaagttaaacagtaaaacaaaaattcacaagctgcctccctgtccacccccgcctccctcccctgccctcggtcttcggcattggttccctttgctccaccccactcacagagacacagggcatccaactgagaaaacgaaactgctctaagcacacggagacgtgatgaagggaggaggtgaactgtttccacattcaagattaaactgagtgaatctgcattttctgggttctgggtggttgcccttcattagccaaattgaaaaaagaaattccctggaccagatgctgaaagagaaaagaggggttggtagttggctatggattttctaaggaagatcactttgctctgattatggaaaagtcttcaagggctgcttcaaactcaaacacagagagaaactctatgggtatcaaacagctcaggctgtttttgggtgcaagagggagcacgtgactgtattatacatgggtagcttctgacctcagcattatctatatagtacctttgctcttgcagagaagccttggtactaggcagttagagatgcctccctgaccctgcagagatgcggtggctaaaggtcccaaggcaaggggtgcctgggaaccttcctgtcttcatccttagcaacagccgagtggatagatgccctgctagatgagaattcagctgcccccgctcatgggcccctctgactcccaaagagctgcctaagaggcaatgagtgtgttggcttgtgatctgggaactcccaagaacagcaggcccacctaccttcaaagctgaagccgccaggaccgccaaagaatgccttgaagatattgtttggatcaaaatctgtagagcagggcaagtaacatggaagggaagaaaaggtgaaaaattagaaatgttcgaagagaactgatgacactgagaacagatctccaaagctttcctggagagtctcactcccctcctttcccaacacttcagactgcaagtgagcaaacctgccccatcccgtgcaaaacatgctacctgatcccactcctaggacatgttcccttctccttccaactgctgccccaaaggaagctttctctgcttcagcttgcttcattgggctgttttctcaacaaatggaatgccatttgcacttacacaagactttccccatactctgtctccctataatgctggagcggctactaaaaaggataaaatgtatcacttaaatgttaccaaaaataaatataagagcaagatctaggatttactgtatttgattccatgtcttttactccgtagactctaggctagaaaaaaagctatggtttattagctgggcgtggtggctcacacctataatcccagtgctttgggagtctaaggtgggaggatcacttgagcccaggagttcaaggctgcagtaagctatgatcacaacactgcaccccagcctgggtgacagcaagaccctgtcttaataacaacaacaaaccaacaaaaacacctactaggtgcaaagtactaggtactttgcatacattacattacttaatcctagtaatgttttgtcagggtaagtatcattcccaattaatactcaacaaaacatatgtaggtggttcaagtaacttgcccacgatcacatggcagcgaaagcagcagaactggaaaatccaactcctgcctgactggctctgtgcacttttgcaaggccacagcatgtctggtggccccatccctgactgactgcccaagcttcacagaa

SEQ ID NO: 25927 - protein, 132 aa, Homo sapiens; identical to SEQ ID NO: 25911

SEQ ID NO: 25928 - DNA, 1042 bp, Homo sapiens
aaaaaaccagagtcagatttgtccactgatgccagatgtcttcctgtagaacacaaacagctcctaaaaaatgcgcagctggaactgaagaagagtaagaggaaagattactacaagattctaggagtggacaagaatgcctctgaggacgagatcaagaaagcttatcggaaacgggccttgatgcaccatccagatcggcatagtggagccagtgctgaggttcagaaggaggaggagaagaagttcaaggaagttggagaggcctttactatcctctctgatcccaagaaaaagactcgctatgacagtggacaggacctagatgaggagggcatgaatatgggtgattttgatccaaacaatatcttcaaggcattctttggcggtcctggcggcttcagctttgaagcatctggtccagggaatttcttttttcaatttggctaatgaagggcaaccacccagaacccagaaaatgcagattcactcagtttaatcttgaatgtggaaacagttcacctcctcccttcatcacgtctccgtgtgcttagagcagtttcgttttctcagttggatgccctgtgtctctgtgagtggggtggagcaaagggaaccaatgccgaagaccgagggcaggggagggaggcgggggtggacagggaggcagcttgtgaatttttgttttactgtttaactttattaaaaaagaaaaaaaaaagagaataaaatgttttgacccttcctggccctttgctctggcatctgcattgtctccagtctgtgagccagagctgagcccgacctggacttggggtgcagcaagctgctgcatgcgggctgtgggcacccagcctagtggcaggtggggcactctgcctctcccagacctgtccagcatgtgagtgctaggcaggccccggctgtgcctctgggcccagcctaacatcagtcacagagaagcgagttcagaaagcatgctcactttacggtggggccccagaaatcactagaagctgtgtgtgtccaaagctcaggtggg

SEQ ID NO: 25929 - protein, 88 aa, Homo sapiens [sequence omitted]

SEQ ID NO: 25930 - DNA, 2114 bp, Homo sapiens
ccggcctcccacccagctctctggtcccggcggtaagatggcggctgccgcggagtgcgatgtggtaatggcggcgaccgagccggagctgctcgacgaccaagaggcgaagagggaagcagagactttcaaggaacaaggaaatgcatactatgccaagaaagattacaatgaagcttataattattatacaaaagccatagatatgtgtcctaaaaatgctagctattatggtaatcgagcagccaccttgatgatgcttggaaggttccgggaagctcttggagatgcacaacagtcagtgaggttggatgacagttttgtccggggacatctacgagagggcaagtgccacctctctctggggaatgccatggcagcatgtcgcagcttccagagagccctagaactggatcataaaaatgctcaggcacaacaagagttcaagaatgctaatgcagtcatggaatatgagaaaatagcagaaacagattttgagaagcgagattttcggaaggttgttttctgcatggaccgtgccctagaatttgcccctgcctgccatcgcttcaaaatcctcaaggcagaatgtttagcaatgctgggtcgttatccagaagcacagtctgtggctagtgacattctacgaatggattccaccaatgcagatgctctgtatgtacgaggtctttgcctttattacgaagattgtattgagaaggcagttcagtttttcgtacaggctctcaggatggctcctgaccacgagaaggcctgcattgcctgcagaaatgccaaagcactcaaagcaaagaaagaagatgggaataaagcatttaaggaaggaaattacaaactagcatatgaactgtacacagaagccctggggatagaccccaacaatataaaaacaaatgctaaactctactgtaatcggggtacggttaattccaagcttaggaaactagatgatgcaatagaagactgcacaaatgcagtgaagcttgatgacacttacataaaagcctacttgagaagagctcagtgttacatggacacagaacagtatgaagaagcagtacgagactatgaaaaagtataccagacagagaaaacaaaagaacacaaacagctcctaaaaaatgcgcagctggaactgaagaagagtaagaggaaagattactacaagattctaggagtggacaagaatgcctctgaggacgagatcaagaaagcttatcggaaacgggccttgatgcaccatccagatcggcatagtggagccagtgctgaggttcagaaggaggaggagaagaagttcaaggaagttggagaggcctttactatcctctctgatcccaagaaaaagactcgctatgacagtggacaggacctagatgaggagggcatgaatatgggtgattttgatccaaacaatatcttcaaggcattctttggcggtcctggcggcttcagctttgaagcatctggtccagggaatttcttttttcaatttggctaatgaagggcaaccacccagaacccagaaaatgcagattcactcagtttaatcttgaatgtggaaacagttcacctcctcccttcatcacgtctccgtgtgcttagagcagtttcgttttctcagttggatgccctgtgtctctgtgagtggggtggagcaaagggaaccaatgccgaagaccgagggcaggggagggaggcgggggtggacagggaggcagcttgtgaatttttgttttactgtttaactttattaaaaaagaaaaaaaaaagagaataaaatgttttgacccttcctggccctttgctctggcatctgcattgtctccagtctgtgagccagagctgagcccgacctggacttggggtgcagcaagctgctgcatgcgggctgtgggcacccagcctagtggcaggtggggcactctgcctctcccagacctgtccagcatgtgagtgctaggcaggccccggctgtgcctctgggcccagcctaacatcagtcacagagaagcgagttcagaaagcatgctcactttacggtggggccccagaaatcactagaagctgtgtgtgtccaaagctcaggtggg

SEQ ID NO: 25931 - protein, 494 aa, Homo sapiens
MAAAAECDVVMAATEPELLDDQEAKREAETFKEQGNAYYAKKDYNEAYNYYTKAIDMCPKNASYYGNRAATLMMLGRFREALGDAQQSVRLDDSFVRGHLREGKCHLSLGNAMAACRSFQRALELDHKNAQAQQEFKNANAVMEYEKIAETDFEKRDFRKVVFCMDRALEFAPACHRFKILKAECLAMLGRYPEAQSVASDILRMDSTNADALYVRGLCLYYEDCIEKAVQFFVQALRMAPDHEKACIACRNAKALKAKKEDGNKAFKEGNYKLAYELYTEALGIDPNNIKTNAKLYCNRGTVNSKLRKLDDAIEDCTNAVKLDDTYIKAYLRRAQCYMDTEQYEEAVRDYEKVYQTEKTKEHKQLLKNAQLELKKSKRKDYYKILGVDKNASEDEIKKAYRKRALMHHPDRHSGASAEVQKEEEKKFKEVGEAFTILSDPKKKTRYDSGQDLDEEGMNMGDFDPNNIFKAFFGGPGGFSFEASGPGNFFFQFG

SEQ ID NO: 25932 - DNA, 1702 bp, Homo sapiens
gctgccgcggagtgcgatgtggtaatggcggcgaccgagccggagctgctcgacgaccaagaggcgaagagatatgtgtcctaaaaatgctagctattatggtaatcgagcagccaccttgatgatgcttggaaggttccgggaagctcttggagatgcacaacagtcagtgaggttggatgacagttttgtccggggacatctacgagagggcaagtgccacctctctctggggaatgccatggcagcatgtcgcagcttccagagagccctagaactggatcataaaaatgctcaggcacaacaagagttcaagaatgctaatgcagtcatggaatatgagaaaatagcagaaacagattttgagaagcgagattttcggaaggttgttttctgcatggaccgtgccctagaatttgcccctgcctgccatcgcttcaaaatcctcaaggcagaatgtttagcaatgctgggtcgttatccagaagcacagtctgtggctagtgacattctacgaatggattccaccaatgcagatgctctgtatgtacgaggtctttgcctttattacgaagattgtattgagaaggcagttcagtttttcgtacaggctctcaggatggctcctgaccacgagaaggcctgcattgcctgcagaaatgccaaagcactcaaagcaaagaaagaagatgggaataaagcatttaaggaaggaaattacaaactagcatatgaactgtacacagaagccctggggatagaccccaacaatataaaaacaaatgctaaactctactgtaatcggggtacggttaattccaagcttaggaaactagatgatgcaatagaagactgcacaaatgcagtgaagcttgatgacacttacataaaagcctacttgagaagagctcagtgttacatggacacagaacagtatgaagaagcagtacgagactatgaaaaagtataccagacagagaaaacaaaagaacacaaacagctcctaaaaaatgcgcagctggaactgaagaagagtaagaggaaagattactacaagattctaggagtggacaagaatgcctctgaggacgagatcaagaaagcttatcggaaacgggccttgatgcaccatccagatcggcatagtggagccagtgctgaggttcagaaggaggaggagaagaagttcaaggaagttggagaggcctttactatcctctctgatcccaagaaaaagactcgctatgacagtggacaggacctagatgaggagggcatgaatatgggtgattttgatccaaacaatatcttcaaggcattctttggcggtcctggcggcttcagctttgaagcatctggtccagggaatttcttttttcaatttggctaatgaagggcaaccacccagaacccagaaaatgcagattcactcagtttaatcttgaatgtggaaacagttcacctcctcccttcatcacgtctccgtgtgcttagagcagtttcgttttctcagttggatgccctgtgtctctgtgagtggggtggagcaaagggaaccaatgccgaagaccgagggcaggggagggaggcgggggtggacagggaggcagcttgtgaatttttgttttactgtttaactttattaaaaaagaaaaaaaaaagagaataaaatgttttgacccttcctggccctttgctctgg

SEQ ID NO: 25933 - protein, 438 aa, Homo sapiens
MCPKNASYYGNRAATLMMLGRFREALGDAQQSVRLDDSFVRGHLREGKCHLSLGNAMAACRSFQRALELDHKNAQAQQEFKNANAVMEYEKIAETDFEKRDFRKVVFCMDRALEFAPACHRFKILKAECLAMLGRYPEAQSVASDILRMDSTNADALYVRGLCLYYEDCIEKAVQFFVQALRMAPDHEKACIACRNAKALKAKKEDGNKAFKEGNYKLAYELYTEALGIDPNNIKTNAKLYCNRGTVNSKLRKLDDAIEDCTNAVKLDDTYIKAYLRRAQCYMDTEQYEEAVRDYEKVYQTEKTKEHKQLLKNAQLELKKSKRKDYYKILGVDKNASEDEIKKAYRKRALMHHPDRHSGASAEVQKEEEKKFKEVGEAFTILSDPKKKTRYDSGQDLDEEGMNMGDFDPNNIFKAFFGGPGGFSFEASGPGNFFFQFG

SEQ ID NO: 25934 - DNA, 2034 bp, Homo sapiens
acgggtaaagtggcgccgcctacgcaccggcacagcccctgggctcccgccccggcgcggagaccaccgtggacatccgggggcgggaggccgctctggccccaagcggagcctctctctggtagacgagcccgagggagcccttctgggcgcggcgccgcggagctgctctatgctccaaccggaagtgctcttcaccgccggcctcccacccagctctctggtcccggcggtaagatggcggctgccgcggagtgcgatgtggtaatggcggcgaccgagccggagctgctcgacgaccaagaggcgaagagggaagcagagactttcaaggaacaaggaaatgcatactatgccaagaaagattacaatgaagcttataattattatacaaaagccatagatatgtgtcctaaaaatgctagctattatggtaatcgagcagccaccttgatgatgcttggaaggttccgggaagctcttggagatgcacaacagtcagtgaggttggatgacagttttgtccggggacatctacgagagggcaagtgccacctctctctggggaatgccatggcagcatgtcgcagcttccagagagccctagaactggatcataaaaatgctcaggcacaacaagagttcaagaatgctaatgcagtcatggaatatgagaaaatagcagaaacagattttgagaagcgagattttcggaaggttgttttctgcatggaccgtgccctagaatttgcccctgcctgccatcgcttcaaaatcctcaaggcagaatgtttagcaatgctgggtcgttatccagaagcacagtctgtggctagtgacattctacgaatggattccaccaatgcagatgctctgtatgtacgaggtctttgcctttattacgaagattgtattgagaaggcagttcagtttttcgtacaggctctcaggatggctcctgaccacgagaaggcctgcattgcctgcagaaatgccaaagcactcaaagcaaagaaagaagatgggaataaagcatttaaggaaggaaattacaaactagcatatgaactgtacacagaagccctggggatagaccccaacaatataaaaacaaatgctaaactctactgtaatcggggtacggttaattccaagcttaggaaactagatgatgcaatagaagactgcacaaatgcagtgaagcttgatgacacttacataaaagcctacttgagaagagctcagtgttacatggacacagaacagtatgaagaagcagtacgagactatgaaaaagtataccagacagagaaaacaaaagaacacaaacagctcctaaaaaatgcgcagctggaactgaagaagagtaagaggaaagattactacaagattctaggagtggacaagaatgcctctgaggacgagatcaagaaagcttatcggaaacgggccttgatgcaccatccagatcggcatagtggagccagtgctgaggttcagaaggaggaggagaagaagttcaaggaagttggagaggcctttactatcctctctgatcccaagaaaaagactcgctatgacagtggacaggacctagatgaggagggcatgaatatgggtgattttgatccaaacaatatcttcaaggcattctttggcggtcctggcggcttcagctttgaagcatctggtccagggaatttcttttttcaatttggctaatgaagggcaaccacccagaacccagaaaatgcagattcactcagtttaatcttgaatgtggaaacagttcacctcctcccttcatcacgtctccgtgtgcttagagcagtttcgttttctcagttggatgccctgtgtctctgtgagtggggtggagcaaagggaaccaatgccgaagaccgagggcaggggagggaggcgggggtggacagggaggcagcttgtgaatttttgttttactgtttaactttattaaaaaagaaaaaaaaaagagaataaaatgttttgacccttcctggccctttgctctgg

SEQ ID NO: 25935 - protein, 494 aa, Homo sapiens; identical to SEQ ID NO: 25931

SEQ ID NO: 25936 - DNA, 751 bp, Homo sapiens
aaaaaaccagagtcagatttgtccactgatgccagatgtcttcctgtagaacacaaacagctcctaaaaaatgcgcagctggaactgaagaagagtaagaggaaagattactacaagattctaggagtggacaagaatgcctctgaggacgagatcaagaaagcttatcggaaacgggccttgatgcaccatccagatcggcatagtggagccagtgctgaggttcagaaggaggaggagaagaagttcaaggaagttggagaggcctttactatcctctctgatcccaagaaaaagactcgctatgacagtggacaggacctagatgaggagggcatgaatatgggtgattttgatccaaacaatatcttcaaggcattctttggcggtcctggcggcttcagctttgaagcatctggtccagggaatttcttttttcaatttggctaatgaagggcaaccacccagaacccagaaaatgcagattcactcagtttaatcttgaatgtggaaacagttcacctcctcccttcatcacgtctccgtgtgcttagagcagtttcgttttctcagttggatgccctgtgtctctgtgagtggggtggagcaaagggaaccaatgccgaagaccgagggcaggggagggaggcgggggtggacagggaggcagcttgtgaatttttgttttactgtttaactttattaaaaaagaaaaaaaaaagagaataaaatgttttgacccttcctggcc

SEQ ID NO: 25937 - protein, 88 aa, Homo sapiens [sequence omitted]

SEQ ID NO: 25938 - DNA, 704 bp, Homo sapiens
aaaaaaccagagtcagatttgtccactgatgccagatgtcttcctgtagaacacaaacagctcctaaaaaatgcgcagctggaactgaagaagagtaagaggaaagattactacaagattctaggagtggacaagaatgcctctgaggacgagatcaagaaagcttatcggaaacgggccttgatgcaccatccagatcggcatagtggagccagtgctgaggttcagaaggaggaggagaagaagttcaaggaagttggagaggcctttactatcctctctgatcccaagaaaaagactcgctatgacagtggacaggacctagatgaggagggcatgaatatgggtgattttgatccaaacaatatcttcaaggcattctttggcggtcctggcggcttcagctttgaagcatctggtccagggaatttcttttttcaatttggctaatgaagggcaaccacccagaacccagaaaatgcagattcactcagtttaatcttgaatgtggaaacagttcacctcctcccttcatcacgtctccgtgtgcttagagcagtttcgttttctcagttggatgccctgtgtctctgtgagtggggtggagcaaagggaaccaatgccgaagaccgagggcaggggagggaggcgggggtggacagggaggcagcttgtgaatttttgttttactgtttaactttatt

SEQ ID NO: 25939 - protein, 88 aa, Homo sapiens [sequence omitted]

SEQ ID NO: 25940 - DNA, 1776 bp, Homo sapiens
ccggcctcccacccagctctctggtcccggcggtaagatggcggctgccgcggagtgcgatgtggtaatggcggcgaccgagccggagctgctcgacgaccaagaggcgaagagggaagcagagactttcaaggaacaaggaaatgcatactatgccaagaaagattacaatgaagcttataattattatacaaaagccatagatatgtgtcctaaaaatgctagctattatggtaatcgagcagccaccttgatgatgcttggaaggttccgggaagctcttggagatgcacaacagtcagtgaggttggatgacagttttgtccggggacatctacgagagggcaagtgccacctctctctggggaatgccatggcagcatgtcgcagcttccagagagccctagaactggatcataaaaatgctcaggcacaacaagagttcaagaatgctaatgcagtcatggaatatgagaaaatagcagaaacagattttgagaagcgagattttcggaaggttgttttctgcatggaccgtgccctagaatttgcccctgcctgccatcgcttcaaaatcctcaaggcagaatgtttagcaatgctgggtcgttatccagaagcacagtctgtggctagtgacattctacgaatggattccaccaatgcagatgctctgtatgtacgaggtctttgcctttattacgaagattgtattgagaaggcagttcagtttttcgtacaggctctcaggatggctcctgaccacgagaaggcctgcattgcctgcagaaatgccaaagcactcaaagcaaagaaagaagatgggaataaagcatttaaggaaggaaattacaaactagcatatgaactgtacacagaagccctggggatagaccccaacaatataaaaacaaatgctaaactctactgtaatcggggtacggttaattccaagcttaggaaactagatgatgcaatagaagactgcacaaatgcagtgaagcttgatgacacttacataaaagcctacttgagaagagctcagtgttacatggacacagaacagtatgaagaagcagtacgagactatgaaaaagtataccagacagagaaaacaaaagaacacaaacagctcctaaaaaatgcgcagctggaactgaagaagagtaagaggaaagattactacaagattctaggagtggacaagaatgcctctgaggacgagatcaagaaagcttatcggaaacgggccttgatgcaccatccagatcggcatagtggagccagtgctgaggttcagaaggaggaggagaagaagttcaaggaagttggagaggcctttactatcctctctgatcccaagaaaaagactcgctatgacagtggacaggacctagatgaggagggcatgaatatgggtgattttgatccaaacaatatcttcaaggcattctttggcggtcctggcggcttcagctttgaagcatctggtccagggaatttcttttttcaatttggctaatgaagggcaaccacccagaacccagaaaatgcagattcactcagtttaatcttgaatgtggaaacagttcacctcctcccttcatcacgtctccgtgtgcttagagcagtttcgttttctcagttggatgccctgtgtctctgtgagtggggtggagcaaagggaaccaatgccgaagaccgagggcaggggagggaggcgggggtggacagggaggcagcttgtgaatttttgttttactgtttaactttatt

SEQ ID NO: 25941 - protein, 494 aa, Homo sapiens; identical to SEQ ID NO: 25931

SEQ ID NO: 25942 - DNA, 725 bp, Homo sapiens
gccggcctcccacccagctctctggtcccggcggtaagatggcggctgccgcggagtgcgatgtggtaatggcggcgaccgagccggagctgctcgacgaccaagaggcgaagagggaagcagagactttcaaggaacaaggaaatgcatactatgccaagaaagattacaatgaagcttataattattatacaaaagccatagatatgtgtcctaaaaatgctagctattatggtaatcgagcagccaccttgatgatgcttggaaggttccgggaagctcttggagatgcacaacagtcagtgaggttggatgacagttttgtccggggacatctacgagagggcaagtgccacctctctctggggaatgccatggcagcatgtcgcagcttccagagagccctagaactggatcataaaaatgctcaggcacaacaagagttcaagaatgctaatgcagtcatggaatatgagaaaatagcagaaacagattttgagaagcgagattttcggaaggttgttttctgcatggaccgtgccctagaatttgcccctgcctgccatcgcttcaaaatccagtgacattctacgaatggattccaccaatgcagatgctctgtatgtacgaggtctttgcctttattacgaagattgtattgagaaggcagttcagtttttcgtacaggctctcaggatggctcctgaccacgagaaggcctgcat

SEQ ID NO: 25943 - protein, 181 aa, Homo sapiens
MAAAAECDVVMAATEPELLDDQEAKREAETFKEQGNAYYAKKDYNEAYNYYTKAIDMCPKNASYYGNRAATLMMLGRFREALGDAQQSVRLDDSFVRGHLREGKCHLSLGNAMAACRSFQRALELDHKNAQAQQEFKNANAVMEYEKIAETDFEKRDFRKVVFCMDRALEFAPACHRFKIQ

SEQ ID NO: 25944 - DNA, 289 bp, Homo sapiens
tgccttcacaaggaccccgttttatgcagagctggttctgctaatcatggggatcgtcagtgcttcacttcccaccccccaacctccccatgactagggacagctgcaggcaaagaagatcttttgtttcttccaagttcatctgtttcccctgccaggattctgcataagctaatcagatatatacattaccaaataaaagaccatcagtcaatgtgaatgattcttaatgtatcctcttatcaaaacatttactgaggccaggcgtggtggctcacgcctgtaatcc

SEQ ID NO: 25945 - protein, 30 aa, Homo sapiens
CLHKDPVLCRAGSANHGDRQCFTSHPPTSP

SEQ ID NO: 25946 - DNA, 3367 bp, Homo sapiens
ggctagtccgactggcaatctcgaaccactgcggctgcttcggagtgccaacagcgcccaagcagttgccctcttccttggtgcttaacttaagaaagaacagtgctgggaaggataaagatcacccaggaaggacaggggaagaggagtctgacgtagagaacacgagataagcccctcgctcttcctttttttctctgtcatctttgacttctgggataaccgggggcaaccaggtcaattatggagacacacaatcacttcgaacccagactagtgatcgctggggtataattacaagggaaaacggggtgaggagagcaaaggttttggagacggaaagtgcagacaggcaacaatgcacagaagttaacaagagaacgcgggggtcgggggcgatgtaaggaagtcgtcatcgacgccgcgccgcttcccccacctcgcaccagacctctgaaattgccctcggagactcggcctctcctataaggacgatcgtcctctcagctggagaacaaggccatgcctcagctcctacgccaggcggaagcgggagaggaaggccgacccccaagagcgccccttcagggggtccatccggccttgatctcagatgggggggtgtttgcggagggcggggcatcgcctcaacagctgggggctgcatcatggcaggaacgagtttccctgagccacggagctgcaggtcgcctcctctactaccctgctacccggttacctcttcgcctcttggtcgtcgagcagctccggctcggtcgccgccattaccacatcgcactccgcggcagccgccatcttaccgccgggaccagagagctgggtgggaggccggcggtgaagagcacttccggttggagcatagagcagctccgcggcgccgcgcccagaagggctccctcgggctcgtctaccagagagaggctccgcttggggccagagcggcctcccgcccccggatgtccacggtggtctccgcgccggggcgggagcccaggggctgtgccggttgaaaactaagcatggggaagagctgcaaggtggtcgtgtgtggccaggcgtctgtgggcaaaacttcaatcctggagcagcttctgtatgggaaccatgtagtgggttcggagatgatcgagacgcaggaggacatctacgtgggctccattgagacagaccggggggtgcgagagcaggtgcgtttctatgacacccgggggctccgagatggggccgaactgccccgacactgcttctcttgcactgatggctacgtcctggtctatagcacagatagcagagagtcttttcagcgtgtggagctgctcaagaaggagattgacaaatccaaggacaagaaggaggtcaccatcgtggtccttggcaacaagtgtgacttacaggagcagcggcgtgtagacccagatgtggctcagcactgggccaagtcagagaaggtgaagctgtgggaggtgtcagtggcggaccggcgctccctcctggagccctttgtctacttggccagcaagatgacgcaaccccagagcaagtctgccttccccctcagccggaagaacaagggcagcggctccttggatggctgaagagctgccgttcctctttcacgatcccagccccatttcagtgtctggggctctggtagatgtgttgagggcaaagtagaggacaagctgtctttcccagtcagccagggagctccccgccaggccacgccccagccactttgctccctctcacctctgggaagtgcaaatactcttggttgacatccccttcctcagccctcccagcctactccccatcccagcttttagaggatctgctccactgtctcctggggcagttgtgggtcactgtcccttccagctgccccagacaggaagcagagtcaccacgcagcagtgtcccttcttgggtctgagttcctattataggtaggggccccaccctctgggcttcccatcagcgacacacacacacttatggcaccagcctggactccagaaaaagggtgtccaggtattgtgtgtatgcatttagttgtgcacacacaaatatgctcctatactggcattaggcgtctcctcatccctcaccctgacctttctcctgtccttttcttggctggaagaagttggcctcctgggagtgtagttttctgttttaaatcccccacccctggctgggctcagtggctcacccctgtaatcccagcactttgggaggccaaggcgggtcgattacttgaggtcaggagttcacgaccagcctggccaacattgtgaaaccccatctctgccaaaaatacaaaagttagccgggcgtagtggcacatgcctgtaatcccagctacccggggaggctgaggcaggagaattgcttgaactcagaaggcggaggctgcagtgagccgagatcgtgccactgcactccagcctggtcaacagagcaagactccatctcgaagaaaaaaaaaaaaaattccccacccctaccaattgttttacttcctcttcctgctcagggagcagatgggcctcactggttgagatggaatagaataactgggctatgagtcaccagcccactttgtgacccagcaagacctttcccctctctgggcatcagtttctcatctgtaagatgaccagagttgcttagatgatctcctagatcctttccagttctcttgatttcgtaaagccaatggcttctccctctttaaggtgctatgccaaccagccctggaggctgggatctgccgctccctccagccaccagggggcaggagtgcactacctgctgtcagtcaccagagtggccgctcagtgcccagcccgccagcctcgctcttggaggctgctctttatcctgcctgtggttttcagctcagagctggacttctatttataagttacctgtatttatatttatatgcccgctctcatggtgaaggctggacaaggtgctcctctggcccctccttcttacctcagatgcctgaacagaacaaggcaaacccgtagcagcctctcaggagctgacaggtcctctttcggggctcaggagggtgggcacacacccagcggcctgcagagtaagcttattacccacaactgtgcccgctttgtgcttctaaggtgcacacctagcctaggtgagacactgcagccaggcaaccaccgacacacgccccttctcaaagccagaggtgagtggggcaggtgcccggggctgggtgagtggaattaggacacacacaggcttgggcttcaagttcatttattgatgcattggttggacacaataaaaccacaattgttatcaaaaagtt

SEQ ID NO: 25947 - protein, 191 aa, Homo sapiens; identical to SEQ ID NO: 3451

SEQ ID NO: 25948 - DNA, 2495 bp, Homo sapiens
gacggaagctggggagcgggcaggcggcgggggcggggcctggaggagcctacaccgactctggaggaagactggagcctttgcggcggcgctgcccctcccctggtccccgcgagctcggagggcccggctggtgctgcgggggccccgggaggttgaaaactaagcatggggaagagctgcaaggtggtcgtgtgtggccaggcgtctgtgggcaaaacttcaatcctggagcagcttctgtatgggaaccatgtagtgggttcggagatgatcgagacgcaggaggacatctacgtgggctccattgagacagaccggggggtgcgagagcaggtgcgtttctatgacacccgggggctccgagatggggccgaactgccccgacactgcttctcttgcactgatggctacgtcctggtctatagcacagatagcagagagtcttttcagcgtgtggagctgctcaagaaggagattgacaaatccaaggacaagaaggaggtcaccatcgtggtccttggcaacaagtgtgacttacaggagcagcggcgtgtagacccagatgtggctcagcactgggccaagtcagagaaggtgaagctgtgggaggtgtcagtggcggaccggcgctccctcctggagccctttgtctacttggccagcaagatgacgcaaccccagagcaagtctgccttccccctcagccggaagaacaagggcagcggctccttggatggctgaagagctgccgttcctctttcacgatcccagccccatttcagtgtctggggctctggtagatgtgttgagggcaaagtagaggacaagctgtctttcccagtcagccagggagctccccgccaggccacgccccagccactttgctccctctcacctctgggaagtgcaaatactcttggttgacatccccttcctcagccctcccagcctactccccatcccagcttttagaggatctgctccactgtctcctggggcagttgtgggtcactgtcccttccagctgccccagacaggaagcagagtcaccacgcagcagtgtcccttcttgggtctgagttcctattataggtaggggccccaccctctgggcttcccatcagcgacacacacacacttatggcaccagcctggactccagaaaaagggtgtccaggtattgtgtgtatgcatttagttgtgcacacacaaatatgctcctatactggcattaggcgtctcctcatccctcaccctgacctttctcctgtccttttcttggctggaagaagttggcctcctgggagtgtagttttctgttttaaatcccccacccctggctgggctcagtggctcacccctgtaatcccagcactttgggaggccaaggcgggtcgattacttgaggtcaggagttcacgaccagcctggccaacattgtgaaaccccatctctgccaaaaatacaaaagttagccgggcgtagtggcacatgcctgtaatcccagctacccggggaggctgaggcaggagaattgcttgaactcagaaggcggaggctgcagtgagccgagatcgtgccactgcactccagcctggtcaacagagcaagactccatctcgaagaaaaaaaaaaaaaattccccacccctaccaattgttttacttcctcttcctgctcagggagcagatgggcctcactggttgagatggaatagaataactgggctatgagtcaccagcccactttgtgacccagcaagacctttcccctctctgggcatcagtttctcatctgtaagatgaccagagttgcttagatgatctcctagatcctttccagttctcttgatttcgtaaagccaatggcttctccctctttaaggtgctatgccaaccagccctggaggctgggatctgccgctccctccagccaccagggggcaggagtgcactacctgctgtcagtcaccagagtggccgctcagtgcccagcccgccagcctcgctcttggaggctgctctttatcctgcctgtggttttcagctcagagctggacttctatttataagttacctgtatttatatttatatgcccgctctcatggtgaaggctggacaaggtgctcctctggcccctccttcttacctcagatgcctgaacagaacaaggcaaacccgtagcagcctctcaggagctgacaggtcctctttcggggctcaggagggtgggcacacacccagcggcctgcagagtaagcttattacccacaactgtgcccgctttgtgcttctaaggtgcacacctagcctaggtgagacactgcagccaggcaaccaccgacacacgccccttctcaaagccagaggtgagtggggcaggtgcccggggctgggtgagtggaattaggacacacacaggcttgggcttcaagttcatttattgatgcattggttggacacaataaaaccacaattgttatcaaaaagtt

SEQ ID NO: 25949 - protein, 191 aa, Homo sapiens; identical to SEQ ID NO: 3451

SEQ ID NO: 25950 - DNA, 2380 bp, Homo sapiens
gcggcgggggcggggcctggaggagcctacaccgactctggaggaagactggagcctttgcggcggcgctgcccctcccctggtccccgcgagctcggagggcccggctggtgctgcgggggccccgggaggttgaaaactaagcatggggaagagctgcaaggtggtcgtgtgtggccaggcgtctgtgggcaaaacttcaatcctggagcagcttctgtatgggaaccatgtagtgggttcggagatgatcgagacgcaggaggacatctacgtgggctccattgagacagaccggggggtgcgagagcagcacagatagcagagagtcttttcagcgtgtggagctgctcaagaaggagattgacaaatccaaggacaagaaggaggtcaccatcgtggtccttggcaacaagtgtgacttacaggagcagcggcgtgtagacccagatgtggctcagcactgggccaagtcagagaaggtgaagctgtgggaggtgtcagtggcggaccggcgctccctcctggagccctttgtctacttggccagcaagatgacgcaaccccagagcaagtctgccttccccctcagccggaagaacaagggcagcggctccttggatggctgaagagctgccgttcctctttcacgatcccagccccatttcagtgtctggggctctggtagatgtgttgagggcaaagtagaggacaagctgtctttcccagtcagccagggagctccccgccaggccacgccccagccactttgctccctctcacctctgggaagtgcaaatactcttggttgacatccccttcctcagccctcccagcctactccccatcccagcttttagaggatctgctccactgtctcctggggcagttgtgggtcactgtcccttccagctgccccagacaggaagcagagtcaccacgcagcagtgtcccttcttgggtctgagttcctattataggtaggggccccaccctctgggcttcccatcagcgacacacacacacttatggcaccagcctggactccagaaaaagggtgtccaggtattgtgtgtatgcatttagttgtgcacacacaaatatgctcctatactggcattaggcgtctcctcatccctcaccctgacctttctcctgtccttttcttggctggaagaagttggcctcctgggagtgtagttttctgttttaaatcccccacccctggctgggctcagtggctcacccctgtaatcccagcactttgggaggccaaggcgggtcgattacttgaggtcaggagttcacgaccagcctggccaacattgtgaaaccccatctctgccaaaaatacaaaagttagccgggcgtagtggcacatgcctgtaatcccagctacccggggaggctgaggcaggagaattgcttgaactcagaaggcggaggctgcagtgagccgagatcgtgccactgcactccagcctggtcaacagagcaagactccatctcgaagaaaaaaaaaaaaaattccccacccctaccaattgttttacttcctcttcctgctcagggagcagatgggcctcactggttgagatggaatagaataactgggctatgagtcaccagcccactttgtgacccagcaagacctttcccctctctgggcatcagtttctcatctgtaagatgaccagagttgcttagatgatctcctagatcctttccagttctcttgatttcgtaaagccaatggcttctccctctttaaggtgctatgccaaccagccctggaggctgggatctgccgctccctccagccaccagggggcaggagtgcactacctgctgtcagtcaccagagtggccgctcagtgcccagcccgccagcctcgctcttggaggctgctctttatcctgcctgtggttttcagctcagagctggacttctatttataagttacctgtatttatatttatatgcccgctctcatggtgaaggctggacaaggtgctcctctggcccctccttcttacctcagatgcctgaacagaacaaggcaaacccgtagcagcctctcaggagctgacaggtcctctttcggggctcaggagggtgggcacacacccagcggcctgcagagtaagcttattacccacaactgtgcccgctttgtgcttctaaggtgcacacctagcctaggtgagacactgcagccaggcaaccaccgacacacgccccttctcaaagccagaggtgagtggggcaggtgcccggggctgggtgagtggaattaggacacacacaggcttgggcttcaagttcatttattgatgcattggttggacacaataaaaccacaattgttatcaaaaagtt

SEQ ID NO: 25951 - protein, 58 aa, Homo sapiens
MGKSCKVVVCGQASVGKTSILEQLLYGNHVVGSEMIETQEDIYVGSIETDRGVREQHR

SEQ ID NO: 25952 - DNA, 2330 bp, Homo sapiens
agcctacaccgactctggaggaagactggagcctttgcggcggcgctgcccctcccctggtccccgcgagctcggagggcccggctggtgctgcgggggccccgggaggttgaaaactaagcatggggaagagctgcaaggtggtcgtgtgtggccaggcgtctgtgggcaaaacttcaatcctggagcagcttctgtatgggaaccatgtagtgggttcggagatgatcgagacgcaggaggacatctacgtgggctccattgagacagaccggggggtgcgagagcaggtgcgtttctatgacacccgggggctccgagatggggccgaactgccccgacactgcttctcttgcactgatggctacgtcctggtctatagcacagatagcagagagtcttttcagcgtgtggagctgctcaagaaggagattgacaaatccaaggacaagaaggaggtcaccatcgtggtccttggcaacaagtgtgacttacaggagcagcggcgtgtagacccagagcaagtctgccttccccctcagccggaagaacaagggcagcggctccttggatggctgaagagctgccgttcctctttcacgatcccagccccatttcagtgtctggggctctggtagatgtgttgagggcaaagtagaggacaagctgtctttcccagtcagccagggagctccccgccaggccacgccccagccactttgctccctctcacctctgggaagtgcaaatactcttggttgacatccccttcctcagccctcccagcctactccccatcccagcttttagaggatctgctccactgtctcctggggcagttgtgggtcactgtcccttccagctgccccagacaggaagcagagtcaccacgcagcagtgtcccttcttgggtctgagttcctattataggtaggggccccaccctctgggcttcccatcagcgacacacacacacttatggcaccagcctggactccagaaaaagggtgtccaggtattgtgtgtatgcatttagttgtgcacacacaaatatgctcctatactggcattaggcgtctcctcatccctcaccctgacctttctcctgtccttttcttggctggaagaagttggcctcctgggagtgtagttttctgttttaaatcccccacccctggctgggctcagtggctcacccctgtaatcccagcactttgggaggccaaggcgggtcgattacttgaggtcaggagttcacgaccagcctggccaacattgtgaaaccccatctctgccaaaaatacaaaagttagccgggcgtagtggcacatgcctgtaatcccagctacccggggaggctgaggcaggagaattgcttgaactcagaaggcggaggctgcagtgagccgagatcgtgccactgcactccagcctggtcaacagagcaagactccatctcgaagaaaaaaaaaaaaaattccccacccctaccaattgttttacttcctcttcctgctcagggagcagatgggcctcactggttgagatggaatagaataactgggctatgagtcaccagcccactttgtgacccagcaagacctttcccctctctgggcatcagtttctcatctgtaagatgaccagagttgcttagatgatctcctagatcctttccagttctcttgatttcgtaaagccaatggcttctccctctttaaggtgctatgccaaccagccctggaggctgggatctgccgctccctccagccaccagggggcaggagtgcactacctgctgtcagtcaccagagtggccgctcagtgcccagcccgccagcctcgctcttggaggctgctctttatcctgcctgtggttttcagctcagagctggacttctatttataagttacctgtatttatatttatatgcccgctctcatggtgaaggctggacaaggtgctcctctggcccctccttcttacctcagatgcctgaacagaacaaggcaaacccgtagcagcctctcaggagctgacaggtcctctttcggggctcaggagggtgggcacacacccagcggcctgcagagtaagcttattacccacaactgtgcccgctttgtgcttctaaggtgcacacctagcctaggtgagacactgcagccaggcaaccaccgacacacgccccttctcaaagccagaggtgagtggggcaggtgcccggggctgggtgagtggaattaggacacacacaggcttgggcttcaagttcatttattgatgcattggttggacacaataaaaccacaattgttatcaaaaagtt

SEQ ID NO: 25953 - protein, 171 aa, Homo sapiens
MGKSCKVVVCGQASVGKTSILEQLLYGNHVVGSEMIETQEDIYVGSIETDRGVREQVRFYDTRGLRDGAELPRHCFSCTDGYVLVYSTDSRESFQRVELLKKEIDKSKDKKEVTIVVLGNKCDLQEQRRVDPEQVCLPPQPEEQGQRLLGWLKSCRSSFTIPAPFQCLGLW

SEQ ID NO: 25954 - DNA, 2559 bp, Homo sapiens
tacaccgactctggaggaagactggagcctttgcggcggcgctgcccctcccctggtccccgcgagctcggagggcccggctggtgctgcgggggccccgggaggttgaaaactaagcatggggaagagctgcaaggtggtcgtgtgtggccaggcgtctgtgggcaaaacttcaatcctggagcagcttctgtatgggaaccatgtagtgggttcggagatgatcgagacgcaggaggacatctacgtgggctccattgagacagaccggggggtgcgagagcaggtgcgtttctatgacacccgggggctccgagatggggccgaactgccccgacactgcttctcttgcactgatggctacgtcctggtctatagcacagatagcagagagtcttttcagcgtgtggagctgctcaagaaggagattgacaaatccaaggacaagaaggagggtctcactctgccacccaggctggagtgcagtggcatgatcacagctcactgcagcctcaacctcccaaggcttaggtggtcctcctgcctcagccccctgctaagactacaggtcaccatcgtggtccttggcaacaagtgtgacttacaggagcagcggcgtgtagacccagatgtggctcagcactgggccaagtcagagaaggtgaagctgtgggaggtgtcagtggcggaccggcgctccctcctggagccctttgtctacttggccagcaagatgacgcaaccccagagcaagtctgccttccccctcagccggaagaacaagggcagcggctccttggatggctgaagagctgccgttcctctttcacgatcccagccccatttcagtgtctggggctctggtagatgtgttgagggcaaagtagaggacaagctgtctttcccagtcagccagggagctccccgccaggccacgccccagccactttgctccctctcacctctgggaagtgcaaatactcttggttgacatccccttcctcagccctcccagcctactccccatcccagcttttagaggatctgctccactgtctcctggggcagttgtgggtcactgtcccttccagctgccccagacaggaagcagagtcaccacgcagcagtgtcccttcttgggtctgagttcctattataggtaggggccccaccctctgggcttcccatcagcgacacacacacacttatggcaccagcctggactccagaaaaagggtgtccaggtattgtgtgtatgcatttagttgtgcacacacaaatatgctcctatactggcattaggcgtctcctcatccctcaccctgacctttctcctgtccttttcttggctggaagaagttggcctcctgggagtgtagttttctgttttaaatcccccacccctggctgggctcagtggctcacccctgtaatcccagcactttgggaggccaaggcgggtcgattacttgaggtcaggagttcacgaccagcctggccaacattgtgaaaccccatctctgccaaaaatacaaaagttagccgggcgtagtggcacatgcctgtaatcccagctacccggggaggctgaggcaggagaattgcttgaactcagaaggcggaggctgcagtgagccgagatcgtgccactgcactccagcctggtcaacagagcaagactccatctcgaagaaaaaaaaaaaaaattccccacccctaccaattgttttacttcctcttcctgctcagggagcagatgggcctcactggttgagatggaatagaataactgggctatgagtcaccagcccactttgtgacccagcaagacctttcccctctctgggcatcagtttctcatctgtaagatgaccagagttgcttagatgatctcctagatcctttccagttctcttgatttcgtaaagccaatggcttctccctctttaaggtgctatgccaaccagccctggaggctgggatctgccgctccctccagccaccagggggcaggagtgcactacctgctgtcagtcaccagagtggccgctcagtgcccagcccgccagcctcgctcttggaggctgctctttatcctgcctgtggttttcagctcagagctggacttctatttataagttacctgtatttatatttatatgcccgctctcatggtgaaggctggacaaggtgctcctctggcccctccttcttacctcagatgcctgaacagaacaaggcaaacccgtagcagcctctcaggagctgacaggtcctctttcggggctcaggagggtgggcacacacccagcggcctgcagagtaagcttattacccacaactgtgcccgctttgtgcttctaaggtgcacacctagcctaggtgagacactgcagccaggcaaccaccgacacacgccccttctcaaagccagaggtgagtggggcaggtgcccggggctgggtgagtggaattaggacacacacaggcttgggcttcaagttcatttattgatgcattggttggacacaataaaaccacaattgttatcaaaaagtt

SEQ ID NO: 25955 - protein, 229 aa, Homo sapiens
MGKSCKVVVCGQASVGKTSILEQLLYGNHVVGSEMIETQEDIYVGSIETDRGVREQVRFYDTRGLRDGAELPRHCFSCTDGYVLVYSTDSRESFQRVELLKKEIDKSKDKKEGLTLPPRLECSGMITAHCSLNLPRLRWSSCLSPLLRLQVTIVVLGNKCDLQEQRRVDPDVAQHWAKSEKVKLWEVSVADRRSLLEPFVYLASKMTQPQSKSAFPLSRKNKGSGSLDG

SEQ ID NO: 25956 - DNA, 2272 bp, Homo sapiens
cgactctggaggaagactggagcctttgcggcggcgctgcccctcccctggtccccgcgagctcggagggcccggctggtgctgcgggggccccgggaggttgaaaactaagcatggggaagagctgcaaggtggtcgtgtgtggccaggcgtctgtgggcaaaacttcaatcctggagcagcttctgtatgggaaccatgtagtgggttcggagatgatcgagacgcaggaggacatctacgtgggctccattgagacagaccggggggtgcgagagcaggtcaccatcgtggtccttggcaacaagtgtgacttacaggagcagcggcgtgtagacccagatgtggctcagcactgggccaagtcagagaaggtgaagctgtgggaggtgtcagtggcggaccggcgctccctcctggagccctttgtctacttggccagcaagatgacgcaaccccagagcaagtctgccttccccctcagccggaagaacaagggcagcggctccttggatggctgaagagctgccgttcctctttcacgatcccagccccatttcagtgtctggggctctggtagatgtgttgagggcaaagtagaggacaagctgtctttcccagtcagccagggagctccccgccaggccacgccccagccactttgctccctctcacctctgggaagtgcaaatactcttggttgacatccccttcctcagccctcccagcctactccccatcccagcttttagaggatctgctccactgtctcctggggcagttgtgggtcactgtcccttccagctgccccagacaggaagcagagtcaccacgcagcagtgtcccttcttgggtctgagttcctattataggtaggggccccaccctctgggcttcccatcagcgacacacacacacttatggcaccagcctggactccagaaaaagggtgtccaggtattgtgtgtatgcatttagttgtgcacacacaaatatgctcctatactggcattaggcgtctcctcatccctcaccctgacctttctcctgtccttttcttggctggaagaagttggcctcctgggagtgtagttttctgttttaaatcccccacccctggctgggctcagtggctcacccctgtaatcccagcactttgggaggccaaggcgggtcgattacttgaggtcaggagttcacgaccagcctggccaacattgtgaaaccccatctctgccaaaaatacaaaagttagccgggcgtagtggcacatgcctgtaatcccagctacccggggaggctgaggcaggagaattgcttgaactcagaaggcggaggctgcagtgagccgagatcgtgccactgcactccagcctggtcaacagagcaagactccatctcgaagaaaaaaaaaaaaaattccccacccctaccaattgttttacttcctcttcctgctcagggagcagatgggcctcactggttgagatggaatagaataactgggctatgagtcaccagcccactttgtgacccagcaagacctttcccctctctgggcatcagtttctcatctgtaagatgaccagagttgcttagatgatctcctagatcctttccagttctcttgatttcgtaaagccaatggcttctccctctttaaggtgctatgccaaccagccctggaggctgggatctgccgctccctccagccaccagggggcaggagtgcactacctgctgtcagtcaccagagtggccgctcagtgcccagcccgccagcctcgctcttggaggctgctctttatcctgcctgtggttttcagctcagagctggacttctatttataagttacctgtatttatatttatatgcccgctctcatggtgaaggctggacaaggtgctcctctggcccctccttcttacctcagatgcctgaacagaacaaggcaaacccgtagcagcctctcaggagctgacaggtcctctttcggggctcaggagggtgggcacacacccagcggcctgcagagtaagcttattacccacaactgtgcccgctttgtgcttctaaggtgcacacctagcctaggtgagacactgcagccaggcaaccaccgacacacgccccttctcaaagccagaggtgagtggggcaggtgcccggggctgggtgagtggaattaggacacacacaggcttgggcttcaagttcatttattgatgcattggttggacacaataaaaccacaattgttatcaaaaagtt

SEQ ID NO: 25957 - protein, 135 aa, Homo sapiens
MGKSCKVVVCGQASVGKTSILEQLLYGNHVVGSEMIETQEDIYVGSIETDRGVREQVTIVVLGNKCDLQEQRRVDPDVAQHWAKSEKVKLWEVSVADRRSLLEPFVYLASKMTQPQSKSAFPLSRKNKGSGSLDG

SEQ ID NO: 25958 - DNA, 2504 bp, Homo sapiens
gactctggaggaagactggagcctttgcggcggcgctgcccctcccctggtccccgcgagctcggagggcccggctggtgctgcgggggccccgggaggtacggacctgggaggcgaggctcgtccggcgctaggatcggcctccgcctccgggccgctttaggttgaaaactaagcatggggaagagctgcaaggtggtcgtgtgtggccaggcgtctgtgggcaaaacttcaatcctggagcagcttctgtatgggaaccatgtagtgggttcggagatgatcgagacgcaggaggacatctacgtgggctccattgagacagaccggggggtgcgagagcaggtgcgtttctatgacacccgggggctccgagatggggccgaactgccccgacactgcttctcttgcactgatggctacgtcctggtctatagcacagatagcagagagtcttttcagcgtgtggagctgctcaagaaggagattgacaaatccaaggacaagaaggaggtcaccatcgtggtccttggcaacaagtgtgacttacaggagcagcggcgtgtagacccagatgtggctcagcactgggccaagtcagagaaggtgaagctgtgggaggtgtcagtggcggaccggcgctccctcctggagccctttgtctacttggccagcaagatgacgcaaccccagagcaagtctgccttccccctcagccggaagaacaagggcagcggctccttggatggctgaagagctgccgttcctctttcacgatcccagccccatttcagtgtctggggctctggtagatgtgttgagggcaaagtagaggacaagctgtctttcccagtcagccagggagctccccgccaggccacgccccagccactttgctccctctcacctctgggaagtgcaaatactcttggttgacatccccttcctcagccctcccagcctactccccatcccagcttttagaggatctgctccactgtctcctggggcagttgtgggtcactgtcccttccagctgccccagacaggaagcagagtcaccacgcagcagtgtcccttcttgggtctgagttcctattataggtaggggccccaccctctgggcttcccatcagcgacacacacacacttatggcaccagcctggactccagaaaaagggtgtccaggtattgtgtgtatgcatttagttgtgcacacacaaatatgctcctatactggcattaggcgtctcctcatccctcaccctgacctttctcctgtccttttcttggctggaagaagttggcctcctgggagtgtagttttctgttttaaatcccccacccctggctgggctcagtggctcacccctgtaatcccagcactttgggaggccaaggcgggtcgattacttgaggtcaggagttcacgaccagcctggccaacattgtgaaaccccatctctgccaaaaatacaaaagttagccgggcgtagtggcacatgcctgtaatcccagctacccggggaggctgaggcaggagaattgcttgaactcagaaggcggaggctgcagtgagccgagatcgtgccactgcactccagcctggtcaacagagcaagactccatctcgaagaaaaaaaaaaaaaattccccacccctaccaattgttttacttcctcttcctgctcagggagcagatgggcctcactggttgagatggaatagaataactgggctatgagtcaccagcccactttgtgacccagcaagacctttcccctctctgggcatcagtttctcatctgtaagatgaccagagttgcttagatgatctcctagatcctttccagttctcttgatttcgtaaagccaatggcttctccctctttaaggtgctatgccaaccagccctggaggctgggatctgccgctccctccagccaccagggggcaggagtgcactacctgctgtcagtcaccagagtggccgctcagtgcccagcccgccagcctcgctcttggaggctgctctttatcctgcctgtggttttcagctcagagctggacttctatttataagttacctgtatttatatttatatgcccgctctcatggtgaaggctggacaaggtgctcctctggcccctccttcttacctcagatgcctgaacagaacaaggcaaacccgtagcagcctctcaggagctgacaggtcctctttcggggctcaggagggtgggcacacacccagcggcctgcagagtaagcttattacccacaactgtgcccgctttgtgcttctaaggtgcacacctagcctaggtgagacactgcagccaggcaaccaccgacacacgccccttctcaaagccagaggtgagtggggcaggtgcccggggctgggtgagtggaattaggacacacacaggcttgggcttcaagttcatttattgatgcattggttggacacaataaaaccacaattgttatcaaaaagtt

SEQ ID NO: 25959 - protein, 191 aa, Homo sapiens; identical to SEQ ID NO: 3451

SEQ ID NO: 25960 - DNA, 4216 bp, Homo sapiens
gaggtttctgttagggaccgtctttgggagtgatctatctctgctctctgggggggatctttgtctggagcttttggggggcttgtgtttggaagtttgccttcggggagatatctgtctgggacctcttagggtttctgtatctgagctttctcttttgtgtctgtcagtccaagggcagcaaaaagtatgtcctttctgaagcctttttttccgtaggtttcttcattcttttctctcttgtcttatgttcattttagccatagacttgactggagtttagagggaattgattgttgtccagatgagtcgtacaggaaagcagattgtctttttttgagacggagtcttgctctgccgcccaggctggagtgcagtggcatattcttggctcactgcaatctccgcctcctggattcaagcgattctcctgcctcagcctctcaagtagctgggattacaggcacccgccaccacgcctgactaattttttgtatgtttagtagagatgaggtttcactatgttggccagtctggtctcgaactcctgactttgtgatctgcccacctcggcctcccgaagtgctgagattacaggcgtgagccaccgtgccctgccccagattatcctttttatttgctcagtccccccagggagcagatggcttcagacagccacacaaaacactgttcctgcttaattctccatggggtcatggttaaagagaggaagctgggctgagctccctttactaattggtcctctacatcttgcgcacagaagggaacctggcccagtggccagtgactctcctctccctttatggcagcatttccaagcacctgccctgtgacagatactggctaggtactggggataacaaagacgaataaaataacagcttaccatccagtagtagacatggagacatccgtttcctctgactagcattgggatggtgctgaaaccctggaactatacattcagtttagaactatacattcagtttagaactctcagttatggacgttctgccttctgtttttttggtttttgtttttgtccaccagaaaacatctgctagtaactgccttctgtgttgatgctttctttcctcaccttacccagcgtgcttctgttcttcaaggttgaaaactaagcatggggaagagctgcaaggtggtcgtgtgtggccaggcgtctgtgggcaaaacttcaatcctggagcagcttctgtatgggaaccatgtagtgggtgagtgttgttggagggggaggaacagtggaagaagttgaaaaataaggaataggacttgatcacaacacacacaggctaaaagctgctcctggtggttttcccccctggaagaataaaacttacattgtaacagatcaactctacaacactgaacaaatacggagggagaaagccctatgtccaagataggaaagagaagctgtcatgtcacacttgtgcttagcatggaattagcataaaattaatgtccattggccgggtgcggtggatcacgcctgtaatccgagcactttgggaggctgaggcgggtggatcacctcaggtcgggagttcgagaccagcctaacgaacttggagaaaccctgtctctactaaaaatacaaaattagccgggtgtggtggcacatgcctgtaatcccagctattcgggaggccgaggcaggagaatcgcttgaactcgggaggtggaggttgcggtgagccgagattgcgccattgcactccagcctgggcaacgagagcaaaactccgtctcaaaaaaagaaagaaattaatgttcgttcccctaaacccaaatcatttcagtcctgccaggctgtcaattctctggcctcctcagccccctacattcctttctccccatttggtcagccttaagatgctctcatcactcacatttcccatctctctctccacttcagacagttttctcattttataccaggttcggagatgatcgagacgcaggaggacatctacgtgggctccattgagacagaccggggggtgcgagagcaggtgcgtttctatgacacccgggggctccgagatggggccgaactgccccgacactgcttctcttgcactgatggctacgtcctggtctatagcacagatagcagagagtcttttcagcgtgtggagctgctcaagaaggagattgacaaatccaaggacaagaaggaggtcaccatcgtggtccttggcaacaagtgtgacttacaggagcagcggcgtgtagacccagatgtggctcagcactgggccaagtcagagaaggtgaagctgtgggaggtgtcagtggcggaccggcgctccctcctggagccctttgtctacttggccagcaagatgacgcaaccccagagcaagtctgccttccccctcagccggaagaacaagggcagcggctccttggatggctgaagagctgccgttcctctttcacgatcccagccccatttcagtgtctggggctctggtagatgtgttgagggcaaagtagaggacaagctgtctttcccagtcagccagggagctccccgccaggccacgccccagccactttgctccctctcacctctgggaagtgcaaatactcttggttgacatccccttcctcagccctcccagcctactccccatcccagcttttagaggatctgctccactgtctcctggggcagttgtgggtcactgtcccttccagctgccccagacaggaagcagagtcaccacgcagcagtgtcccttcttgggtctgagttcctattataggtaggggccccaccctctgggcttcccatcagcgacacacacacacttatggcaccagcctggactccagaaaaagggtgtccaggtattgtgtgtatgcatttagttgtgcacacacaaatatgctcctatactggcattaggcgtctcctcatccctcaccctgacctttctcctgtccttttcttggctggaagaagttggcctcctgggagtgtagttttctgttttaaatcccccacccctggctgggctcagtggctcacccctgtaatcccagcactttgggaggccaaggcgggtcgattacttgaggtcaggagttcacgaccagcctggccaacattgtgaaaccccatctctgccaaaaatacaaaagttagccgggcgtagtggcacatgcctgtaatcccagctacccggggaggctgaggcaggagaattgcttgaactcagaaggcggaggctgcagtgagccgagatcgtgccactgcactccagcctggtcaacagagcaagactccatctcgaagaaaaaaaaaaaaaattccccacccctaccaattgttttacttcctcttcctgctcagggagcagatgggcctcactggttgagatggaatagaataactgggctatgagtcaccagcccactttgtgacccagcaagacctttcccctctctgggcatcagtttctcatctgtaagatgaccagagttgcttagatgatctcctagatcctttccagttctcttgatttcgtaaagccaatggcttctccctctttaaggtgctatgccaaccagccctggaggctgggatctgccgctccctccagccaccagggggcaggagtgcactacctgctgtcagtcaccagagtggccgctcagtgcccagcccgccagcctcgctcttggaggctgctctttatcctgcctgtggttttcagctcagagctggacttctatttataagttacctgtatttatatttatatgcccgctctcatggtgaaggctggacaaggtgctcctctggcccctccttcttacctcagatgcctgaacagaacaaggcaaacccgtagcagcctctcaggagctgacaggtcctctttcggggctcaggagggtgggcacacacccagcggcctgcagagtaagcttattacccacaactgtgcccgctttgtgcttctaaggtgcacacctagcctaggtgagacactgcagccaggcaaccaccgacacacgccccttctcaaagccagaggtgagtggggcaggtgcccggggctgggtgagtggaattaggacacacacaggcttgggcttcaagttcatttattgatgcattggttggacacaataaaaccacaattgttatcaaaaagtt

SEQ ID NO: 25961 - protein, 157 aa, Homo sapiens
MIETQEDIYVGSIETDRGVREQVRFYDTRGLRDGAELPRHCFSCTDGYVLVYSTDSRESFQRVELLKKEIDKSKDKKEVTIVVLGNKCDLQEQRRVDPDVAQHWAKSEKVKLWEVSVADRRSLLEPFVYLASKMTQPQSKSAFPLSRKNKGSGSLDG

SEQ ID NO: 25962 - DNA, 1542 bp, Homo sapiens
ggttcggagatgatcgagacgcaggaggacatctactgtctcctggggcagttgtgggtcactgtcccttccagctgccccagacaggaagcagagtcaccacgcagcagtgtcccttcttgggtctgagttcctattataggtaggggccccaccctctgggcttcccatcagcgacacacacacacttatggcaccagcctggactccagaaaaagggtgtccaggtattgtgtgtatgcatttagttgtgcacacacaaatatgctcctatactggcattaggcgtctcctcatccctcaccctgacctttctcctgtccttttcttggctggaagaagttggcctcctgggagtgtagttttctgttttaaatcccccacccctggctgggctcagtggctcacccctgtaatcccagcactttgggaggccaaggcgggtcgattacttgaggtcaggagttcacgaccagcctggccaacattgtgaaaccccatctctgccaaaaatacaaaagttagccgggcgtagtggcacatgcctgtaatcccagctacccggggaggctgaggcaggagaattgcttgaactcagaaggcggaggctgcagtgagccgagatcgtgccactgcactccagcctggtcaacagagcaagactccatctcgaagaaaaaaaaaaaaaattccccacccctaccaattgttttacttcctcttcctgctcagggagcagatgggcctcactggttgagatggaatagaataactgggctatgagtcaccagcccactttgtgacccagcaagacctttcccctctctgggcatcagtttctcatctgtaagatgaccagagttgcttagatgatctcctagatcctttccagttctcttgatttcgtaaagccaatggcttctccctctttaaggtgctatgccaaccagccctggaggctgggatctgccgctccctccagccaccagggggcaggagtgcactacctgctgtcagtcaccagagtggccgctcagtgcccagcccgccagcctcgctcttggaggctgctctttatcctgcctgtggttttcagctcagagctggacttctatttataagttacctgtatttatatttatatgcccgctctcatggtgaaggctggacaaggtgctcctctggcccctccttcttacctcagatgcctgaacagaacaaggcaaacccgtagcagcctctcaggagctgacaggtcctctttcggggctcaggagggtgggcacacacccagcggcctgcagagtaagcttattacccacaactgtgcccgctttgtgcttctaaggtgcacacctagcctaggtgagacactgcagccaggcaaccaccgacacacgccccttctcaaagccagaggtgagtggggcaggtgcccggggctgggtgagtggaattaggacacacacaggcttgggcttcaagttcatttattgatgcattggttggacacaataaaaccacaattgttatcaaaaagtt

SEQ ID NO: 25963 - protein, 39 aa, Homo sapiens [sequence omitted]

SEQ ID NO: 25964 - DNA, 3184 bp, Homo sapiens
gagctgtccgccctgccacaggacctatcgtccttgccccttattagccctcatggggaggccagagctgatttcccaatagccactccttgtctcctcctgtcctgagacaccttggtttcctacatgccacagggactgtgaacagcttcaggggtcctgcccgatccagaaagagctgggctagttttaagggcagctgccttccaaggactgtccccaccctcctttcgcaggccttccagggttaatcctaggcttgcctgcatttcccaccctgacagaccccaaagatctatgcaaaatctcagccccagccatgtggtgctctcactttcctccacccaagacccacatggccagactctaggaatcttagcttctacaagccatcaaggtgaccatgggagtgtgacagaggaccatggaggagaaagggggacccaaaagtccttcgatcagcagtgctaaggtggggcagagccaaggaggtagtggggctggttctgaaagcttttgggggcttcatctgctctgaaggggtgggactaagagaggaggtgatgttctggttgggcccagggttttgttttaatcttaagtcttctgggcattcatgggcccagtctttttttctgtctgagagtatcattctgttgcccaggttagagtgcagtggtgcaatcttggctcactgcatgcagcctctgcctccctggttcaagtgatacttgctgataagcccagtcttaatattgagggagtaactcatccctcagaagctcttcttcttagcctttctctgacttcctgaaccccaactcttggagggcgggtgtgggtctccctcagactatggactcagctaacaccgaaccccccgcagagctcccaaaggaagagctttcccctacagcttcccactccaaactggtcctagcactaaattcagctttcccttctcccaaccagcccctgccactgtgaagctgagtgttgggaggcagtctcacatgcactggcaagacccattttcatgctgtcaatgtcaatgtcacaaactcctttccactgcagcactgccccctccccaccccacaatatgggaccctgccagtatccccctgtatcttttttttgttttttaaagacatttccaatgggagaaccagaaaaagggggaggggagggaaactttttgataacaattgtggttttattgtgtccaaccaatgcatcaataaatgaacttgaagcccaagcctgtgtgtgtcctaattccactcacccagccccgggcacctgccccactcacctctggctttgagaaggggcgtgtgtcggtggttgcctggctgcagtgtctcacctaggctaggtgtgcaccttagaagcacaaagcgggcacagttgtgggtaataagcttactctgcaggccgctgggtgtgtgcccaccctcctgagccccgaaagaggacctgtcagctcctgagaggctgctacgggtttgccttgttctgttcaggcatctgaggtaagaaggaggggccagaggagcaccttgtccagccttcaccatgagagcgggcatataaatataaatacaggtaacttataaatagaagtccagctctgagctgaaaaccacaggcaggataaagagcagcctccaagagcgaggctggcgggctgggcactgagcggccactctggtgactgacagcaggtagtgcactcctgccccctggtggctggagggagcggcagatcccagcctccagggctggttggcatagcaccttaaagagggagaagccattggctttacgaaatcaagagaactggaaaggatctaggagatcatctaagcaactctggtcatcttacagatgagaaactgatgcccagagaggggaaaggtcttgctgggtcacaaagtgggctggtgactcatagcccagttattctattccatctcaaccagtgaggcccatctgctccctgagcaggaagaggaagtaaaacaattggtaggggtggggaattttttttttttttcttcgagatggagtcttgctctgttgaccaggctggagtgcagtggcacgatctcggctcactgcagcctccgccttctgagttcaagcaattctcctgcctcagcctccccgggtagctgggattacaggcatgtgccactacgcccggctaacttttgtatttttggcagagatggggtttcacaatgttggccaggctggtcgtgaactcctgacctcaagtaatcgacccgccttggcctcccaaagtgctgggattacaggggtgagccactgagcccagccaggggtgggggatttaaaacagaaaactacactcccaggaggccaacttcttccagccaagaaaaggacaggagaaaggtcagggtgagggatgaggagacgcctaatgccagtataggagcatatttgtgtgtgcacaactaaatgcatacacacaatacctggacaccctttttctggagtccaggctggtgccataagtgtgtgtgtgtcgctgatgggaagcccagagggtggggcccctacctataataggaactcagacccaagaagggacactgctgcgtggtgactctgcttcctgtctggggcagctggaagggacagtgacccacaactgccccaggagacagtggagcagatcctctaaaagctgggatggggagtaggctgggagggctgaggaaggggatgtcaaccaagagtatttgcacttcccagaggtgagagggagcaaagtggctggggcgtggcctggcggggagctccctggctgactgggaaagacagcttgtcctctactttgccctcaacacatctaccagagccccagacactgaaatggggctgggatcgtgaaagaggaacggcagctcttcagccatccaaggagccgctgcccttgttcttccggctgagggggaaggcagacttgctctggggttgcgtcatcttgctggccaagtagacaaagggctccaggagggagcgccggtccgccactgacacctcccacagcttcaccttctctgacttggcccagtgctgagccacatctgggtctacacgccgctgctcctgtaagtcacacttgttgccaaggaccacgatggtgacc

SEQ ID NO: 25965 - protein, 57 aa, Homo sapiens
MQNLSPSHVVLSLSSTQDPHGQTLGILASTSHQGDHGSVTEDHGGERGTQKSFDQQC

SEQ ID NO: 25966 - DNA, 697 bp, Homo sapiens
tggtccttggcaacaagtgtgacttacaggagcagcggcgtgtagacccagatgtggctcagcactgggccaagtcagagaaggtgaagctgtgggaggtgtcagtggcggaccggcgctccctcctggagccctttgtctacttggccagcaagatgacgcaaccccagagcaagtctgccttccccctcagccggaagaacaagggcagcggctccttggatggctgaagagctgccgttcctctttcacgatcccagccccatttcagtgtctggggctctggtagatgtgttgagggcaaagtagaggacaagctgtctttcccagtcagccagggagctccccgccaggccacgccccagccactttgctccctctcacctctgggaagtgcaaatactcttgctgacaggtcctctttcggggctcaggagggtgggcacacacccagcggcctgcagagtaagcttattacccacaactgtgcccgctttgtgcttctaaggtgcacacctagcctaggtgagacactgcagccaggcaaccaccgacacacgccccttctcaaagccagaggtgagtggggcaggtgcccggggctgggtgagtggaattaggacacacacaggcttgggcttcaagttcatttattgatgcattggttggacacaataaaaccacaattgttatcaaa

SEQ ID NO: 25967 - protein, 129 aa, Homo sapiens
RAAVPLSRSQPHFSVWGSGRCVEGKVEDKLSFPVSQGAPRQATPQPLCSLSPLGSANTLADRSSFGAQEGGHTPSGLQSKLITHNCARFVLLRCTPSLGETLQPGNHRHTPLLKARGEWGRCPGLGEWN

SEQ ID NO: 25968 - DNA, 1259 bp, Homo sapiens
gagctgtccgccctgccacaggacctatcgtccttgccccttattagccctcatggggaggccagagctgatttcccaatagccactccttgtctcctcctgtcctgagacaccttggtttcctacatgccacagggactgtgaacagcttcaggggtcctgcccgatccagaaagagctgggctagttttaagggcagctgccttccaaggactgtccccaccctcctttcgcaggccttccagggttaatcctaggcttgcctgcatttcccaccctgacagaccccaaagatctatgcaaaatctcagccccagccatgtggtgctctcactttcctccacccaagacccacatggccagactctaggaatcttagcttctacaagccatcaaggtgaccatgggagtgtgacagaggaccatggaggagaaagggggacccaaaagtccttcgatcagcagtgctaaggtggggcagagccaaggaggtagtggggctggttctgaaagcttttgggggcttcatctgctctgaaggggtgggactaagagaggaggtgatgttctggttgggcccagggttttgttttaatcttaagtcttctgggcattcatgggcccagtctttttttctgtctgagagtatcattctgttgcccaggttagagtgcagtggtgcaatcttggctcactgcatgcagcctctgcctccctggttcaagtgatacttgctgataagcccagtcttaatattgagggagtaactcatccctcagaagctcttcttcttagcctttctctgacttcctgaaccccaactcttggagggcgggtgtgggtctccctcagactatggactcagctaacaccgaaccccccgcagagctcccaaaggaagagctttcccctacagcttcccactccaaactggtcctagcactaaattcagctttcccttctcccaaccagcccctgccactgtgaagctgagtgttgggaggcagtctcacatgcactggcaagacccattttcatgctgtcaatgtcaatgtcacaaactcctttccactgcagcactgccccctccccaccccacaatatgggaccctgccagtatccccctgtatcttttttttgttttttaaagacatttccaatgggagaaccagaaaaagggggaggggagggaaactttttgataacaattgtggttttattgtgtccaaccaatgcatcaataaatgaacttgaagccc

SEQ ID NO: 25969 - protein, 57 aa, Homo sapiens; identical to SEQ ID NO: 25965

SEQ ID NO: 25970 - DNA, 2074 bp, Homo sapiens
gccggggcggccggcaggggcccagccctgccttccactgtgctctctgtcagctccaggtcaattcagagacccaactgaagcaggtgggagaagtgaggctgtgactggggttggagccaggggagggggttggggggcagggcagcagagggagggaccctgaagagagcaggcagggcacagcagagcaggctggagaagcgaggccagcaggccagtgggccaattaagggcaaaggccaagactcacctccccttcccagggcctaccccagggtgaggacccagtctgtgtgctttggatgtatgagctgtggatagaggaaggggaagagtcgaggatgatggtcttggggtccttgggctttgtcatcttgttcccagtctgtctgtctgtccattagcacatgagcagcaggaggcacaaagaccgcctggccgggaagacccccaagccctccagccagcacagcaagctgcagaagcacgcagcgctggctgtgagtatcctcaagtctaaactggccttgcagaagcaactcaccaagacgttggcagcccgcttcctgcccagcccgctccccaccgcagccactgccatctgtgctctgccagggcccctggccctccgccctgcccctacagcagccactaccctcttcccggctcccatcctgggcccagctctgtttcgcaccccagcaggagctgtccgccctgccacaggacctatcgtccttgccccttattagccctcatggggaggccagagctgatttcccaatagccactccttgtctcctcctgtcctgagacaccttggtttcctacatgccacagggactgtgaacagcttcaggggtcctgcccgatccagaaagagctgggctagttttaagggcagctgccttccaaggactgtccccaccctcctttcgcaggccttccagggttaatcctaggcttgcctgcatttcccaccctgacagaccccaaagatctatgcaaaatctcagccccagccatgtggtgctctcactttcctccacccaagacccacatggccagactctaggaatcttagcttctacaagccatcctctcctagccaggggacgactctctgacctctattcctaggctttggggcttcactggagatagggatggggtctctagctgcagcaggctcaaggctgtcaggacaaggtgaccatgggagtgtgacagaggaccatggaggagaaagggggacccaaaagtccttcgatcagcagtgctaaggtggggcagagccaaggaggtagtggggctggttctgaaagcttttgggggcttcatctgctctgaaggggtgggactaagagaggaggtgatgttctggttgggcccagggttttgttttaatcttaagtcttctgggcattcatgggcccagtctttttttctgtctgagagtatcattctgttgcccaggttagagtgcagtggtgcaatcttggctcactgcatgcagcctctgcctccctggttcaagtgatacttgctgataagcccagtcttaatattgagggagtaactcatccctcagaagctcttcttcttagcctttctctgacttcctgaaccccaactcttggagggcgggtgtgggtctccctcagactatggactcagctaacaccgaaccccccgcagagctcccaaaggaagagctttcccctacagcttcccactccaaactggtcctagcactaaattcagctttcccttctcccaaccagcccctgccactgtgaagctgagtgttgggaggcagtctcacatgcactggcaagacccattttcatgctgtcaatgtcaatgtcacaaactcctttccactgcagcactgccccctccccaccccacaatatgggaccctgccagtatccccctgtatcttttttttgttttttaaagacatttccaatgggagaaccagaaaaagggggaggggagggaaactttttgataacaattgtggttttattgtgtccaaccaatgcatcaataaatgaacttgaagccc

SEQ ID NO: 25971 - protein, 114 aa, Homo sapiens [sequence omitted]

SEQ ID NO: 25972 - DNA, 996 bp, Homo sapiens
caagggttggatggcggaggctttgtgcttgtgtgttactgaacggacgtttctgggtcctcccattactccttggggaaggagaattgggaagagaagtctgaggcagcaagaactgaaggagccaagcaccggtggatgatggaaggtcagcgaggggctccccggaggagccggggccgcccggtgtccaggggaggtgccggacacaaagccaagagagtcacagggggccggggcggccggcaggggcccagccctgccttccactgtgctctctgtcagctccaggtcaattcagagacccaactgaagcagcacatgagcagcaggaggcacaaagaccgcctggccgggaagacccccaagccctccagccagcacagcaagctgcagaagcacgcagcgctggctgtgagtatcctcaagtctaaactggccttgcagaagcaactcaccaagacgttggcagcccgcttcctgcccagcccgctccccaccgcagccactgccatctgtgctctgccagggcccctggccctccgccctgcccctacagcagccactaccctcttcccggctcccatcctgggcccagctctgtttcgcaccccagcaggagctgtccgccctgccacaggacctatcgtccttgccccttattagccctcatggggaggccagagctgatttcccaatagccactccttgtctcctcctgtcctgagacaccttggtttcctacatgccacagggactgtgaacagcttcaggggtcctgcccgatccagaaagagctgggctagttttaagggcagctgccttccaaggactgtccccaccctcctttcgcaggccttccagggttaatcctaggcttgcctgcatttcccaccctgacagaccccaaagatctatgcaaaatctcagccccagccatgtggtgctctcactttcctccacccaagacccacatggccagactctaggaatctt

SEQ ID NO: 25973 - protein, 175 aa, Homo sapiens
MMEGQRGAPRRSRGRPVSRGGAGHKAKRVTGGRGGRQGPSPAFHCALCQLQVNSETQLKQHMSSRRHKDRLAGKTPKPSSQHSKLQKHAALAVSILKSKLALQKQLTKTLAARFLPSPLPTAATAICALPGPLALRPAPTAATTLFPAPILGPALFRTPAGAVRPATGPIVLAPY

SEQ ID NO: 25974 - DNA, 2784 bp, Homo sapiens
atggtgcccccagggaagaaaccagcgggagaggcctccaactccaacaagaagtgtaagcgttacttcaacgagcactggaaagaggagtttacctggctggactttgactatgagcggaagctgatgttctgcctcgagtgccgccaggccctggtacggaacaagcatggcaaagccgaaaacgccttcactgtgggcacagacaacttccagcgccacgccctgctgcgccacgtgacctcaggagcccaccgccaggctctggctgtcaaccagggccagcccccttttgagggccaggctgaaggtggaggggcctgcccaggcctggctacgacccctgcctccaggggcgtcaaggtggagttagacccggccaaagtggctgtgctgactactgtgtactgcatggcaaaggaggatgtgcccaatgaccgctgctctgccctgctcgagctgcagaggttcaacctgtgccaggcactgctgggcacagagcatggcgattactacagtcccaggagggtgagggacatgcaggtggccattgccagtgtcttgcacacagaggcctgccagcgcctgaaggcatccccatatgtggggctggtgttggacgagaccagagactggccggagtcacacagcctggccctgtttgccacttcagtgtccccctgtgatggccagcccgccaccaccttcctgggcagtgtggagctacaggagggcgaggccactgctggccagctcttggacatcctgcaggctttcggcgtatctgcacccaagctggcctggctcagctcaagcctccccagtgagcgcctggggagtgtgggcccacagctccgggccacttgcccactgctggcagagctgcattgtctccctggccggacagatcctgagcccccggcctacttgggtcaatatgagagcatattggatgccctattccgcctccatggtggccctagttcccacttggtccctgagctccgggcagcactggaccttgcagctattgacttggcagggcctcggccagtgccctgggcctccctgctgcctgtagtggaagcagtggccgaggcctggcctggcctggtgcccaccctggaggctgcagcccttgcctcacctgtggcggggtcactggccctggccctgcgccagttcaccttcgtggccttcacccacctgctgctggatgccctgccctctgtgcagaagctctcccttgtcctgcaggcagaagagccggacttggccttgctgcagcctctggtgatggcggctgcggcctccctccaagctcagcgcggctcaggtggggcccgcctccagggcttcctgcaggaactggcatccatggaccctgacgccagcagcggacgctgcacctaccgcggcgtggagctgctcggttactccgaggctgcggtccggggcttggagtggctccggggatccttcctggactccatgcggaagggcctacaggactcctaccccgggccttcgctggacgccgtggccgccttcgcagcgatcttcgacccccgacgctacccgcaggcgccggaggagctgggcacgcatggcgagggggcgctgcgggtgctgctgcgcggctttgctcctgccgtggtgcgccagcgggcgctgggcgacttcgcgctgtttaagcgcgtagtattcggccttgggcggctcggcccgcgggccctgtgcacccagctggcgtgcgcgcactcggagctgcacgagctcttccccgacttcgccgccctagccgccttggctttggcgctgcccgcgggcgctggcctgctggacaaggtcggccgcagccgggagctgcggtggtgggggcagagtggggccggggaaggccgggggggccacatggtgaagatcgcagtggatgggcccccgctgcacgagtttgacttcgggttggctgtggagttcttagagacaggcccggcctccggcgcccccagccccctgctggcctccctgcccctgcccacccggcctctgcagcccccgctggacttcaagcacttgctcgccttccacttcaatggcgctgccccgctcagtctcttccccaacttcagcacgatggacccggtccagaaagctgtcatcagccacacgtttggtgtcccctcccctctgaagaagaagctgttcatttcctgtaacatctgtcacctgaggttcaactcagcgaaccaggccgaggcacattataaaggccacaaacacgccagaaaactcaaggctgtcgaggctgccaagagcaagcagaggccacacacccaggcccaggatggggctgtagtgtccccaatcccaacgctggccagtggagcccctggagagccacagagtaaagagcctgggagagaggcaccggggcctgagccagcggcagctgccgtgggaagcagcatgagtggggaaggcaggagtgagaaggggcacctctactgccccacgtgtaaggtgacagtgaactcggcctcccagcttcaggctcacaacacaggagccaagcaccggtggatgatggaaggtcagcgaggggctccccggaggagccggggccgcccggtgtccaggggaggtgccggacacaaagccaagagagtcacagggggccggggcggccggcaggggcccagccctgccttccactgtgctctctgtcagctccaggtcaattcagagacccaactgaagcaggtgggagaagtgaggctgtga

SEQ ID NO: 25975 - protein, 927 aa, Homo sapiens
MVPPGKKPAGEASNSNKKCKRYFNEHWKEEFTWLDFDYERKLMFCLECRQALVRNKHGKAENAFTVGTDNFQRHALLRHVTSGAHRQALAVNQGQPPFEGQAEGGGACPGLATTPASRGVKVELDPAKVAVLTTVYCMAKEDVPNDRCSALLELQRFNLCQALLGTEHGDYYSPRRVRDMQVAIASVLHTEACQRLKASPYVGLVLDETRDWPESHSLALFATSVSPCDGQPATTFLGSVELQEGEATAGQLLDILQAFGVSAPKLAWLSSSLPSERLGSVGPQLRATCPLLAELHCLPGRTDPEPPAYLGQYESILDALFRLHGGPSSHLVPELRAALDLAAIDLAGPRPVPWASLLPVVEAVAEAWPGLVPTLEAAALASPVAGSLALALRQFTFVAFTHLLLDALPSVQKLSLVLQAEEPDLALLQPLVMAAAASLQAQRGSGGARLQGFLQELASMDPDASSGRCTYRGVELLGYSEAAVRGLEWLRGSFLDSMRKGLQDSYPGPSLDAVAAFAAIFDPRRYPQAPEELGTHGEGALRVLLRGFAPAVVRQRALGDFALFKRVVFGLGRLGPRALCTQLACAHSELHELFPDFAALAALALALPAGAGLLDKVGRSRELRWWGQSGAGEGRGGHMVKIAVDGPPLHEFDFGLAVEFLETGPASGAPSPLLASLPLPTRPLQPPLDFKHLLAFHFNGAAPLSLFPNFSTMDPVQKAVISHTFGVPSPLKKKLFISCNICHLRFNSANQAEAHYKGHKHARKLKAVEAAKSKQRPHTQAQDGAVVSPIPTLASGAPGEPQSKEPGREAPGPEPAAAAVGSSMSGEGRSEKGHLYCPTCKVTVNSASQLQAHNTGAKHRWMMEGQRGAPRRSRGRPVSRGGAGHKAKRVTGGRGGRQGPSPAFHCALCQLQVNSETQLKQVGEVRL

SEQ ID NO: 25976 - DNA, 2085 bp, Homo sapiens
gtctgctcaggttgccataacaaagtaccacagactcagtggcttcgacagtggagatgtaatttctcacagttctggaggctagaagtccaagatcaaggtgtcaggagggttcatttcttcaaaggcctctcttcttggcttgaagatggtcttccctctataactatctgtgtctaaatttcctcttcttataaagacaccagtcatatgagacccagcgcggtggctcacacctgaaatcccagcgctttgggaggctgagatatgaagcggccactgagcccacccccaccggctgagaaggagacccccatatctggagctgctgagtgcctccctcggcccccagaaccacctaagcccaagcgagaaagaaagcggccatcgtacacgctctgtgatgtctgcaacatccagctgaactcggcggcccaggcccaggtgcactgtggggggcgggcccaccagaggcggcttcggcagctcagcttggggaagagcccctcagggccaggtcagtgtagaggggacgctgctcccacaaatttggtttggggagtatctctgtctgggcccctctgaggggctctgggtctgtggcctccctccatgggggtctttgcgtctggggtgccctcaatggggtcttagggtctgaagcctccccgatgccagcaagttttattctgcatctggacaacccttctgtaggacctctcggaatctgtgggtccttaggccgcctcttgggtctttgtttctagggaactctccctgtgggatcttttgggatcaggactcctaagcagcacttctccagcctggagcctcctggtagccacaggctttcagacaagggcctcatctgcggggtgggggtcccaggctccagctcaggtctgtggtctctgaaggccaaggtcagcaaggtacacagcactccaacccagggacaagggggaggcccctcttcctttggactcctggccaggatttctgcttctccctagctggggtgactttgcagaggtttggctatgagcttggaaggggcagctggctgcaaggcagatttctgggggaaatgggtgaatgcctccatgagggtgattctagctgacaggtgcacaggggccatagggaaagtaagaaccacccaggctgctgttggcagagcaaacagattcacattcaggctcagtgtggggaggtgggaaaggcaggaacttacccctggctcctgggggaggccaacagaaacctaccttgcagcccaggctggcagttttgccggaggctacactctgacctcagacaccctcttgagggctgtcttctcttttggtgatattcatggggcacccactgtgtcccccgctccacacacacaatcctgtaggccagagacaagtaagatccaatctctctgcttaccaccctccccaagattgagtgggtcttttgggtggagacacatgtgaaaagggataagggttgtggttgccacatgggacataccctcagggcacaaaggcaaagctgcagtccctgggggcagcaggaaagtctcctgaaggaagagggggctgagcctcggaacatggatgaggggagtaggggcattacaggcagaggtcacggcataagcaaaggccagggtgctctggtgactgggaccagctcctccccacccaattatttcaggctggacaccaaaagcatgactctgagcaagagagtatctgactgatgggtgtttctggagcatatgtgtctgtctggattcgaaagtcactcattggctgggcatggtggctcatgcctgtaatcctagcactttgggaggctgaggcaggtgggtcacttaaggccaggagtttgagaccagcctggccaacatggcaaaaccccatttctactaaaaatgcaaaaattagccaggtatggtggcacacacctgtagtcccagctactcgggaggctgaggcagacgaatcacttgaacccaggaggtggaggttgcagtgagccgagattgtgccactgcactccagcctgggtgacagagtgagaccctgtctc

SEQ ID NO: 25977 - protein, 147 aa, Homo sapiens [sequence omitted]

SEQ ID NO: 25978 - DNA, 2257 bp, Homo sapiens
tttctcttggttctttttcctggggcggggatgggagattcctaagtcggctcagctggctccttccctcagtttcagtttccatcttgggtctctgagctgagcagagtggcaccaggctgagttaagtgggactgccctgggcagacctacctactagagcagaatggagcttcggtcctaccaatgggaggtgatcatgcctgccctggagggcaagaatatcatcatctggctgcccacgggtgccgggaagacccgggcggctgcttatgtggccaagcggcacctagagactgtggatggagccaaggtggttgtattggtcaacagggtgcacctggtgacccagcatggtgaagagttcaggcgcatgctggatggacgctggaccgtgacaaccctgagtggggacatgggaccacgtgctggctttggccacctggcccgtgccaccacacgcacaaggacaccgtctacaacgtcatcatgagccagtacctagaacttaaactccagagggcacagccgctaccccaggtgctgggtctcacagcctccccaggcactggcggggcctccaaactcgatggggccatcaaccacgtcctgcagctctgtgccaacttggacacgtggtgcatcatgtcaccccagaactgctgcccccagctgcaggagcacagccaacagccttgcaaacagtacaacctctgccacaggcgcagccaggatccgtttggggacttgctgaagaagctcatggaccaaatccatgaccacctggagatgcctgagttgagccggaaatttgggacgcaaatgtatgagcagcaggtggtgaagctgagtgaggctgcggctttggctgggcttcaggagcaacgggtgtatgcgcttcacctgaggcgctacaatgacgcgctgctcatccatgacaccgtccgcgccgtggatgccttggctgcgctgcaggatttctatcacagggagcacgtcactaaaacccagatcctgtgtgccgagcgccggctgctggccctgttcgatgaccgcaagaatgagctggcccacttggcaactcatggcccagagaatccaaaactggagatgctggaaaagatcctgcaaaggcagttcagtagctctaacagccctcggggtatcatcttcacccgcacccgccaaagcgcacactccctcctgctctggctccagcagcagcagggcctgcagactgtggacatccgggcccagctactgattggggctgggaacagcagccagagcacccacatgacccagagggaccagcaagaagtgatccagaagttccaagatggaaccctgaaccttctggtggccacgagtgtggcggaggaggggctggacatcccacattgcaatgtggtggtgcgttatgggctcttgaccaatgaaatctccatggtccaggccaggggccgtgcccgggccgatcagagtgtatacgcgtttgtagcaactgaaggtagccgggagctgaagcgggagctgatcaacgaggcgctggagacgctgatggagcaggcagtggctgctgtgcagaaaatggaccaggccgagtaccaggccaaggaactactataatgtctccagggatcctgtggtcatcaacaaagtcttcaaggactggaagcctgggggtgtcatcagctgcaggaactgtggggaggtctggggtctgcagatgatctacaagtcagtgaagctgccagtgctcaaagtccgcagcatgctgctggagacccctcaggggcggatccaggccaaaaagtggtcccgcgtgcccttctccgtgcctgactttgacttcctgcagcattgtgccgagaacttgtcggacctctccctggactgaccacctcattgctgcagtgcccggtttgggctgtagggggcgggagagtctgcagcagactccaggcccctccttcctgaatcatcagctgtgggcatcaggcccaccagccacacaggagtcctgggcaccctggcttaggctcccgcaatgggaaaacaaccggagggccagagcttagtccagacctaccttgtacgcacatagacattttcatatgcactggatggagttagggaaactgaggcaaaagaatttgccatactgtactcagaatcacgacattccttccctaccaaggccacttctattttttgaggctcctcataaaaataaatgaaaaaatgggatagaaaa

SEQ ID NO: 25979 - protein, 379 aa, Homo sapiens
MSQYLELKLQRAQPLPQVLGLTASPGTGGASKLDGAINHVLQLCANLDTWCIMSPQNCCPQLQEHSQQPCKQYNLCHRRSQDPFGDLLKKLMDQIHDHLEMPELSRKFGTQMYEQQVVKLSEAAALAGLQEQRVYALHLRRYNDALLIHDTVRAVDALAALQDFYHREHVTKTQILCAERRLLALFDDRKNELAHLATHGPENPKLEMLEKILQRQFSSSNSPRGIIFTRTRQSAHSLLLWLQQQQGLQTVDIRAQLLIGAGNSSQSTHMTQRDQQEVIQKFQDGTLNLLVATSVAEEGLDIPHCNVVVRYGLLTNEISMVQARGRARADQSVYAFVATEGSRELKRELINEALETLMEQAVAAVQKMDQAEYQAKELL

SEQ ID NO: 25980 - DNA, 2617 bp, Homo sapiens
agtttcagtttccatttctgatttctgctctctgcgctgagcacagcggcaccaggctgagctaagcagggccgccttgggcaggcctacgtggtggtgcaggcgagacccaggctgggcaaggcgcagtttcagtttccatcttgggtctctgagctgagcagagtggcaccaggctgagttaagtgggactgccctgggcagacctacctactagagcagaatggagcttcggtcctaccaatgggaggtgatcatgcctgccctggagggcaagaatatcatcatctggctgcccacgggtgccgggaagacccgggcggctgcttatgtggccaagcggcacctagagactgtggatggagccaaggtggttgtattggtcaacagggtgcacctggtgacccagcatggtgaagagttcaggcgcatgctggatggacgctggaccgtgacaaccctgagtggggacatgggaccacgtgctggctttggccacctggcccggtgccatgacctgctcatctgcacagcagagcttctgcagatggcactgaccagccccgaggaggaggagcacgtggagctcactgtcttctccctgatcgtggtggatgagtgccaccacacgcacaaggacaccgtctacaacgtcatcatgagccagtacctagaacttaaactccagagggcacagccgctaccccaggtgctgggtctcacagcctccccaggcactggcggggcctccaaactcgatggggccatcaaccacgtcctgcagctctgtgccaacttggacacgtggtgcatcatgtcaccccagaactgctgcccccagctgcaggagcacagccaacagccttgcaaacagtacaacctctgccacaggcgcagccaggatccgtttggggacttgctgaagaagctcatggaccaaatccatgaccacctggagatgcctgagttgagccggaaatttgggacgcaaatgtatgagcagcaggtggtgaagctgagtgaggctgcggctttggctgggcttcaggagcaacgggtgtatgcgcttcacctgaggcgctacaatgacgcgctgctcatccatgacaccgtccgcgccgtggatgccttggctgcgctgcaggatttctatcacagggagcacgtcactaaaacccagatcctgtgtgccgagcgccggctgctggccctgttcgatgaccgcaagaatgagctggcccacttggcaactcatggcccagagaatccaaaactggagatgctggaaaagatcctgcaaaggcagttcagtagctctaacagccctcggggtatcatcttcacccgcacccgccaaagcgcacactccctcctgctctggctccagcagcagcagggcctgcagactgtggacatccgggcccagctactgattggggctgggaacagcagccagagcacccacatgacccagagggaccagcaagaagtgatccagaagttccaagatggaaccctgaaccttctggtggccacgagtgtggcggaggaggggctggacatcccacattgcaatgtggtggtgcgttatgggctcttgaccaatgaaatctccatggtccaggccaggggccgtgcccgggccgatcagagtgtatacgcgtttgtagcaactgaaggtagccgggagctgaagcgggagctgatcaacgaggcgctggagacgctgatggagcaggcagtggctgctgtgcagaaaatggaccaggccgagtaccaggccaagatccgggatctgcagcaggcagccttgaccaagcgggcggcccaggcagcccagcgggagaaccagcggcagcagttcccagtggagcacgtgcagctactctgcatcaactgcatggtggctgtgggccatggcagcgacctgcggaaggtggagggcacccaccatgtcaatgtgaaccccaacttctcgaactactataatgtctccagggatcctgtggtcatcaacaaagtcttcaaggactggaagcctgggggtgtcatcagctgcaggaactgtggggaggtctggggtctgcagatgatctacaagtcagtgaagctgccagtgctcaaagtccgcagcatgctgctggagacccctcaggggcggatccaggccaaaaagtggtcccgcgtgcccttctccgtgcctgactttgacttcctgcagcattgtgccgagaacttgtcggacctctccctggactgaccacctcattgctgcagtgcccggtttgggctgtagggggcgggagagtctgcagcagactccaggcccctccttcctgaatcatcagctgtgggcatcaggcccaccagccacacaggagtcctgggcaccctggcttaggctcccgcaatgggaaaacaaccggagggccagagcttagtccagacctaccttgtacgcacatagacattttcatatgcactggatggagttagggaaactgaggcaaaagaatttgccatactgtactcagaatcacgacattccttccctaccaaggccacttctattttttgaggctcctcataaaaataaatgaaaaaatgggatagaaaa

SEQ ID NO: 25981 - protein, 678 aa, Homo sapiens
MELRSYQWEVIMPALEGKNIIIWLPTGAGKTRAAAYVAKRHLETVDGAKVVVLVNRVHLVTQHGEEFRRMLDGRWTVTTLSGDMGPRAGFGHLARCHDLLICTAELLQMALTSPEEEEHVELTVFSLIVVDECHHTHKDTVYNVIMSQYLELKLQRAQPLPQVLGLTASPGTGGASKLDGAINHVLQLCANLDTWCIMSPQNCCPQLQEHSQQPCKQYNLCHRRSQDPFGDLLKKLMDQIHDHLEMPELSRKFGTQMYEQQVVKLSEAAALAGLQEQRVYALHLRRYNDALLIHDTVRAVDALAALQDFYHREHVTKTQILCAERRLLALFDDRKNELAHLATHGPENPKLEMLEKILQRQFSSSNSPRGIIFTRTRQSAHSLLLWLQQQQGLQTVDIRAQLLIGAGNSSQSTHMTQRDQQEVIQKFQDGTLNLLVATSVAEEGLDIPHCNVVVRYGLLTNEISMVQARGRARADQSVYAFVATEGSRELKRELINEALETLMEQAVAAVQKMDQAEYQAKIRDLQQAALTKRAAQAAQRENQRQQFPVEHVQLLCINCMVAVGHGSDLRKVEGTHHVNVNPNFSNYYNVSRDPVVINKVFKDWKPGGVISCRNCGEVWGLQMIYKSVKLPVLKVRSMLLETPQGRIQAKKWSRVPFSVPDFDFLQHCAENLSDLSLD

SEQ ID NO: 25982 - DNA, 1136 bp, Homo sapiens
aaaaaaaaagcgacaccagttgacctgagtggaagggactgtgaataatgagatttagaaaaagacagactagcccgtggaagatttgaaaggtcaggtgtgaaagtgtagcctttatccaggaggttcctcttaggaatcttggatagattttaaggaacagaatgtcagggcagatttatatttttagatccctctagcagttggtggaaggatggcttgggattgggagtaaaaatggaggcagagagacccataaggagactgtgaagaccaggtaaccgatgctgaggcttgaacctgggcacaagggaacgtgcgatggaggccacacaggtagaactcaccaaagattggatttcctggcctgggaagtctgtgcctcttaaccagcaggaaggcccaaggtccaggcagagacttggccggcaggagggcatgagatccggggctgaggagggtcaatgagggctgtggccaccccccttcctctccaggaactactataatgtctccagggatcctgtggtcatcaacaaagtcttcaaggactggaagcctgggggtgtcatcagctgcaggaactgtggggaggtctggggtctgcagatgatctacaagtcagtgaagctgccagtgctcaaagtccgcagcatgctgctggagacccctcaggggcggatccaggccaaaaagtggtcccgcgtgcccttctccgtgcctgactttgacttcctgcagcattgtgccgagaacttgtcggacctctccctggactgaccacctcattgctgcagtgcccggtttgggctgtagggggcgggagagtctgcagcagactccaggcccctccttcctgaatcatcagctgtgggcatcaggcccaccagccacacaggagtcctgggcaccctggcttaggctcccgcaatgggaaaacaaccggagggccagagcttagtccagacctaccttgtacgcacatagacattttcatatgcactggatggagttagggaaactgaggcaaaagaatttgccatactgtactcagaatcacgacattccttccctaccaaggccacttctattttttgaggctcctcataaaaataaatgaaaaaatgggatagaaa

SEQ ID NO: 25983 - protein, 34 aa, Homo sapiens
MSPGILWSSTKSSRTGSLGVSSAAGTVGRSGVCR

SEQ ID NO: 25984 - DNA, 1132 bp, Homo sapiens
gcaggagagacaggctggaagccattggggaaggagaaggggtgagtgtcaaaggagccgggttgggggtggggcagagggacttggagcctcagacttggtgtctctcgccccaggaaggagctgaaggaccccgaccagctctacacaaccctcaaaaacctgctggcccaaatcaaggtggggagaccaggtttcctttccagggcccctgcaccaatggctgtggcctcttgatgcagtgtggggtgggtagtggtctcgggctggcgtgggcgcagcagggctgtccccagcccggctcttctctccagtctcaccccagtgcctggcccttcatggagcctgtgaagaagtcggaggcccctgactactacgaggtcatccgcttccccattgacctgaagaccatgactgagcggctgcgaagccgctactacgtgacccggaagctctttgtggccgacctgcagcgggtcatcgccaactgtcgcgagtacaaccccccggacagcgagtactgccgctgtgccagcgccctggagaagttcttctacttcaagctcaaggagggaggcctcattgacaagtaggcccatctttgggccgcagccctgacctggaatgtctccacctcggattctgatctgatccttagggggtgccctggccccacggacccgactcagcttgagacactccagccaagggtcctccggacccgatcctgcagctctttctggaccttcaggcacccccaagcgtgcagctctgtcccagccttcactgtgtgtgagaggtctcctgggttggggcccagcccctctagagtagctggtggccagggatgaaccttgcccagccgtggtggcccccaggcctggtccccaagagctttggaggcttggattcctgggcctggcccaggtggctgtttccctgaggaccagaactgctcattttagcttgagtgatggcttcaggggttggaagttcagcccaaactgaagggggccatgccttgtccagcactgttctgtcagtctcccccaggggtggggggtatggggaccattcattccctggcattaatcccttagagggaataataaagctttttatttctctgtgt

SEQ ID NO: 25985 - protein, 118 aa, Homo sapiens [sequence omitted]

SEQ ID NO: 25986 - DNA, 3104 bp, Homo sapiens
tgcggccctagggctgggagcgcggcgccgctctccgctgcgggggaggccatggcggaaccttcccaggccccgaccccggccccggctgcgcagccccggccccttcagtccccagcccctgccccaactccgactcctgcacccagcccggcttcagccccgattccgactcccaccccggcaccagcccctgccccagctgcagccccagccggcagcacagggactggggggcccggggtaggaagtgggggggccgggagcgggggggatccggctcgacctggcctgagccagcagcagcgcgccagtcagaggaaggcgcaagtccgggggctgccgcgcgccaagaagcttgagaagctaggggtcttctcggcttgcaaggccaatgaaacctgtaagtgtaatggctggaaaaaccccaagccccccactgcaccccgcatggatctgcagcagccagctgccaacctgagtgagctgtgccgcagttgtgagcaccccttggctgaccacgtatcccacttggagaatgtgtcagaggatgagataaaccgactgctggggatggtggtggatgtggagaatctcttcatgtctgttcacaaggaagaggacacagacaccaagcaggtctatttctacctcttcaagctactgcggaaatgcatcctgcagatgacccggcctgtggtggaggggtccctgggcagccctccatttgagaaacctaatattgagcagggtgtgctgaactttgtgcagtacaagtttagtcacctggctccccgggagcggcagacgatgttcgagctctcaaagatgttcttgctctgccttaactactggaagcttgagacacctgcccagtttcggcagaggtctcaggctgaggacgtggctacctacaaggtcaattacaccagatggctctgttactgccacgtgccccagagctgtgatagcctcccccgctacgaaaccactcatgtctttgggcgaagccttctccggtccattttcaccgttacccgccggcagctgctggaaaagttccgagtggagaaggacaaattggtgcccgagaagaggaccctcatcctcactcacttccccaaattcctgtccatgctggaggaggagatctatggggcaaactctccaatctgggagtcaggcttcaccatgccaccctcagaggggacacagctggttccccggccagcttcagtcagtgcagcggttgttcccagcacccccatcttcagccccagcatgggtgggggcagcaacagctccctgagtctggattctgcaggggccgagcctatgccaggcgagaagaggacgctcccagagaacctgaccctggaggatgccaagcggctccgtgtgatgggtgacatccccatggagctggtcaatgaggtcatgctgaccatcactgaccctgctgccatgctggggcctgagacgagcctgctttcggccaatgcggcccgggatgagacagcccgcctggaggagcgccgcggcatcatcgagttccatgtcatcggcaactcactgacgcccaaggccaaccggcgggtgttgctgtggctcgtggggctgcagaatgtcttttcccaccagctgccgcgcatgcctaaggagtatatcgcccgcctcgtctttgacccgaagcacaagactctggccttgatcaaggatgggcgggtcatcggtggcatctgcttccgcatgtttcccacccagggcttcacggagattgtcttctgtgctgtcacctcgaatgagcaggtcaagggttatgggacccacctgatgaaccacctgaaggagtatcacatcaagcacaacattctctacttcctcacctacgccgacgagtacgccatcggctacttcaaaaagcagggtttctccaaggacatcaaggtgcccaagagccgctacctgggctacatcaaggactacgagggagcgacgctgatggagtgtgagctgaatccccgcatcccctacacggagctgtcccacatcatcaagaagcagaaagagatcatcaagaagctgattgagcgcaaacaggcccagatccgcaaggtctacccggggctcagctgcttcaaggagggcgtgaggcagatccctgtggagagcgttcctggcattcgagagacaggctggaagccattggggaaggagaaggggaaggagctgaaggaccccgaccagctctacacaaccctcaaaaacctgctggcccaaatcaagtctcaccccagtgcctggcccttcatggagcctgtgaagaagtcggaggcccctgactactacgaggtcatccgcttccccattgacctgaagaccatgactgagcggctgcgaagccgctactacgtgacccggaagctctttgtggccgacctgcagcgggtcatcgccaactgtcgcgagtacaaccccccggacagcgagtactgccgctgtgccagcgccctggagaagttcttctacttcaagctcaaggagggaggcctcattgacaagtaggcccatctttgggccgcagccctgacctggaatgtctccacctcggattctgatctgatccttagggggtgccctggccccacggacccgactcagcttgagacactccagccaagggtcctccggacccgatcctgcagctctttctggaccttcaggcacccccaagcgtgcagctctgtcccagccttcactgtgtgtgagaggtctcctgggttggggcccagcccctctagagtagctggtggccagggatgaaccttgcccagccgtggtggcccccaggcctggtccccaagagctttggaggcttggattcctgggcctggcccaggtggctgtttccctgaggaccagaactgctcattttagcttgagtgatggcttcaggggttggaagttcagcccaaactgaagggggccatgccttgtccagcactgttctgtcagtctcccccaggggtggggggtatggggaccattcattccctggcattaatcccttagagggaataataaagctttttatttctctgtgt

SEQ ID NO: 25987 - protein, 837 aa, Homo sapiens
MAEPSQAPTPAPAAQPRPLQSPAPAPTPTPAPSPASAPIPTPTPAPAPAPAAAPAGSTGTGGPGVGSGGAGSGGDPARPGLSQQQRASQRKAQVRGLPRAKKLEKLGVFSACKANETCKCNGWKNPKPPTAPRMDLQQPAANLSELCRSCEHPLADHVSHLENVSEDEINRLLGMVVDVENLFMSVHKEEDTDTKQVYFYLFKLLRKCILQMTRPVVEGSLGSPPFEKPNIEQGVLNFVQYKFSHLAPRERQTMFELSKMFLLCLNYWKLETPAQFRQRSQAEDVATYKVNYTRWLCYCHVPQSCDSLPRYETTHVFGRSLLRSIFTVTRRQLLEKFRVEKDKLVPEKRTLILTHFPKFLSMLEEEIYGANSPIWESGFTMPPSEGTQLVPRPASVSAAVVPSTPIFSPSMGGGSNSSLSLDSAGAEPMPGEKRTLPENLTLEDAKRLRVMGDIPMELVNEVMLTITDPAAMLGPETSLLSANAARDETARLEERRGIIEFHVIGNSLTPKANRRVLLWLVGLQNVFSHQLPRMPKEYIARLVFDPKHKTLALIKDGRVIGGICFRMFPTQGFTEIVFCAVTSNEQVKGYGTHLMNHLKEYHIKHNILYFLTYADEYAIGYFKKQGFSKDIKVPKSRYLGYIKDYEGATLMECELNPRIPYTELSHIIKKQKEIIKKLIERKQAQIRKVYPGLSCFKEGVRQIPVESVPGIRETGWKPLGKEKGKELKDPDQLYTTLKNLLAQIKSHPSAWPFMEPVKKSEAPDYYEVIRFPIDLKTMTERLRSRYYVTRKLFVADLQRVIANCREYNPPDSEYCRCASALEKFFYFKLKEGGLIDK

SEQ ID NO: 25988 - DNA, 502 bp, Homo sapiens
cccggaagctctttgtggccgacctgcagcgggtcatcgccaactgtcgcgagtacaaccccccggacagcgagtactgccgctgtgccagcgccctggagaagttcttctacttcaagctcaaggagggaggcctcattgacaagtaggcccatctttgggccgcagccctgacctgggttggggcccagcccctctagagtagctggtggccagggatgaaccttgcccagccgtggtggcccccaggcctggtccccaagagctttggaggcttggattcctgggcctggcccaggtggctgtttccctgaggaccagaactgctcattttagcttgagtgatggcttcaggggttggaagttcagcccaaactgaagggggccatgccttgtccagcactgttctgtcagtctcccccaggggtggggggtatggggaccattcattccctggcattaatcccttagagggaataataaagctttttatttctctgtg

SEQ ID NO: 25989 - protein, 51 aa, Homo sapiens
MASGVGSSAQTEGGHALSSTVLSVSPRGGGYGDHSFPGINPLEGIIKLFIS

SEQ ID NO: 25990 - DNA, 475 bp, Homo sapiens
agggaggcctcattgacaagtaggcccatctttgggccgcagccctgacctggaatgtctccacctcggattctgatctgatccttagggggtgccctggccccacggacccgactcagcttgagacactccagccaagggtcctccggacccgatcctgcagctctttctggaccttcaggcacccccaagcgtgcagctctgtcccagccttcactgtgtgtgagaggtctcctggagctttggaggcttggattcctgggcctggcccaggtggctgtttccctgaggaccagaactgctcattttagcttgagtgatggcttcaggggttggaagttcagcccaaactgaagggggccatgccttgtccagcactgttctgtcagtctcccccaggggtggggggtatggggaccattcattccctggcattaatcccttagagggaataataaagctttttatttctctg

SEQ ID NO: 25991 - protein, 51 aa, Homo sapiens; identical to SEQ ID NO: 25989

SEQ ID NO: 25992 - DNA, 587 bp, Homo sapiens
ctgccccagacctgaagaccatgactgagcggctgcgaagccgctactacgtgacccggaagctctttgtggccgacctgcagcgggtcatcgccaactgtcgcgagtacaaccccccggacagcgagtactgccgctgtgccagcgccctggagaagttcttctacttcaagctcaaggagggaggcctcattgacaagtaggcccatctttgggccgcagccctgacctggaatgtctccacctcggattctgatctgatccttagggggtgccctggccccacggacccgactcagcttgagacactccagccaagggtcctccggacccgatcctgcagctctttctggaccttcaggcacccccaagcgtgcagctctgtcccagccttcactgtgtgtgagaggtctcctgggttggggcccagcccctctagagtagctggtggccagggatgaaccttgcccagccgtgccttgtccagcactgttctgtcagtctcccccaggggtggggggtatggggaccattcattccctggcattaatcccttagagggaataataaagctttttatttctctg

SEQ ID NO: 25993 - protein, 30 aa, Homo sapiens
MNLAQPCLVQHCSVSLPQGWGVWGPFIPWH

SEQ ID NO: 25994 - DNA, 1922 bp, Homo sapiens
ctcactgcctccagcttccagacttttctgtcctgtctcttggcccctgacagccaagtgaggcctgagtgaaggccccacattgacccctcttcacttgtaatctcttttaatggagtccgggagagtcacgatggctgtcctcttggggacaaggagtcttggggagaatcgtggggtctgcctctttcacgcgcctgtctcccacttaaccccctcccccaactcccgcacaggccctgccccacgcggctccggacacggaattgcagctgcggtagagatgagatgtagcaacagttctgcagtagtgtggtggtgacttgggtgtgttctcctcctgacattcacctgcacctttttctgcgcttttcagtatgtatgtatttaatagtatcactcaacaaaaaggagtttatcaggccgggtggctggctcacgcgggaggagagcttgagccctgcaggagttcgagaccaggctgggcaacattgggagaccccccccaccaatctctacaaaaaaataaaaaataaagtttataggctgggcgaggtggctcacgcctgtaatctcagcactttgggaggccgagatgggaggatcgcttgagcccaggagttcgagattaacctgggcaacataatgataccctgtctcttaaaaaaaaaaaattatcaaataacagcaccagaggcatagctgtggttatgatggtcaccaagaaggctactgacgtggagggtgaggcggaggagggctaggtctttctctgtgcactgggagccactctcctgaagccccaactgcgtcttcatctttgtggccccagagcccagaccacagcctgcagcacaggacgccccgggaagaattaatgcagccggagagaccagtccacctcctcgtgtcgcgtgtccgcgtggggttgtgggtggtcagggagaggtagggtggatgacccaggaaggccgccctcccctggctctgtctaggaacaatccttgccccaggcctggtccttagaaggcaagacagcccccttccagctgggggatcaatctgctgttggctgcgccagggtgcggctccctcgggtctggcctggtcgtggatccagttccttcacagctgcggcctccccgggtccattaacgaaggtggggaagggcggagaaagggtcggagtctgggaggagagcagctgcgggcgcgccagggcgctgacagtctggctcttggaggtaagatgggcgtggctgatcccgaactccgcctgcgtttgcagaagcgaagggaaccgagcgagcggagctgagctcgggtaggccgcgcgaggtccctcctctccgggcgtccgtgcgcctagctctgcgctgggagcctcgcgccctttgacagcagttagttgctgactcggatgcagagagtcggtaacaccttctccaacgagagccgggtggcatcccggtgtcccagcgtgggccttgctgaacggaaccgggtggccacaatgccggtgcggctgctcagggacagtccagcggctcaggaggacaatgaccatgccagagacggtttccaaatgaagctggatgcccacggcttcgccccggaggaactggtggtgcaggtggatggccaatggctgatggtgaccggacagcagcaactggacgtcagggacccggaaagggtcagttaccgcatgtcacagaaggtgcaccggaaaatgctcccgtccaacctgagtcctaccgccatgacctgctgcctgaccccctccgggcagctgtgggtcagaggccagtgtgtggcgctggccctccctgaagcccaaacaggaccgtccccgagactcgggagcctcggctctaaggcttccaacctgacccggtaaacaaacgacgcgatgtgcagca

SEQ ID NO: 25995 - protein, 159 aa, Homo sapiens; identical to SEQ ID NO: 3461

SEQ ID NO: 25996 - DNA, 660 bp, Homo sapiens
agctaagaagcttcccaagaacgagccccagaatgcaactggtgctccaggccgaaaccgaggtgtggacctccaggagaacaacccagccagccggagccagtgctgcagcaactgagccccccttgcctgcccgctgcccccgcctcctccgcctgaatgacccgactggaatccactctaaccaatcgcacttaacgactcgggccaccactgggggggcagggggaggggtccaccatgatttctccatataattttgatcataggccggagtgagtcattccacctgcacctttctgtacaaatactaattcaattttaagtcttaagtcacttttttaatatatatgatcttctgctcttcccacttcctccccgctcccacctccctgctgggaaaccacagcattatcacagcattattgtgacagccacgaacccattgcccacaacccctccaccctcggtcaccccaacctctggctctgagccctgttctgaccaaatcatgatgatgagtatttgggggtgggtgggtaagggggggagtgggaggggacggaaccaactttttctgtattttgtattgtatgttttcttcaacatgtaaccaatcagtatcttgtcaatatagtcagccgatcgatcgacctcaca

SEQ ID NO: 25997 - protein, 74 aa, Homo sapiens
MQLVLQAETEVWTSRRTTQPAGASAAATEPPLPARCPRLLRLNDPTGIHSNQSHLTTRATTGGAGGGVHHDFSI

SEQ ID NO: 25998 - DNA, 1597 bp, Homo sapiens
gaaaggcggaagtggaggccggagcctgggacaccgccggcggggagagaagcggatcccgtccgagccccggccccaagtaacgccgccgccccggagccgccttggaggtccccctccccactaagtgcctctttgcatagcaccagtccccacccgcacgctctctggaccactacagctggacgggcaatggcgggtcggggaggcgcagcacgacccaatggaccagctgctgggaacaagatctgtcaatttaagctggttctgctgggggagtctgcggtaggcaaatccagcctcgtcctccgctttgtcaagggacagtttcacgagtaccaggagagcacaattggagcggccttcctcacacagactgtctgcctggatgacacaacagtcaagtttgagatctgggacacagctggacaggagcggtatcacagcctggcccccatgatacatttgcacgggccaagaactgggtgaaggagctacagaggcaggccagccccaacatcgtcattgcactcgcgggtaacaaggcagacctggccagcaagagagccgtggaattccaggaagcacaagcctatgcagacgacaacagtttgctgttcatggagacatcagcaaagactgcaatgaacgtgaacgaaatcttcatggcaatagctaagaagcttcccaagaacgagccccagaatgcaactggtgctccaggccgaaaccgaggtgtggacctccaggagaacaacccagccagccggagccagtgctgcagcaactgagccccccttgcctgcccgctgcccccgcctcctccgcctgaatgacccgactggaatccactctaaccaatcgcacttaacgactcgggccaccactgggggggcagggggaggggtccaccatgatttctccatataattttgatcataggccggagtgagtcattccacctgcacctttctgtacaaatactaattcaattttaagtcttaagtcacttttttaatatatatgatcttctgctcttcccacttcctcccctttctactgctctcccattttcccttgctgggagtagccacatgctcttgccccccaacccttgtatatggggacagtggggtcagtgcagctaccctttctttccctcctgcggaacagcggacccagcaagagcatccacatcctcactttgttcggagtggtctttggtttgggcggtggggcagaccttgggaaggggcttaggaagggagaggcagctcttccttcagctggctctcatcaggctgcagccccctccccgctcccacctccctgctgggaaaccacagcattatcacagcattattgtgacagccacgaacccattgcccacaacccctccaccctcggtcaccccaacctctggctctgagccctgttctgaccaaatcatgatgatgagtatttgggggtgggtgggtaagggggggagtgggaggggacggaaccaactttttctgtattttgtattgtatgttttcttcaacatgtaaccaatcagtatcttgtcaatatagtcagccgatcgatcgacctcaca

SEQ ID NO: 25999 - protein, 98 aa, Homo sapiens
MAGRGGAARPNGPAAGNKICQFKLVLLGESAVGKSSLVLRFVKGQFHEYQESTIGAAFLTQTVCLDDTTVKFEIWDTAGQERYHSLAPMIHLHGPRTG

SEQ ID NO: 26000 - DNA, 1657 bp, Homo sapiens
gagcggctgaaaggcggaagtggaggccggagcctgggacaccgccggcggggagagaagcggatcccgtccgagccccggccccaagtaacgccgccgccccggagccgccttggaggtccccctccccactaagtgcctctttgcatagcaccagtccccacccgcacgctctctggaccactacagctggacgggcaatggcgggtcggggaggcgcagcacgacccaatggaccagctgctgggaacaagatctgtcaatttaagctggttctgctgggggagtctgcggtaggcaaatccagcctcgtcctccgctttgtcaagggacagtttcacgagtaccaggagagcacaattggagcggccttcctcacacagactgtctgcctggatgacacaacagtcaagtttgagatctgggacacagctggacaggagcggtatcacagcctggcccccatgtactatcggggggcccaggctgccatcgtggtctatgacatcaccaacacagatacatttgcacgggccaagaactgggtgaaggagctacagaggcaggccagccccaacatcgtcattgcactcgcgggtaacaaggcagacctggccagcaagagagccgtggaattccaggaagcacaagcctatgcagacgacaacagtttgctgttcatggagacatcagcaaagactgcaatgaacgtgaacgaaatcttcatggcaatagctaagaagcttcccaagaacgagccccagaatgcaactggtgctccaggccgaaaccgaggtgtggacctccaggagaacaacccagccagccggagccagtgctgcagcaactgagccccccttgcctgcccgctgcccccgcctcctccgcctgaatgacccgactggaatccactctaaccaatcgcacttaacgactcgggccaccactgggggggcagggggaggggtccaccatgatttctccatataattttgatcataggccggagtgagtcattccacctgcacctttctgtacaaatactaattcaattttaagtcttaagtcacttttttaatatatatgatcttctgctcttcccacttcctcccctttctactgctctcccattttcccttgctgggagtagccacatgctcttgccccccaacccttgtatatggggacagtggggtcagtgcagctaccctttctttccctcctgcggaacagcggacccagcaagagcatccacatcctcactttgttcggagtggtctttggtttgggcggtggggcagaccttgggaaggggcttaggaagggagaggcagctcttccttcagctggctctcatcaggctgcagccccctccccgctcccacctccctgctgggaaaccacagcattatcacagcattattgtgacagccacgaacccattgcccacaacccctccaccctcggtcaccccaacctctggctctgagccctgttctgaccaaatcatgatgatgagtatttgggggtgggtgggtaagggggggagtgggaggggacggaaccaactttttctgtattttgtattgtatgttttcttcaacatgtaaccaatcagtatcttgtcaatatagtcagccgatcgatcgacctcaca

SEQ ID NO: 26001 - protein, 216 aa, Homo sapiens; identical to SEQ ID NO: 3463

SEQ ID NO: 26002 - DNA, 1774 bp, Homo sapiens
gagcggctgaaaggcggaagtggaggccggagcctgggacaccgccggcggggagagaagcggatcccgtccgagccccggccccaagtaacgccgccgccccggagccgccagtctcgctctctcgccaggccggagtgcagtggcactatctcagctcagtgcaacctctgcctcccgggttcaagcgattctcctgcctcagcctcccgagtagctgggactacagttggaggtccccctccccactaagtgcctctttgcatagcaccagtccccacccgcacgctctctggaccactacagctggacgggcaatggcgggtcggggaggcgcagcacgacccaatggaccagctgctgggaacaagatctgtcaatttaagctggttctgctgggggagtctgcggtaggcaaatccagcctcgtcctccgctttgtcaagggacagtttcacgagtaccaggagagcacaattggagcggccttcctcacacagactgtctgcctggatgacacaacagtcaagtttgagatctgggacacagctggacaggagcggtatcacagcctggcccccatgtactatcggggggcccaggctgccatcgtggtctatgacatcaccaacacagatacatttgcacgggccaagaactgggtgaaggagctacagaggcaggccagccccaacatcgtcattgcactcgcgggtaacaaggcagacctggccagcaagagagccgtggaattccaggaagcacaagcctatgcagacgacaacagtttgctgttcatggagacatcagcaaagactgcaatgaacgtgaacgaaatcttcatggcaatagctaagaagcttcccaagaacgagccccagaatgcaactggtgctccaggccgaaaccgaggtgtggacctccaggagaacaacccagccagccggagccagtgctgcagcaactgagccccccttgcctgcccgctgcccccgcctcctccgcctgaatgacccgactggaatccactctaaccaatcgcacttaacgactcgggccaccactgggggggcagggggaggggtccaccatgatttctccatataattttgatcataggccggagtgagtcattccacctgcacctttctgtacaaatactaattcaattttaagtcttaagtcacttttttaatatatatgatcttctgctcttcccacttcctcccctttctactgctctcccattttcccttgctgggagtagccacatgctcttgccccccaacccttgtatatggggacagtggggtcagtgcagctaccctttctttccctcctgcggaacagcggacccagcaagagcatccacatcctcactttgttcggagtggtctttggtttgggcggtggggcagaccttgggaaggggcttaggaagggagaggcagctcttccttcagctggctctcatcaggctgcagccccctccccgctcccacctccctgctgggaaaccacagcattatcacagcattattgtgacagccacgaacccattgcccacaacccctccaccctcggtcaccccaacctctggctctgagccctgttctgaccaaatcatgatgatgagtatttgggggtgggtgggtaagggggggagtgggaggggacggaaccaactttttctgtattttgtattgtatgttttcttcaacatgtaaccaatcagtatcttgtcaatatagtcagccgatcgatcgacctcaca

SEQ ID NO: 26003 - protein, 216 aa, Homo sapiens; identical to SEQ ID NO: 3463

SEQ ID NO: 26004 - DNA, 1625 bp, Homo sapiens
cggatccggagcggctgaaaggcggaagtggaggccggagcctgggacaccgccggcggggagagaagcggatcccgtccgagccccggccccaagtaacgccgccgccccggagccgccttggaggtccccctccccactaagtgcctctttgcatagcaccagtccccacccgcacgctctctggaccactacagctggacgggcaatggcgggtcggggaggcgcagcacgacccaatggaccagctgctgggaacaagatctgtcaatttaagctggttctgctgggggagtctgcggtaggcaaatccagcctcgtcctccgctttgtcaagggacagtttcacgagtaccaggagagcacaattggagcggccttcctcacacagactgtctgcctggatgacacaacagtcaagtttgagatctgggacacagctggacaggagcggtatcacagcctggcccccatgtactatcggggggcccaggctgccatcgtggtctatgacatcaccaacacagatacatttgcacgggccaagaactgggtgaaggagctacagaggcaggccagccccaacatcgtcattgcactcgcgggtaacaaggcagacctggccagcaagagagccgtggaattccaggaagcacaagcctatgcagacgacaacagtttgctgttcatggagacatcagcaaagactgcaatgaacgtgaacgaaatcttcatggcaatagctaagaagcttcccaagaacgagccccagaatgcaactggtgctccaggccgaaaccgaggtgtggacctccaggagaacaacccagccagccggagccagtgctgcagcaactgagccccccttgctggaatccactctaaccaatcgcacttaacgactcgggccaccactgggggggcagggggaggggtccaccatgatttctccatataattttgatcataggccggagtgagtcattccacctgcacctttctgtacaaatactaattcaattttaagtcttaagtcacttttttaatatatatgatcttctgctcttcccacttcctcccctttctactgctctcccattttcccttgctgggagtagccacatgctcttgccccccaacccttgtatatggggacagtggggtcagtgcagctaccctttctttccctcctgcggaacagcggacccagcaagagcatccacatcctcactttgttcggagtggtctttggtttgggcggtggggcagaccttgggaaggggcttaggaagggagaggcagctcttccttcagctggctctcatcaggctgcagccccctccccgctcccacctccctgctgggaaaccacagcattatcacagcattattgtgacagccacgaacccattgcccacaacccctccaccctcggtcaccccaacctctggctctgagccctgttctgaccaaatcatgatgatgagtatttgggggtgggtgggtaagggggggagtgggaggggacggaaccaactttttctgtattttgtattgtatgttttcttcaacatgtaaccaatcagtatcttgtcaatatagtcagccgatcgatcgacctcaca

SEQ ID NO: 26005 - protein, 216 aa, Homo sapiens; identical to SEQ ID NO: 3463

SEQ ID NO: 26006 - DNA, 279 bp, Homo sapiens
ctgcccgctgcccccgcctcctccgcctgaatgacccgactggaatccactctaaccaatcgcacttaacgactcgggccaccacctcggtcaccccaacctctggctctgagccctgttctgaccaaatcatgatgatgagtatttgggggtgggtgggtaagggggggagtgggaggggacggaaccaactttttctgtattttgtattgtatgttttcttcaacatgtaaccaatcagtatcttgtcaatatagtcagccgatcgatcgacctcac

SEQ ID NO: 26007 - protein, 33 aa, Homo sapiens
MMMSIWGWVGKGGSGRGRNQLFLYFVLYVFFNM

SEQ ID NO: 26008 - DNA, 1171 bp, Homo sapiens
aaaggcggaagtggaggccggagcctgggacaccgccggcggggagagaagcggatcccgtccgagccccggccccaagtaacgccgccgccccggagccgccagtctcgctctctcgccaggccggagtgcagtggcactatctcagctcagtgcaacctctgcctcccgggttcaagcgattctcctgcctcagcctcccgagtagctgggactacagttggaggtccccctccccactaagtgcctctttgcatagcaccagtccccacccgcacgctctctggaccactacagctggacgggcaatggcgggtcggggaggcgcagcacgacccaatggaccagctgctgggaacaagatctgtcaatttaagctggttctgctgggggagtctgcggtaggcaaatccagcctcgtcctccgctttgtcaagggacagtttcacgagtaccaggagagcacaattggagcggccttcctcacacagactgtctgcctggatgacacaacagtcaagtttgagatctgggacacagctggacaggagcggtatcacagcctggcccccatgtactatcggggggcccaggctgccatcgtggtctatgacatcaccaacacagatacatttgcacgggccaagaactgggtgaaggagctacagaggcaggccagccccaacatcgtcattgcactcgcgggtaacaaggcagacctggccagcaagagagccgtggaattccaggaagcacaagcctatgcagacgacaacagtttgctgttcatggagacatcagcaaagactgcaatgaacgtgaacgaaatcttcatggcaatagctaagaagcttcccaagaacgagccccagaatgcaactggtgctccaggccgaaaccgaggtgtggacctccaggagaacaacccagccagccggagccagtgctgcagcaactgagccccccttgcctgcccgctgcccccgcctcctccgcctgaatgacccgactggaatccactctaaccaatcgcacttaacgactcgggccaccactgggggggcagggggaggggtccaccatgatttctccatataattttgatcataggccggagtgagtcattccacctgcacctttctgtacaaatactaattcaattttaagtctt

SEQ ID NO: 26009 - protein, 216 aa, Homo sapiens; identical to SEQ ID NO: 3463

SEQ ID NO: 26010 - DNA, 1003 bp, Homo sapiens
gaaaggcggaagtggaggccggagcctgggacaccgccggcggggagagaagcggatcccgtccgagccccggccccaagtaacgccgccgccccggagccgccttggaggtccccctccccactaagtgcctctttgcatagcaccagtccccacccgcacgctctctggaccactacagctggacgggcaatggcgggtcggggaggcgcagcacgacccaatggaccagctgctgggaacaagatctgtcaatttaagctggttctgctgggggagtctgcggtaggcaaatccagcctcgtcctccgctttgtcaagggacagtttcacgagtaccaggagagcacaattggagcggccttcctcacacagactgtctgcctggatgacacaacagtcaagtttgagatctgggacacagctggacaggagcggtatcacagcctggcccccatgatacatttgcacgggccaagaactgggtgaaggagctacagaggcaggccagccccaacatcgtcattgcactcgcgggtaacaaggcagacctggccagcaagagagccgtggaattccaggaagcacaagcctatgcagacgacaacagtttgctgttcatggagacatcagcaaagactgcaatgaacgtgaacgaaatcttcatggcaatagctaagaagcttcccaagaacgagccccagaatgcaactggtgctccaggccgaaaccgaggtgtggacctccaggagaacaacccagccagccggagccagtgctgcagcaactgagccccccttgcctgcccgctgcccccgcctcctccgcctgaatgacccgactggaatccactctaaccaatcgcacttaacgactcgggccaccactgggggggcagggggaggggtccaccatgatttctccatataattttgatcataggccggagtgagtcattccacctgcacctttctgtacaaatactaattcaattttaagtctt

SEQ ID NO: 26011 - protein, 98 aa, Homo sapiens; identical to SEQ ID NO: 25999

SEQ ID NO: 26012 - DNA, 1063 bp, Homo sapiens
gagcggctgaaaggcggaagtggaggccggagcctgggacaccgccggcggggagagaagcggatcccgtccgagccccggccccaagtaacgccgccgccccggagccgccttggaggtccccctccccactaagtgcctctttgcatagcaccagtccccacccgcacgctctctggaccactacagctggacgggcaatggcgggtcggggaggcgcagcacgacccaatggaccagctgctgggaacaagatctgtcaatttaagctggttctgctgggggagtctgcggtaggcaaatccagcctcgtcctccgctttgtcaagggacagtttcacgagtaccaggagagcacaattggagcggccttcctcacacagactgtctgcctggatgacacaacagtcaagtttgagatctgggacacagctggacaggagcggtatcacagcctggcccccatgtactatcggggggcccaggctgccatcgtggtctatgacatcaccaacacagatacatttgcacgggccaagaactgggtgaaggagctacagaggcaggccagccccaacatcgtcattgcactcgcgggtaacaaggcagacctggccagcaagagagccgtggaattccaggaagcacaagcctatgcagacgacaacagtttgctgttcatggagacatcagcaaagactgcaatgaacgtgaacgaaatcttcatggcaatagctaagaagcttcccaagaacgagccccagaatgcaactggtgctccaggccgaaaccgaggtgtggacctccaggagaacaacccagccagccggagccagtgctgcagcaactgagccccccttgcctgcccgctgcccccgcctcctccgcctgaatgacccgactggaatccactctaaccaatcgcacttaacgactcgggccaccactgggggggcagggggaggggtccaccatgatttctccatataattttgatcataggccggagtgagtcattccacctgcacctttctgtacaaatactaattcaattttaagtctt

SEQ ID NO: 26013 - protein, 216 aa, Homo sapiens; identical to SEQ ID NO: 3463

SEQ ID NO: 26014 - DNA, 608 bp, Homo sapiens
gaaaggcggaagtggaggccggagcctgggacaccgccggcggggagagaagcggatcccgtccgagccccggccccaagtaacgccgccgccccggagccgccttggaggtccccctccccactaagtgcctctttgcatagcaccagtccccacccgcacgctctctggaccactacagctggacgggcaatggcgggtcggggaggcgcagcacgacccaatggaccagctgctgggaacaagatctgtcaatttaagctggttctgctgggggagtctgcggtaggcaaatccagcctcgtcctccgctttgtcaagggacagtttcacgagtaccaggagagcacaattggagcggccttcctcacacagactgtctgcctggatgacacaacagtcaagtttgagatctgggacacagctggacaggagcggtatcacagcctggcccccatgtactatcggggggcccaggctgccatcgtggtctatgacatcaccaacacagtaaagatttccccttgcttcttcctttgcccttcatcttctcaaagtcccagggattgggttatcagagccctgatttcaggccgcttaaccctctg

SEQ ID NO: 26015 - protein, 137 aa, Homo sapiens
MAGRGGAARPNGPAAGNKICQFKLVLLGESAVGKSSLVLRFVKGQFHEYQESTIGAAFLTQTVCLDDTTVKFEIWDTAGQERYHSLAPMYYRGAQAAIVVYDITNTVKISPCFFLCPSSSQSPRDWVIRALISGRLT

SEQ ID NO: 26016 - DNA, 1011 bp, Homo sapiens
tccgattctggaagcagggggagcggaacttagggtacctctctcccacaactagaatggacaggccagaggacagtcatagcggtttccttaaggctcaccaaaggcagccgctccggatccggatctccacctccgccccgcccctcaatactcccaggtgattgacagtgcggagaccaatgggaggcactcttggccgacctacccagcggcgccggggcgtctgtgattgggaaggtgaggaaagcgctgcaggaagagttctctgcaggatgctgggtgagatcaaagggagagcttctgccaccacctcctacttggtgtgtgcgggggccggcacaaagaccatctctgcctctgccttcccctgctcctagccagggtcagctcttctctctgacgcggaatacagagctggacaacctctgcctcggccctctccatccgtaaataaagactagaaccacccccactctgcactctccccctctatggatcaggaatatttgttttttctgctcctctcaatatggactgggcccgctcctgattcctcccacccttacctctcaacacaaaccagtacctcctcttcttttgcatctcatcctcaagggacactactgaaaacctgtgtggaatcaaagctcaccggagacagctgtggccattgtgcctataacgccaacaccaggcatatcctggagcctcagctggagaatttacctgtcttggacaacctgccacaaaactgtgcccacatctagttccatctggtcatcagggcgtctctctttcttacacccataacacacaatccccacttccgcgccagtgttcatgagaagtgaaaaggaagagggaagagagggcttgttgggaggacagaggggatggggcagagtgggattcctagcaggttctggctggtgacaagctcttcccccagcccccttgccatacccagttctggaacagttccttatacaggagggatgggtagtcccc

SEQ ID NO: 26017 - protein, 65 aa, Homo sapiens
MGGTLGRPTQRRRGVCDWEGEESAAGRVLCRMLGEIKGRASATTSYLVCAGAGTKTISASAFPCS

SEQ ID NO: 26018 - DNA, 3923 bp, Homo sapiens
gtgggccgctcccctctgggaggagggctgcccagaggggtgcgggtgtcgctagcggcccctccccgtgtggggccacgtggcgggtgcgggccgagcccgaggggaagaacctggcccgtggggaggtgggggggaccgaaacggcgctgagccgagccgagagctacggggttcggagcagaggcagcggcagcggcagcggcagtaagagggaggggaggaggcaggagggcgcatggggcgccccggcccctccgacagcgcgccccctccggcccggccgcgctgaaagctccccagcgccgcgccttgaacccacgccccggggccatgccggtcatgaaggggttgctggccccgcaaaacaccttcctggacaccatcgccacccgttttgacggaacgcacagcaacttcctgctggccaacgcacagggcacacggggctttcccatcgtctactgctccgacggcttctgcgagctcacaggctacggtcgcaccgaggtcatgcagaagacctgcagctgccgtttcctctacggcccagagaccagtgagccagccctgcagcgtctgcacaaagccctggagggccaccaggagcaccgggctgaaatctgcttctaccgcaaggatggctcagccttttggtgcctcctggacatgatgcccatcaagaatgagatgggggaggtcgtgctgttcctcttttccttcaaggatatcactcagagtggaagcccaggacttggcccccaaggaggccgcggggacagtaatcacgaaaactcccttggtagaaggggagccacctggaaatttcggtctgccagaagacggagccgtactgtcctacaccgactgaccggccactttggccgccggggccagggaggcatgaaggccaataataacgtgtttgagccaaagccatcagtgcccgagtacaaggtggcctccgtgggggggtctcgctgcctcctcctccactacagcgtctccaaggccatctgggacggccttatcctccttgccaccttctacgttgcggtcaccgtcccctacaatgtctgtttctcgggtgacgatgacacccccatcacttcgcgacacacccttgtcagcgacatcgccgtggaaatgctcttcatcctagatatcatcctgaacttccgcaccacctatgtgtcccagtccggccaggtaatctctgctcctcgttccattggcctccactacctggccacctggttcttcatcgaccttattgctgctctgccctttgacctgctttacatcttcaacatcaccgtgacctcgctggtgcacctactgaagacagtgcggctgttgcggctgctgcggctgctgcagaagctggagcggtactctcagtgcagtgctgtggtgctcacgctgctcatgtcggtctttgcgctccttgcccactggatggcctgcatctggtatgtcatcgggcgccgggagatggaggccaatgacccgctgctctgggacattggctggttgcatgagttgggcaagcgtctggaggtgccctatgtcaatggctcggtgggcggcccatcacggcgcagcgcctacatcgcggcactgtacttcactctaagcagcctcaccagtgtgggctttggcaacgtgtgtgccaacaccgacgcggagaagatcttctccatctgcacgatgctcataggcgccctgatgcacgctgtggtgttcgggaacgtgacagccatcatccagcgcatgtactcgcgccgctcgctctaccacagccgcatgaaggacctcaaggacttcatccgtgtgcaccgcctgccgcggccgctcaagcagcgcatgctcgaatacttccagaccacgtgggccgtcaacagcggcatcgacgccaacgagttactgcgtgacttcccagacgagctgagagctgacattgctatgcacctgaatcgggagatcctgcagctgccgttgttcggggcagcgagcaggggctgcctgcgggccctatcgctgcacatcaagacctcgttctgcgctccgggcgagtacctgttgcgccgtggggatgccctgcaggcacattactatgtctgctccggctcgcttgaggtgctccgagacaacatggtgctggccatcctggggaagggggacctgattggagcagatatccctgagccggggcaggagcctgggttgggagcagacccaaacttcgtgctaaagaccagtgctgatgtgaaagctctgacctactgtggcctgcagcagctgagcagccgagggctggctgaggtcctgaggctctatcctgagtatggggctgccttccgggctggcctgccccgggacctcaccttcaacctgcgccagggctctgacaccagtggcctcagccgcttttcccgatcccctcgcctctcccagccccgctcagaaagcctcggctcctcctcagacaagacgctgccatccatcacagaggccgagagtggcgcggagcctgggggtggtcccaggccccgacggcccctcctgctgcccaacctcagcccagcacggcctcggggctccctggtcagccttttgggcgaggagctgcccccattctcagcccttgtctcctctccttccttatccccatccctgtcccctgccctggctggccagggccacagtgcctcccctcacggcccccccaggtgctctgctgcctggaagccccctcagcttctcattcccccactgggaacctttggacctccggacctcagtccccggatagtggatggcattgaggactctggcagcacagctgaggccccttcattccgattcagcaggaggcctgaactgccaaggccccgctcccaggcgccccctacagggaccaggcccagcccagaattggccagtgaggctgaggaggtgaaggaaaaggtttgccggctgaaccaggagatctctcgtctcaatcaggaggtgtctcagcttagccgggagctgcggcacatcatgggcctgctgcaggccaggctgggtcccccaggccacccagcaggctccgcttggaccccagaccctccttgtccacagctgaggccaccatgcctctctccttgtgcgtccagaccaccacccagcctccaggatactacgcttgctgaagttcactgcccagccagtgtggggaccatggagacagggactgcgctcctggacttgagaccttccatattgcccccctacccctcagagcctgaccctctgggaccctctccagtgccagaggcctcacccccaaccccaagcctcttgaggcacagtttccagtccaggtcagacacgttccactgaccctggcccagggcccaggcctgtctggggtgggcgctgccgctcaccactcagggaggacctgggccccttggcttcctgccttggggtcagcagccaccagctggcctggttggctctggatttctggactttttaatgaagcgtggttacctctgacgctattcccttttccaagccttccccaacctccccctctgtgaggggagccacctgagggctgtggaacccagcaggcatgagatgaaccgcagtgcccattgggctgggcagatgagatcctactttctccccaggacctggaggcaggctgtctctcaaggtggtctcttctgctgctagcaactcaaaaatcccaacagcactccctatcctttccctgaccccagaccgctgccaagcctgttctcccccattacaacatggtctcactcagggcctggactgctccaaaactcgcccaggtctccagctctcctctaccacccaacaccctgggctcacttttggataggaaataaactctttatttttgt

SEQ ID NO: 26019 - protein, 1017 aa, Homo sapiens; identical to SEQ ID NO: 3467

SEQ ID NO: 26020 - DNA, 869 bp, Homo sapiens
ctcttttgtgctcccagattcctgggtgcaaggtggcctcattagtgcccggagaccgccccatctccagggagcagatagacagacaagggggtgatcaggggcacagtgatccaaccctggcctctgaacgccgcagcggccattccttgggcccagcctggagacggcccccctgcagcaggctaatcttagacttgcctttgtctggcctgggtgtggacgcaagtgcctgtcaattccccgccacctcagagcactataaaccccagacccctgggagtgggtcacaattgacagcctcaaggttcctggctttttgaaccaccacagacatctcctttcccggctaccccaccctgagcgccagacaccatgaaccttccttccacaaaggtctcctgggccgccgtgacgctactgctgctgctgctgctgctgccgcccgcgctgttgtcgtccggggcggctgcacagcccctgcccgactgctgtcgtcaaaagacttgctcttgccgcctctacgagctgctgcacggcgcgggcaatcacgcggccggcatcctcacgctgggcaagcggaggtccgggcccccgggcctccagggtcggctgcagcgcctcctgcaggccagcggcaaccacgccgcgggcatcctgaccatgggccgccgcgcaggcgcagagccagcgccgcgcccctgcctcgggcgccgctgttccgccccggccgccgcctccgtcgcgcccggaggacagtccgggatctgagtcgttcttcgggccctgtcctggcccaggcctctgccctctgcccacccagcgtcagcccccagaaaaaaggcaataaagacgagtctccattcgtg

SEQ ID NO: 26021 - protein, 131 aa, Homo sapiens; identical to SEQ ID NO: 3469

SEQ ID NO: 26022 - DNA, 992 bp, Homo sapiens
ctgatggtgaagagctagctggggcgatagctgccgggaaccctggagcgcctctccgtgaacgggcagctgagctccgggaggccctagagcaggggccacggggactggcccttcggctctggccaaagctgcaggtggtggtgactctggatgcaggaggccaggccgaggctgtggctgccctcggggccttgtggtgccaaggactagccttcttctctcctgcttatgctgcctcgggaggggtgctgggcctaaacctacagccagagcagccccatgggctctaccttctgccccctggggccccctttatcgagctgctcccagtcaaggaaggcacccaggaggaagctgcctccaccctccttttggccgaggcccagcagggcaaggagtatgagctggtgctgacggaccgcgccagcctcaccaggtgccgcctgggtgatgtggtgcgagtggttggtgcctacaatcagtgtccagtcgtcaggttcatctgcaggctggaccagaccctgagtgtgcgaggggaagatattggtgaagacctgttctctgaggccctgggccgggcagtggggcagtgggcgggggccaagctgctggaccatggctgtgtggagagcagcattctggattcctctgcgggctctgctccccactacgaggtgtttgtggcgctgagggggctgaggaatctgtcagaggaaaatcgagacaagattcttgcctcagggtctgctttggggaaacgggagtggaccccggcccagccattcccccactgagctccaggactttcccccaacattctgctctgggcctggcaaggctgcatgcgcacacaggagccttggaggactcgtggcacatcctaggccagcacccacaaaccacttctgcggtggggaagggagagctattacttcacatcataaggcatcgccgcaggaagcaactccggagaccatctgggttcactg

SEQ ID NO: 26023 - protein, 44 aa, Homo sapiens
MGSTFCPLGPPLSSCSQSRKAPRRKLPPPSFWPRPSRARSMSWC

SEQ ID NO: 26024 - DNA, 1630 bp, Homo sapiens
gaagggccatccttgtgtcctgggctccactgcctctcccttcctcctcttcaggctggaccagaccctgagtgtgcgaggggaagatattggtgaagacctgttctctgaggccctgggccgggcagtggggcagtgggcgggggccaagctgctggaccatggctgtgtggagagcagcattctgggtgagcctccccaccggctcctgcctaccatccttgagctacccttcaactcctacctcccctgccaggggactgctaggaaagagataagcctcctttactactcctacaaaagtccttctctgcatctaactctcatccatcctgctgcagtctctacccattttctttcctgatctgtctcctatttaggatcaagctctaggttcctctccatttaccccactccccaccaagaaactcttttttccctatgaatctcagagtggggaagaacagatagggcagaggacactagacttggcagctgcccattcaccggaagtatgtgtgcacatggggtctattcacagattcctctgcgggctctgctccccactacgaggtgtttgtggcgctgagggggctgaggaatctgtcagaggaaaatcgagacaagctggaccactgccttcaggaagcctctccccgctacaagtccctgcggttctggggcagcgtgggccctgccagagtccacctggtggggcagggagccttccgagcactccgggcagccctcgctgcctgcccctcctcccccttcccccctgcgatgccccgggtccttcggcacaggcacctggcccagtgtctgcaggagagggtggtgtcctgagtcaagtcctgccccaccgcccagctccccccagaggccacctcgcccctccctctgggacctctccggatggggagtccttggccagggtctctgactctgtgtcacctgacatttgcccatgagagccgctgggccttagagaggccttggcccagctgaccggttctgaagtatgggcctccggggttagcagatgccagcagtgcctgcccgtgtccccatgtcccggcatgaaggacactgctagagagttaccatgcacaccgatggtttcctgtatcacagcccaaagaggttctctggtggccacagctgtgtgctcagtcagtgcactgggcaagctagaagtgttggggggttaatgtccccaggagcagcaaccctgagtcaataaggagcaggacctcagcttcattgtccttgagcaggacaattctgaagtgtattctacataaactctcagaggatgcccagcaggatggagtcccagttgcccgcagcagtaacccactcattcatgtacttcctgcgggggctctcccttccctctcttccccactcccccgccttgggcttcctgggatggctcccaaataaacctcttgcacccagattcttgcctcagggtctgctttggggaaacgggagtggaccccggcccagccattcccccactgagctccaggactttcccccaacattctgctctgggcctggcaaggctgcatgcgcacacaggagccttggaggactcgtggcacatcctaggccagcacccaca

SEQ ID NO: 26025 - protein, 148 aa, Homo sapiens
MGSIHRFLCGLCSPLRGVCGAEGAEESVRGKSRQAGPLPSGSLSPLQVPAVLGQRGPCQSPPGGAGSLPSTPGSPRCLPLLPLPPCDAPGPSAQAPGPVSAGEGGVLSQVLPHRPAPPRGHLAPPSGTSPDGESLARVSDSVSPDICP

SEQ ID NO: 26026 - DNA, 1823 bp, Homo sapiens
ctgatggtgaagagctagctggggcgatagctgccgggaaccctggagcgcctctccgtgaacgggcagctgagctccgggaggccctagagcaggggccacggggactggcccttcggctctggccaaagctgcaggtggtggtgactctggatgcaggaggccaggccgaggctgtggctgccctcggggccttgtggtgccaaggactagccttcttctctcctgcttatgctgcctcgggaggggtgctgggcctaaacctacagccagagcagccccatgggctctaccttctgccccctggggccccctttatcgagctgctcccagtcaaggaaggcacccaggaggaagctgcctccaccctccttttggccgaggcccagcagggcaaggagtatgagctggtgctgacggaccgcgccagcctcaccaggtgccgcctgggtgatgtggtgcgagtggttggtgcctacaatcagtgtccagtcgtcaggttcatctgcaggctggaccagaccctgagtgtgcgaggggaagatattggtgaagacctgttctctgaggccctgggccgggcagtggggcagtgggcgggggccaagctgctggaccatggctgtgtggagagcagcattctggagtggggaagaacagatagggcagaggacactagacttggcagctgcccattcaccggaagtatgtgtgcacatggggtctattcacagattcctctgcgggctctgctccccactacgaggtgtttgtggcgctgagggggctgaggaatctgtcagaggaaaatcgagacaagctggaccactgccttcaggaagcctctccccgctacaagtccctgcggttctggggcagcgtgggccctgccagagtccacctggtggggcagggagccttccgagcactccgggcagccctcgctgcctgcccctcctcccccttcccccctgcgatgccccgggtccttcggcacaggcacctggcccagtgtctgcaggagagggtggtgtcctgagtcaagtcctgccccaccgcccagctccccccagaggccacctcgcccctccctctgggacctctccggatggggagtccttggccagggtctctgactctgtgtcacctgacatttgcccatgagagccgctgggccttagagaggccttggcccagctgaccggttctgaagtatgggcctccggggttagcagatgccagcagtgcctgcccgtgtccccatgtcccggcatgaaggacactgctagagagttaccatgcacaccgatggtttcctgtatcacagcccaaagaggttctctggtggccacagctgtgtgctcagtcagtgcactgggcaagctagaagtgttggggggttaatgtccccaggagcagcaaccctgagtcaataaggagcaggacctcagcttcattgtccttgagcaggacaattctgaagtgtattctacataaactctcagaggatgcccagcaggatggagtcccagttgcccgcagcagtaacccactcattcatgtacttcctgcgggggctctcccttccctctcttccccactcccccgccttgggcttcctgggatggctcccaaataaacctcttgcacccagattcttgcctcagggtctgctttggggaaacgggagtggaccccggcccagccattcccccactgagctccaggactttcccccaacattctgctctgggcctggcaaggctgcatgcgcacacaggagccttggaggactcgtggcacatcctaggccagcacccaca

SEQ ID NO: 26027 - protein, 181 aa, Homo sapiens
MAVWRAAFWSGEEQIGQRTLDLAAAHSPEVCVHMGSIHRFLCGLCSPLRGVCGAEGAEESVRGKSRQAGPLPSGSLSPLQVPAVLGQRGPCQSPPGGAGSLPSTPGSPRCLPLLPLPPCDAPGPSAQAPGPVSAGEGGVLSQVLPHRPAPPRGHLAPPSGTSPDGESLARVSDSVSPDICP

SEQ ID NO: 26028 - DNA, 2802 bp, Homo sapiens
gacagggtctcactctgttgcccaagctggggtgcagtggcacgatcttggctcactgtagccttgacatcctgggctcaagggatcctcccatctcagcctcccaagtagctgcgactatgggtgtgacaccacgctgggctagtttttcaattttttgtagagatggagtctccctatgttgctcaggccggttgcaaactcctgggctcaagtgattctcctgcctcagcctcccaaagtgctgggattacagatgatagccacctcacccggcccacccctaccttctgaaagaggcattcttattcttattcccattttgcagatcaggaaacagagctcagtgcagcccactaaattgctcagggccctacagctaacaagcggcagaggcaggatctgcactcaggagctgcttggagatgctgctgtggccactgctgctgctgctgctgctgctgccaacattggccctgctcaggcagcagcggtcccaggatgccaggctgtcctggcttgctggcctccagcaccgagtggcatggggggccctggtctgggcagccacctggcagcggcggaggctggagcagagcacgctccatgtgcaccagagccagcagcaggccctgaggtggtgtctacagggagcccagcgcccccactgttccctcagaaggagcacagacataagcaccttccggaatcatctccctctgaccaaggccagccagacccagcaggaagacagtggagagcagccactgcccccgacctcaaaccaggaccttggggaggcctctctgcaggccaccttgctgggtctggcagccctaaacaaggcctacccagaagtgctggctcagggacgcactgcccgtgtgacgcttacatccccttggccccgacccctgccttggcctgggaataccctgggccaggtgggcacccctggaaccaaggaccctagggccctgctgctggacgcactgaggtccccagggctgagggcactggaggctgggacggctgtcgaacttctggatgttttcttgggcctggagactgatggtgaagagctagctggggcgatagctgccgggaaccctggagcgcctctccgtgaacgggcagctgagctccgggaggccctagagcaggggccacggggactggcccttcggctctggccaaagctgcaggtggtggtgactctggatgcaggaggccaggccgaggctgtggctgccctcggggccttgtggtgccaaggactagccttcttctctcctgcttatgctgcctcgggaggggtgctgggcctaaacctacagccagagcagccccatgggctctaccttctgccccctggggccccctttatcgagctgctcccagtcaaggaaggcacccaggaggaagctgcctccaccctccttttggccgaggcccagcagggcaaggagtatgagctggtgctgacggaccgcgccagcctcaccaggtgccgcctgggtgatgtggtgcgagtggttggtgcctacaatcagtgtccagtcgtcaggttcatctgcaggctggaccagaccctgagtgtgcgaggggaagatattggtgaagacctgttctctgaggccctgggccgggcagtggggcagtgggcgggggccaagctgctggaccatggctgtgtggagagcagcattctggattcctctgcgggctctgctccccactacgaggtgtttgtggcgctgagggggctgaggaatctgtcagaggaaaatcgagacaagctggaccactgccttcaggaagcctctccccgctacaagtccctgcggttctggggcagcgtgggccctgccagagtccacctggtggggcagggagccttccgagcactccgggcagccctcgctgcctgcccctcctcccccttcccccctgcgatgccccgggtccttcggcacaggcacctggcccagtgtctgcaggagagggtggtgtcctgagtcaagtcctgccccaccgcccagctccccccagaggccacctcgcccctccctctgggacctctccggatggggagtccttggccagggtctctgactctgtgtcacctgacatttgcccatgagagccgctgggccttagagaggccttggcccagctgaccggttctgaagtatgggcctccggggttagcagatgccagcagtgcctgcccgtgtccccatgtcccggcatgaaggacactgctagagagttaccatgcacaccgatggtttcctgtatcacagcccaaagaggttctctggtggccacagctgtgtgctcagtcagtgcactgggcaagctagaagtgttggggggttaatgtccccaggagcagcaaccctgagtcaataaggagcaggacctcagcttcattgtccttgagcaggacaattctgaagtgtattctacataaactctcagaggatgcccagcaggatggagtcccagttgcccgcagcagtaacccactcattcatgtacttcctgcgggggctctcccttccctctcttccccactcccccgccttgggcttcctgggatggctcccaaataaacctcttgcacccagattcttgcctcagggtctgctttggggaaacgggagtggaccccggcccagccattcccccactgagctccaggactttcccccaacattctgctctgggcctggcaaggctgcatgcgcacacaggagccttggaggactcgtggcacatcctaggccagcacccaca

SEQ ID NO: 26029 - protein, 530 aa, Homo sapiens; identical to SEQ ID NO: 3471

SEQ ID NO: 26030 - DNA, 2384 bp, Homo sapiens
ggatgtgtgctgagacccagagtcacccaggggtctccgtcacgtgccaggagtaggcagaagtgggctgtgacagatcaggaaacagagctcagtgcagcccactaaattgctcagggccctacagctaacaagcggcagaggcaggatctgcactcaggagctgcttggagatgctgctgtggccactgctgctgctgctgctgctgctgccaacattggccctgctcaggcagcagcgcgcccccactgttccctcagaaggagcacagacataagcaccttccggaatcatctccctctgaccaaggccagccagacccagcaggaagacagtggagagcagccactgcccccgacctcaaaccaggaccttggggaggcctctctgcaggccaccttgctgggtctggcagccctaaacaaggcctacccagaagtgctggctcagggacgcactgcccgtgtgacgcttacatccccttggccccgacccctgccttggcctgggaataccctgggccaggtgggcacccctggaaccaaggaccctagggccctgctgctggacgcactgaggtccccagggctgagggcactggaggctgggacggctgtcgaacttctggatgttttcttgggcctggagactgatggtgaagagctagctggggcgatagctgccgggaaccctggagcgcctctccgtgaacgggcagctgagctccgggaggccctagagcaggggccacggggactggcccttcggctctggccaaagctgcaggtggtggtgactctggatgcaggaggccaggccgaggctgtggctgccctcggggccttgtggtgccaaggactagccttcttctctcctgcttatgctgcctcgggaggggtgctgggcctaaacctacagccagagcagccccatgggctctaccttctgccccctggggccccctttatcgagctgctcccagtcaaggaaggcacccaggaggaagctgcctccaccctccttttggccgaggcccagcagggcaaggagtatgagctggtgctgacggaccgcgccagcctcaccaggtgccgcctgggtgatgtggtgcgagtggttggtgcctacaatcagtgtccagtcgtcaggttcatctgcaggctggaccagaccctgagtgtgcgaggggaagatattggtgaagacctgttctctgaggccctgggccgggcagtggggcagtgggcgggggccaagctgctggaccatggctgtgtggagagcagcattctggattcctctgcgggctctgctccccactacgaggtgtttgtggcgctgagggggctgaggaatctgtcagaggaaaatcgagacaagctggaccactgccttcaggaagcctctccccgctacaagtccctgcggttctggggcagcgtgggccctgccagagtccacctggtggggcagggagccttccgagcactccgggcagccctcgctgcctgcccctcctcccccttcccccctgcgatgccccgggtccttcggcacaggcacctggcccagtgtctgcaggagagggtggtgtcctgagtcaagtcctgccccaccgcccagctccccccagaggccacctcgcccctccctctgggacctctccggatggggagtccttggccagggtctctgactctgtgtcacctgacatttgcccatgagagccgctgggccttagagaggccttggcccagctgaccggttctgaagtatgggcctccggggttagcagatgccagcagtgcctgcccgtgtccccatgtcccggcatgaaggacactgctagagagttaccatgcacaccgatggtttcctgtatcacagcccaaagaggttctctggtggccacagctgtgtgctcagtcagtgcactgggcaagctagaagtgttggggggttaatgtccccaggagcagcaaccctgagtcaataaggagcaggacctcagcttcattgtccttgagcaggacaattctgaagtgtattctacataaactctcagaggatgcccagcaggatggagtcccagttgcccgcagcagtaacccactcattcatgtacttcctgcgggggctctcccttccctctcttccccactcccccgccttgggcttcctgggatggctcccaaataaacctcttgcacccagattcttgcctcagggtctgctttggggaaacgggagtggaccccggcccagccattcccccactgagctccaggactttcccccaacattctgctctgggcctggcaaggctgcatgcgcacacaggagccttggaggactcgtggcacatcctaggccagcacccaca

SEQ ID NO: 26031 - protein, 34 aa, Homo sapiens
MLLWPLLLLLLLLPTLALLRQQRAPTVPSEGAQT

SEQ ID NO: 26032 - DNA, 1152 bp, Homo sapiens
aaagccatcgctccttctttctggccggatgtgtgctgagacccagagtcacccaggggtctccgtcacgtgccaggagtaggcagaagtgggctgtgacagatcaggaaacagagctcagtgcagcccactaaattgctcagggccctacagctaacaagcggcagaggcaggatctgcactcaggagctgcttggagatgctgctgtggccactgctgctgctgctgctgctgctgccaacattggccctgctcaggcagcagcggtcccaggatgccaggctgtcctggcttgctggcctccagcaccgagtggcatggggggccctggtctgggcagccacctggcagcggcggaggctggagcagagcacgctccatgtgcaccagagccagcagcaggccctgaggtggtgtctacagggagcccagcgcccccactgttccctcagaaggagcacagacataagcaccttccggaatcatctcctgggtctggcagccctaaacaaggcctacccagaactgaccggttctgaagtatgggcctccggggttagcagatgccagcagtgcctgcccgtgtccccatgtcccggcatgaaggacactgctagagagttaccatgcacaccgatggtttcctgtatcacagcccaaagaggttctctggtggccacagctgtgtgctcagtcagtgcactgggcaagctagaagtgttggggggttaatgtccccaggagcagcaaccctgagtcaataaggagcaggacctcagcttcattgtccttgagcaggacaattctgaagtgtattctacataaactctcagaggatgcccagcaggatggagtcccagttgcccgcagcagtaacccactcattcatgtacttcctgcgggggctctcccttccctctcttccccactcccccgccttgggcttcctgggatggctcccaaataaacctcttgcacccagattcttgcctcagggtctgctttggggaaacgggagtggaccccggcccagccattcccccactgagctccaggactttcccccaacattctgctctgggcctggcaaggctgcatgcgcacacaggagccttggaggactcgtggcacatcctaggccagcacccaca

SEQ ID NO: 26033 - protein, 177 aa, Homo sapiens
MLLWPLLLLLLLLPTLALLRQQRSQDARLSWLAGLQHRVAWGALVWAATWQRRRLEQSTLHVHQSQQQALRWCLQGAQRPHCSLRRSTDISTFRNHLLGLAALNKAYPELTGSEVWASGVSRCQQCLPVSPCPGMKDTARELPCTPMVSCITAQRGSLVATAVCSVSALGKLEVLGG

SEQ ID NO: 26034 - DNA, 2672 bp, Homo sapiens
gccttttaaagccatcgctccttctttctggccggatgtgtgctgagacccagagtcacccaggggtctccgtcacgtgccaggagtaggcagaagtgggctgtgacagatcaggaaacagagctcagtgcagcccactaaattgctcagggccctacagctaacaagcggcagaggcaggatctgcactcaggagctgcttggagatgctgctgtggccactgctgctgctgctgctgctgctgccaacattggccctgctcaggcagcagcggtcccaggatgccaggctgtcctggcttgctggcctccagcaccgagtggcatggggggccctggtctgggcagccacctggcagcggcggaggctggagcagagcacgctccatgtgcaccagagccagcagcaggccctgaggtggtgtctacagggagcccagcgcccccactgttccctcagaaggagcacagacataagcaccttccggaatcatctccctctgaccaaggccagccagacccagcaggaagacagtggagagcagccactgcccccgacctcaaaccaggaccttggggaggcctctctgcaggccaccttgctgggtctggcagccctaaacaaggcctacccagaagtgctggctcagggacgcactgcccgtgtgacgcttacatccccttggccccgacccctgccttggcctgggaataccctgggccaggtgggcacccctggaaccaaggaccctagggccctgctgctggacgcactgaggtccccagggctgagggcactggaggctgggacggctgtcgaacttctggatgttttcttgggcctggagactgatggtgaagagctagctggggcgatagctgccgggaaccctggagcgcctctccgtgaacgggcagctgagctccgggaggccctagagcaggggccacggggactggcccttcggctctggccaaagctgcaggtggtggtgactctggatgcaggaggccaggccgaggctgtggctgccctcggggccttgtggtgccaaggactagccttcttctctcctgcttatgctgcctcgggaggggtgctgggcctaaacctacagccagagcagccccatgggctctaccttctgccccctggggccccctttatcgagctgctcccagtcaaggaaggcacccaggaggaagctgcctccaccctccttttggccgaggcccagcagggcaaggagtatgagctggtgctgacggaccgcgccagcctcaccaggtgccgcctgggtgatgtggtgcgagtggttggtgcctacaatcagtgtccagtcgtcaggttcatctgcaggctggaccagaccctgagtgtgcgaggggaagatattggtgaagacctgttctctgaggccctgggccgggcagtggggcagtgggcgggggccaagctgctggaccatggctgtgtggagagcagcattctggagtggggaagaacagatagggcagaggacactagacttggcagctgcccattcaccggaagtatgtgtgcacatggggtctattcacagattcctctgcgggctctgctccccactacgaggtgtttgtggcgctgagggggctgaggaatctgtcagaggaaaatcgagacaagctggaccactgccttcaggaagcctctccccgctacaagtccctgcggttctggggcagcgtgggccctgccagagtccacctggtggggcagggagccttccgagcactccgggcagccctcgctgcctgcccctcctcccccttcccccctgcgatgccccgggtccttcggcacaggcacctggcccagtgtctgcaggagagggtggtgtcctgagtcaagtcctgccccaccgcccagctccccccagaggccacctcgcccctccctctgggacctctccggatggggagtccttggccagggtctctgactctgtgtcacctgacatttgcccatgagagccgctgggccttagagaggccttggcccagctgaccggttctgaagtatgggcctccggggttagcagatgccagcagtgcctgcccgtgtccccatgtcccggcatgaaggacactgctagagagttaccatgcacaccgatggtttcctgtatcacagcccaaagaggttctctggtggccacagctgtgtgctcagtcagtgcactgggcaagctagaagtgttggggggttaatgtccccaggagcagcaaccctgagtcaataaggagcaggacctcagcttcattgtccttgagcaggacaattctgaagtgtattctacataaactctcagaggatgcccagcaggatggagtcccagttgcccgcagcagtaacccactcattcatgtacttcctgcgggggctctcccttccctctcttccccactcccccgccttgggcttcctgggatggctcccaaataaacctcttgcacccagattcttgcctcagggtctgctttggggaaacgggagtggaccccggcccagccattcccccactgagctccaggactttcccccaacattctgctctgggcctggcaaggctgcatgcgcacacaggagccttggaggactcgtggcacatcctaggccagcacccaca

SEQ ID NO: 26035 - protein, 474 aa, Homo sapiens
MLLWPLLLLLLLLPTLALLRQQRSQDARLSWLAGLQHRVAWGALVWAATWQRRRLEQSTLHVHQSQQQALRWCLQGAQRPHCSLRRSTDISTFRNHLPLTKASQTQQEDSGEQPLPPTSNQDLGEASLQATLLGLAALNKAYPEVLAQGRTARVTLTSPWPRPLPWPGNTLGQVGTPGTKDPRALLLDALRSPGLRALEAGTAVELLDVFLGLETDGEELAGAIAAGNPGAPLRERAAELREALEQGPRGLALRLWPKLQVVVTLDAGGQAEAVAALGALWCQGLAFFSPAYAASGGVLGLNLQPEQPHGLYLLPPGAPFIELLPVKEGTQEEAASTLLLAEAQQGKEYELVLTDRASLTRCRLGDVVRVVGAYNQCPVVRFICRLDQTLSVRGEDIGEDLFSEALGRAVGQWAGAKLLDHGCVESSILEWGRTDRAEDTRLGSCPFTGSMCAHGVYSQIPLRALLPTTRCLWR

SEQ ID NO: 26036 - DNA, 2464 bp, Homo sapiens
gccggatttcccagttggggcccagccttttaaagccatcgctccttctttctggccggatgtgtgctgagacccagagtcacccaggggtctccgtcacgtgccaggagtaggcagaagtgggctgtgacagatcaggaaacagagctcagtgcagcccactaaattgctcagggccctacagctaacaagcggcagaggcaggatctgcactcaggagctgcttggagatgctgctgtggccactgctgctgctgctgctgctgctgccaacattggccctgctcaggcagcagcggtcccaggatgccaggctgtcctggcttgctggcctccagcaccgagtggcatggggggccctggtctgggcagccacctggcagcggcggaggctggagcagagcacgctccatgtgcaccagagccagcagcaggccctgaggtggtgtctacagggagcccagcgcccccactgttccctcagaaggagcacagacataagcaccttccggaatcatctccctctgaccaaggccagccagacccagcaggaagacagtggagagcagccactgcccccgacctcaaaccaggactgagggcactggaggctgggacggctgtcgaacttctggatgttttcttgggcctggagactgatggtgaagagctagctggggcgatagctgccgggaaccctggagcgcctctccgtgaacgggcagctgagctccgggaggccctagagcaggggccacggggactggcccttcggctctggccaaagctgcaggtggtggtgactctggatgcaggaggccaggccgaggctgtggctgccctcggggccttgtggtgccaaggactagccttcttctctcctgcttatgctgcctcgggaggggtgctgggcctaaacctacagccagagcagccccatgggctctaccttctgccccctggggccccctttatcgagctgctcccagtcaaggaaggcacccaggaggaagctgcctccaccctccttttggccgaggcccagcagggcaaggagtatgagctggtgctgacggaccgcgccagcctcaccaggtgccgcctgggtgatgtggtgcgagtggttggtgcctacaatcagtgtccagtcgtcaggttcatctgcaggtaggtgaccccggggagctgaagggccatccttgtgtcctgggctccactgcctctcccttcctcctcttcaggctggaccagaccctgagtgtgcgaggggaagatattggtgaagacctgttctctgaggccctgggccgggcagtggggcagtgggcgggggccaagctgctggaccatggctgtgtggagagcagcattctggattcctctgcgggctctgctccccactacgaggtgtttgtggcgctgagggggctgaggaatctgtcagaggaaaatcgagacaagctggaccactgccttcaggaagcctctccccgctacaagtccctgcggttctggggcagcgtgggccctgccagagtccacctggtggggcagggagccttccgagcactccgggcagccctcgctgcctgcccctcctcccccttcccccctgcgatgccccgggtccttcggcacaggcacctggcccagtgtctgcaggagagggtggtgtcctgagtcaagtcctgccccaccgcccagctccccccagaggccacctcgcccctccctctgggacctctccggatggggagtccttggccagggtctctgactctgtgtcacctgacatttgcccatgagagccgctgggccttagagaggccttggcccagctgaccggttctgaagtatgggcctccggggttagcagatgccagcagtgcctgcccgtgtccccatgtcccggcatgaaggacactgctagagagttaccatgcacaccgatggtttcctgtatcacagcccaaagaggttctctggtggccacagctgtgtgctcagtcagtgcactgggcaagctagaagtgttggggggttaatgtccccaggagcagcaaccctgagtcaataaggagcaggacctcagcttcattgtccttgagcaggacaattctgaagtgtattctacataaactctcagaggatgcccagcaggatggagtcccagttgcccgcagcagtaacccactcattcatgtacttcctgcgggggctctcccttccctctcttccccactcccccgccttgggcttcctgggatggctcccaaataaacctcttgcacccagattcttgcctcagggtctgctttggggaaacgggagtggaccccggcccagccattcccccactgagctccaggactttcccccaacattctgctctgggcctggcaaggctgcatgcgcacacaggagccttggaggactcgtggcacatcctaggccagcacccaca

SEQ ID NO: 26037 - protein, 273 aa, Homo sapiens
MGGPGLGSHLAAAEAGAEHAPCAPEPAAGPEVVSTGSPAPPLFPQKEHRHKHLPESSPSDQGQPDPAGRQWRAATAPDLKPGLRALEAGTAVELLDVFLGLETDGEELAGAIAAGNPGAPLRERAAELREALEQGPRGLALRLWPKLQVVVTLDAGGQAEAVAALGALWCQGLAFFSPAYAASGGVLGLNLQPEQPHGLYLLPPGAPFIELLPVKEGTQEEAASTLLLAEAQQGKEYELVLTDRASLTRCRLGDVVRVVGAYNQCPVVRFICR

SEQ ID NO: 26038 - DNA, 1461 bp, Homo sapiens
gaagggccatccttgtgtcctgggctccactgcctctcccttcctcctcttcaggctggaccagaccctgagtgtgcgaggggaagatattggtgaagacctgttctctgaggccctgggccgggcagtggggcagtgggcgggggccaagctgctggaccatggctgtgtggagagcagcattctgggtgagcctccccaccggctcctgcctaccatccttgagctacccttcaactcctacctcccctgccaggggactgctaggaaagagataagcctcctttactactcctacaaaagtccttctctgcatctaactctcatccatcctgctgcagtctctacccattttctttcctgatctgtctcctatttaggatcaagctctaggttcctctccatttaccccactccccaccaagaaactcttttttccctatgaatctcagagtggggaagaacagatagggcagaggacactagacttggcagctgcccattcaccggaagtatgtgtgcacatggggtctattcacagattcctctgcgggctctgctccccactacgaggtgtttgtggcgctgagggggctgaggaatctgtcagaggaaaatcgagacaagctggaccactgccttcaggaagcctctccccgctacaagtccctgcggttctggggcagcgtgggccctgccagagtccacctggtggggcagggagccttccgagcactccgggcagccctcgctgcctgcccctcctcccccttcccccctgcgatgccccgggtccttcggcacaggcacctggcccagtgtctgcaggagagggtggtgtcctgagtcaagtcctgccccaccgcccagctccccccagaggccacctcgcccctccctctgggacctctccggatggggagtccttggccagggtctctgactctgtgtcacctgacatttgcccatgagagccgctgggccttagagaggccttggcccagctgaccggttctgaagtatgggcctccggggttagcagatgccagcagtgcctgcccgtgtccccatgtcccggcatgaaggacactgctagagagttaccatgcacaccgatggtttcctgtatcacagcccaaagaggttctctggtggccacagctgtgtgctcagtcagtgcactgggcaagctagaagtgttggggggttaatgtccccaggagcagcaaccctgagtcaataaggagcaggacctcagcttcattgtccttgagcaggacaattctgaagtgtattctacataaactctcagaggatgcccagcaggatggagtcccagttgcccgcagcagtaacccactcattcatgtacttcctgcgggggctctcccttccctctcttccccactcccccgccttgggcttcctgggatggctcccaaataaacctcttgcacccag

SEQ ID NO: 26039 - protein, 148 aa, Homo sapiens; identical to SEQ ID NO: 26025

SEQ ID NO: 26040 - DNA, 1654 bp, Homo sapiens
ctgatggtgaagagctagctggggcgatagctgccgggaaccctggagcgcctctccgtgaacgggcagctgagctccgggaggccctagagcaggggccacggggactggcccttcggctctggccaaagctgcaggtggtggtgactctggatgcaggaggccaggccgaggctgtggctgccctcggggccttgtggtgccaaggactagccttcttctctcctgcttatgctgcctcgggaggggtgctgggcctaaacctacagccagagcagccccatgggctctaccttctgccccctggggccccctttatcgagctgctcccagtcaaggaaggcacccaggaggaagctgcctccaccctccttttggccgaggcccagcagggcaaggagtatgagctggtgctgacggaccgcgccagcctcaccaggtgccgcctgggtgatgtggtgcgagtggttggtgcctacaatcagtgtccagtcgtcaggttcatctgcaggctggaccagaccctgagtgtgcgaggggaagatattggtgaagacctgttctctgaggccctgggccgggcagtggggcagtgggcgggggccaagctgctggaccatggctgtgtggagagcagcattctggagtggggaagaacagatagggcagaggacactagacttggcagctgcccattcaccggaagtatgtgtgcacatggggtctattcacagattcctctgcgggctctgctccccactacgaggtgtttgtggcgctgagggggctgaggaatctgtcagaggaaaatcgagacaagctggaccactgccttcaggaagcctctccccgctacaagtccctgcggttctggggcagcgtgggccctgccagagtccacctggtggggcagggagccttccgagcactccgggcagccctcgctgcctgcccctcctcccccttcccccctgcgatgccccgggtccttcggcacaggcacctggcccagtgtctgcaggagagggtggtgtcctgagtcaagtcctgccccaccgcccagctccccccagaggccacctcgcccctccctctgggacctctccggatggggagtccttggccagggtctctgactctgtgtcacctgacatttgcccatgagagccgctgggccttagagaggccttggcccagctgaccggttctgaagtatgggcctccggggttagcagatgccagcagtgcctgcccgtgtccccatgtcccggcatgaaggacactgctagagagttaccatgcacaccgatggtttcctgtatcacagcccaaagaggttctctggtggccacagctgtgtgctcagtcagtgcactgggcaagctagaagtgttggggggttaatgtccccaggagcagcaaccctgagtcaataaggagcaggacctcagcttcattgtccttgagcaggacaattctgaagtgtattctacataaactctcagaggatgcccagcaggatggagtcccagttgcccgcagcagtaacccactcattcatgtacttcctgcgggggctctcccttccctctcttccccactcccccgccttgggcttcctgggatggctcccaaataaacctcttgcacccag

SEQ ID NO: 26041 - protein, 181 aa, Homo sapiens; identical to SEQ ID NO: 26027

SEQ ID NO: 26042 - DNA, 2633 bp, Homo sapiens
gacagggtctcactctgttgcccaagctggggtgcagtggcacgatcttggctcactgtagccttgacatcctgggctcaagggatcctcccatctcagcctcccaagtagctgcgactatgggtgtgacaccacgctgggctagtttttcaattttttgtagagatggagtctccctatgttgctcaggccggttgcaaactcctgggctcaagtgattctcctgcctcagcctcccaaagtgctgggattacagatgatagccacctcacccggcccacccctaccttctgaaagaggcattcttattcttattcccattttgcagatcaggaaacagagctcagtgcagcccactaaattgctcagggccctacagctaacaagcggcagaggcaggatctgcactcaggagctgcttggagatgctgctgtggccactgctgctgctgctgctgctgctgccaacattggccctgctcaggcagcagcggtcccaggatgccaggctgtcctggcttgctggcctccagcaccgagtggcatggggggccctggtctgggcagccacctggcagcggcggaggctggagcagagcacgctccatgtgcaccagagccagcagcaggccctgaggtggtgtctacagggagcccagcgcccccactgttccctcagaaggagcacagacataagcaccttccggaatcatctccctctgaccaaggccagccagacccagcaggaagacagtggagagcagccactgcccccgacctcaaaccaggaccttggggaggcctctctgcaggccaccttgctgggtctggcagccctaaacaaggcctacccagaagtgctggctcagggacgcactgcccgtgtgacgcttacatccccttggccccgacccctgccttggcctgggaataccctgggccaggtgggcacccctggaaccaaggaccctagggccctgctgctggacgcactgaggtccccagggctgagggcactggaggctgggacggctgtcgaacttctggatgttttcttgggcctggagactgatggtgaagagctagctggggcgatagctgccgggaaccctggagcgcctctccgtgaacgggcagctgagctccgggaggccctagagcaggggccacggggactggcccttcggctctggccaaagctgcaggtggtggtgactctggatgcaggaggccaggccgaggctgtggctgccctcggggccttgtggtgccaaggactagccttcttctctcctgcttatgctgcctcgggaggggtgctgggcctaaacctacagccagagcagccccatgggctctaccttctgccccctggggccccctttatcgagctgctcccagtcaaggaaggcacccaggaggaagctgcctccaccctccttttggccgaggcccagcagggcaaggagtatgagctggtgctgacggaccgcgccagcctcaccaggtgccgcctgggtgatgtggtgcgagtggttggtgcctacaatcagtgtccagtcgtcaggttcatctgcaggctggaccagaccctgagtgtgcgaggggaagatattggtgaagacctgttctctgaggccctgggccgggcagtggggcagtgggcgggggccaagctgctggaccatggctgtgtggagagcagcattctggattcctctgcgggctctgctccccactacgaggtgtttgtggcgctgagggggctgaggaatctgtcagaggaaaatcgagacaagctggaccactgccttcaggaagcctctccccgctacaagtccctgcggttctggggcagcgtgggccctgccagagtccacctggtggggcagggagccttccgagcactccgggcagccctcgctgcctgcccctcctcccccttcccccctgcgatgccccgggtccttcggcacaggcacctggcccagtgtctgcaggagagggtggtgtcctgagtcaagtcctgccccaccgcccagctccccccagaggccacctcgcccctccctctgggacctctccggatggggagtccttggccagggtctctgactctgtgtcacctgacatttgcccatgagagccgctgggccttagagaggccttggcccagctgaccggttctgaagtatgggcctccggggttagcagatgccagcagtgcctgcccgtgtccccatgtcccggcatgaaggacactgctagagagttaccatgcacaccgatggtttcctgtatcacagcccaaagaggttctctggtggccacagctgtgtgctcagtcagtgcactgggcaagctagaagtgttggggggttaatgtccccaggagcagcaaccctgagtcaataaggagcaggacctcagcttcattgtccttgagcaggacaattctgaagtgtattctacataaactctcagaggatgcccagcaggatggagtcccagttgcccgcagcagtaacccactcattcatgtacttcctgcgggggctctcccttccctctcttccccactcccccgccttgggcttcctgggatggctcccaaataaacctcttgcacccag

SEQ ID NO: 26043 - protein, 530 aa, Homo sapiens; identical to SEQ ID NO: 3471

SEQ ID NO: 26044 - DNA, 2215 bp, Homo sapiens
ggatgtgtgctgagacccagagtcacccaggggtctccgtcacgtgccaggagtaggcagaagtgggctgtgacagatcaggaaacagagctcagtgcagcccactaaattgctcagggccctacagctaacaagcggcagaggcaggatctgcactcaggagctgcttggagatgctgctgtggccactgctgctgctgctgctgctgctgccaacattggccctgctcaggcagcagcgcgcccccactgttccctcagaaggagcacagacataagcaccttccggaatcatctccctctgaccaaggccagccagacccagcaggaagacagtggagagcagccactgcccccgacctcaaaccaggaccttggggaggcctctctgcaggccaccttgctgggtctggcagccctaaacaaggcctacccagaagtgctggctcagggacgcactgcccgtgtgacgcttacatccccttggccccgacccctgccttggcctgggaataccctgggccaggtgggcacccctggaaccaaggaccctagggccctgctgctggacgcactgaggtccccagggctgagggcactggaggctgggacggctgtcgaacttctggatgttttcttgggcctggagactgatggtgaagagctagctggggcgatagctgccgggaaccctggagcgcctctccgtgaacgggcagctgagctccgggaggccctagagcaggggccacggggactggcccttcggctctggccaaagctgcaggtggtggtgactctggatgcaggaggccaggccgaggctgtggctgccctcggggccttgtggtgccaaggactagccttcttctctcctgcttatgctgcctcgggaggggtgctgggcctaaacctacagccagagcagccccatgggctctaccttctgccccctggggccccctttatcgagctgctcccagtcaaggaaggcacccaggaggaagctgcctccaccctccttttggccgaggcccagcagggcaaggagtatgagctggtgctgacggaccgcgccagcctcaccaggtgccgcctgggtgatgtggtgcgagtggttggtgcctacaatcagtgtccagtcgtcaggttcatctgcaggctggaccagaccctgagtgtgcgaggggaagatattggtgaagacctgttctctgaggccctgggccgggcagtggggcagtgggcgggggccaagctgctggaccatggctgtgtggagagcagcattctggattcctctgcgggctctgctccccactacgaggtgtttgtggcgctgagggggctgaggaatctgtcagaggaaaatcgagacaagctggaccactgccttcaggaagcctctccccgctacaagtccctgcggttctggggcagcgtgggccctgccagagtccacctggtggggcagggagccttccgagcactccgggcagccctcgctgcctgcccctcctcccccttcccccctgcgatgccccgggtccttcggcacaggcacctggcccagtgtctgcaggagagggtggtgtcctgagtcaagtcctgccccaccgcccagctccccccagaggccacctcgcccctccctctgggacctctccggatggggagtccttggccagggtctctgactctgtgtcacctgacatttgcccatgagagccgctgggccttagagaggccttggcccagctgaccggttctgaagtatgggcctccggggttagcagatgccagcagtgcctgcccgtgtccccatgtcccggcatgaaggacactgctagagagttaccatgcacaccgatggtttcctgtatcacagcccaaagaggttctctggtggccacagctgtgtgctcagtcagtgcactgggcaagctagaagtgttggggggttaatgtccccaggagcagcaaccctgagtcaataaggagcaggacctcagcttcattgtccttgagcaggacaattctgaagtgtattctacataaactctcagaggatgcccagcaggatggagtcccagttgcccgcagcagtaacccactcattcatgtacttcctgcgggggctctcccttccctctcttccccactcccccgccttgggcttcctgggatggctcccaaataaacctcttgcacccag

SEQ ID NO: 26045 - protein, 34 aa, Homo sapiens; identical to SEQ ID NO: 26031

SEQ ID NO: 26046 - DNA, 983 bp, Homo sapiens
aaagccatcgctccttctttctggccggatgtgtgctgagacccagagtcacccaggggtctccgtcacgtgccaggagtaggcagaagtgggctgtgacagatcaggaaacagagctcagtgcagcccactaaattgctcagggccctacagctaacaagcggcagaggcaggatctgcactcaggagctgcttggagatgctgctgtggccactgctgctgctgctgctgctgctgccaacattggccctgctcaggcagcagcggtcccaggatgccaggctgtcctggcttgctggcctccagcaccgagtggcatggggggccctggtctgggcagccacctggcagcggcggaggctggagcagagcacgctccatgtgcaccagagccagcagcaggccctgaggtggtgtctacagggagcccagcgcccccactgttccctcagaaggagcacagacataagcaccttccggaatcatctcctgggtctggcagccctaaacaaggcctacccagaactgaccggttctgaagtatgggcctccggggttagcagatgccagcagtgcctgcccgtgtccccatgtcccggcatgaaggacactgctagagagttaccatgcacaccgatggtttcctgtatcacagcccaaagaggttctctggtggccacagctgtgtgctcagtcagtgcactgggcaagctagaagtgttggggggttaatgtccccaggagcagcaaccctgagtcaataaggagcaggacctcagcttcattgtccttgagcaggacaattctgaagtgtattctacataaactctcagaggatgcccagcaggatggagtcccagttgcccgcagcagtaacccactcattcatgtacttcctgcgggggctctcccttccctctcttccccactcccccgccttgggcttcctgggatggctcccaaataaacctcttgcacccag

SEQ ID NO: 26047 - protein, 177 aa, Homo sapiens; identical to SEQ ID NO: 26033

SEQ ID NO: 26048 - DNA, 2503 bp, Homo sapiens
gccttttaaagccatcgctccttctttctggccggatgtgtgctgagacccagagtcacccaggggtctccgtcacgtgccaggagtaggcagaagtgggctgtgacagatcaggaaacagagctcagtgcagcccactaaattgctcagggccctacagctaacaagcggcagaggcaggatctgcactcaggagctgcttggagatgctgctgtggccactgctgctgctgctgctgctgctgccaacattggccctgctcaggcagcagcggtcccaggatgccaggctgtcctggcttgctggcctccagcaccgagtggcatggggggccctggtctgggcagccacctggcagcggcggaggctggagcagagcacgctccatgtgcaccagagccagcagcaggccctgaggtggtgtctacagggagcccagcgcccccactgttccctcagaaggagcacagacataagcaccttccggaatcatctccctctgaccaaggccagccagacccagcaggaagacagtggagagcagccactgcccccgacctcaaaccaggaccttggggaggcctctctgcaggccaccttgctgggtctggcagccctaaacaaggcctacccagaagtgctggctcagggacgcactgcccgtgtgacgcttacatccccttggccccgacccctgccttggcctgggaataccctgggccaggtgggcacccctggaaccaaggaccctagggccctgctgctggacgcactgaggtccccagggctgagggcactggaggctgggacggctgtcgaacttctggatgttttcttgggcctggagactgatggtgaagagctagctggggcgatagctgccgggaaccctggagcgcctctccgtgaacgggcagctgagctccgggaggccctagagcaggggccacggggactggcccttcggctctggccaaagctgcaggtggtggtgactctggatgcaggaggccaggccgaggctgtggctgccctcggggccttgtggtgccaaggactagccttcttctctcctgcttatgctgcctcgggaggggtgctgggcctaaacctacagccagagcagccccatgggctctaccttctgccccctggggccccctttatcgagctgctcccagtcaaggaaggcacccaggaggaagctgcctccaccctccttttggccgaggcccagcagggcaaggagtatgagctggtgctgacggaccgcgccagcctcaccaggtgccgcctgggtgatgtggtgcgagtggttggtgcctacaatcagtgtccagtcgtcaggttcatctgcaggctggaccagaccctgagtgtgcgaggggaagatattggtgaagacctgttctctgaggccctgggccgggcagtggggcagtgggcgggggccaagctgctggaccatggctgtgtggagagcagcattctggagtggggaagaacagatagggcagaggacactagacttggcagctgcccattcaccggaagtatgtgtgcacatggggtctattcacagattcctctgcgggctctgctccccactacgaggtgtttgtggcgctgagggggctgaggaatctgtcagaggaaaatcgagacaagctggaccactgccttcaggaagcctctccccgctacaagtccctgcggttctggggcagcgtgggccctgccagagtccacctggtggggcagggagccttccgagcactccgggcagccctcgctgcctgcccctcctcccccttcccccctgcgatgccccgggtccttcggcacaggcacctggcccagtgtctgcaggagagggtggtgtcctgagtcaagtcctgccccaccgcccagctccccccagaggccacctcgcccctccctctgggacctctccggatggggagtccttggccagggtctctgactctgtgtcacctgacatttgcccatgagagccgctgggccttagagaggccttggcccagctgaccggttctgaagtatgggcctccggggttagcagatgccagcagtgcctgcccgtgtccccatgtcccggcatgaaggacactgctagagagttaccatgcacaccgatggtttcctgtatcacagcccaaagaggttctctggtggccacagctgtgtgctcagtcagtgcactgggcaagctagaagtgttggggggttaatgtccccaggagcagcaaccctgagtcaataaggagcaggacctcagcttcattgtccttgagcaggacaattctgaagtgtattctacataaactctcagaggatgcccagcaggatggagtcccagttgcccgcagcagtaacccactcattcatgtacttcctgcgggggctctcccttccctctcttccccactcccccgccttgggcttcctgggatggctcccaaataaacctcttgcacccag

SEQ ID NO: 26049 - protein, 474 aa, Homo sapiens; identical to SEQ ID NO: 26035

SEQ ID NO: 26050 - DNA, 2414 bp, Homo sapiens
gccttttaaagccatcgctccttctttctggccggatgtgtgctgagacccagagtcacccaggggtctccgtcacgtgccaggagtaggcagaagtgggctgtgacagatcaggaaacagagctcagtgcagcccactaaattgctcagggccctacagctaacaagcggcagaggcaggatctgcactcaggagctgcttggagatgctgctgtggccactgctgctgctgctgctgctgctgccaacattggccctgctcaggcagcagcggtcccaggatgccaggctgtcctggcttgctggcctccagcaccgagtggcatggggggccctggtctgggcagccacctggcagcggcggaggctggagcagagcacgctccatgtgcaccagagccagcagcaggccctgaggtggtgtctacagggagcccagcgcccccactgttccctcagaaggagcacagacataagcaccttccggaatcatctccctctgaccaaggccagccagacccagcaggaagacagtggagagcagccactgcccccgacctcaaaccaggaccttggggaggcctctctgcaggccaccttgctgggtctggcagccctaaacaaggcctacccagaagtgctggctcagggacgcactgcccgtgtgacgcttacatccccttggccccgacccctgccttggcctgggaataccctgggccaggtgggcacccctggaaccaaggaccctagggccctgctgctggacgcactgaggtccccagggctgagggcactggaggctgggacggctgtcgaacttctggatgttttcttgggcctggagactgatggtgaagagctagctggggcgatagctgccgggaaccctggagcgcctctccgtgaacgggcagctgagctccgggaggccctagagcaggggccacggggactggcccttcggctctggccaaagctgcaggtggtggtgactctggatgcaggaggccaggccgaggctgtggctgccctcggggccttgtggtgccaaggactagccttcttctctcctgcttatgctgcctcgggaggggtgctgggcctaaacctacagccagagcagccccatgggctctaccttctgccccctggggccccctttatcgagctgctcccagtcaaggaaggcacccaggaggaagctgcctccaccctccttttggccgaggcccagcagggcaaggagtatgagctggtgctgacggaccgcgccagcctcaccaggtgccgcctgggtgatgtggtgcgagtggttggtgcctacaatcagtgtccagtcgtcaggttcatctgcaggctggaccagaccctgagtgtgcgaggggaagatattggtgaagacctgttctctgaggccctgggccgggcagtggggcagtgggcgggggccaagctgctggaccatggctgtgtggagagcagcattctggattcctctgcgggctctgctccccactacgaggtgtttgtggcgctgagggggctgaggaatctgtcagaggaaaatcgagacaagctggaccactgccttcaggaagcctctccccgctacaagtccctgcggttctggggcagcgtgggccctgccagagtccacctggtggggcagggagccttccgagcactccgggcagccctcgctgcctgcccctcctcccccttcccccctgcgatgccccgggtccttcggcacaggcacctggcccagtgtctgcaggagagggtggtgtcctgagtcaagtcctgccccaccgcccagctccccccagaggccacctcgcccctccctctgggacctctccggatggggagtccttggccagggtctctgactctgtgtcacctgacatttgcccatgagagccgctgggccttagagaggccttggcccagctgaccggttctgaagtatgggcctccggggttagcagatgccagcagtgcctgcccgtgtccccatgtcccggcatgaaggacactgctagagagttaccatgcacaccgatggtttcctgtatcacagcccaaagaggttctctggtggccacagctgtgtgctcagtcagtgcactgggcaagctagaagtgttggggggttaatgtccccaggagcagcaaccctgagtcaataaggagcaggacctcagcttcattgtccttgagcaggacaattctgaagtgtattctacataaactctcagaggatgcccagcaggatggagtcccagttgcccgcagcagtaacccactcattcatgtacttcctgcgggggctctcccttccctctcttccccactcccccgccttgggcttcctgggatggctcccaaataaacctcttgcacccag

SEQ ID NO: 26051 - protein, 530 aa, Homo sapiens; identical to SEQ ID NO: 3471

SEQ ID NO: 26052 - DNA, 2295 bp, Homo sapiens
gccggatttcccagttggggcccagccttttaaagccatcgctccttctttctggccggatgtgtgctgagacccagagtcacccaggggtctccgtcacgtgccaggagtaggcagaagtgggctgtgacagatcaggaaacagagctcagtgcagcccactaaattgctcagggccctacagctaacaagcggcagaggcaggatctgcactcaggagctgcttggagatgctgctgtggccactgctgctgctgctgctgctgctgccaacattggccctgctcaggcagcagcggtcccaggatgccaggctgtcctggcttgctggcctccagcaccgagtggcatggggggccctggtctgggcagccacctggcagcggcggaggctggagcagagcacgctccatgtgcaccagagccagcagcaggccctgaggtggtgtctacagggagcccagcgcccccactgttccctcagaaggagcacagacataagcaccttccggaatcatctccctctgaccaaggccagccagacccagcaggaagacagtggagagcagccactgcccccgacctcaaaccaggactgagggcactggaggctgggacggctgtcgaacttctggatgttttcttgggcctggagactgatggtgaagagctagctggggcgatagctgccgggaaccctggagcgcctctccgtgaacgggcagctgagctccgggaggccctagagcaggggccacggggactggcccttcggctctggccaaagctgcaggtggtggtgactctggatgcaggaggccaggccgaggctgtggctgccctcggggccttgtggtgccaaggactagccttcttctctcctgcttatgctgcctcgggaggggtgctgggcctaaacctacagccagagcagccccatgggctctaccttctgccccctggggccccctttatcgagctgctcccagtcaaggaaggcacccaggaggaagctgcctccaccctccttttggccgaggcccagcagggcaaggagtatgagctggtgctgacggaccgcgccagcctcaccaggtgccgcctgggtgatgtggtgcgagtggttggtgcctacaatcagtgtccagtcgtcaggttcatctgcaggtaggtgaccccggggagctgaagggccatccttgtgtcctgggctccactgcctctcccttcctcctcttcaggctggaccagaccctgagtgtgcgaggggaagatattggtgaagacctgttctctgaggccctgggccgggcagtggggcagtgggcgggggccaagctgctggaccatggctgtgtggagagcagcattctggattcctctgcgggctctgctccccactacgaggtgtttgtggcgctgagggggctgaggaatctgtcagaggaaaatcgagacaagctggaccactgccttcaggaagcctctccccgctacaagtccctgcggttctggggcagcgtgggccctgccagagtccacctggtggggcagggagccttccgagcactccgggcagccctcgctgcctgcccctcctcccccttcccccctgcgatgccccgggtccttcggcacaggcacctggcccagtgtctgcaggagagggtggtgtcctgagtcaagtcctgccccaccgcccagctccccccagaggccacctcgcccctccctctgggacctctccggatggggagtccttggccagggtctctgactctgtgtcacctgacatttgcccatgagagccgctgggccttagagaggccttggcccagctgaccggttctgaagtatgggcctccggggttagcagatgccagcagtgcctgcccgtgtccccatgtcccggcatgaaggacactgctagagagttaccatgcacaccgatggtttcctgtatcacagcccaaagaggttctctggtggccacagctgtgtgctcagtcagtgcactgggcaagctagaagtgttggggggttaatgtccccaggagcagcaaccctgagtcaataaggagcaggacctcagcttcattgtccttgagcaggacaattctgaagtgtattctacataaactctcagaggatgcccagcaggatggagtcccagttgcccgcagcagtaacccactcattcatgtacttcctgcgggggctctcccttccctctcttccccactcccccgccttgggcttcctgggatggctcccaaataaacctcttgcacccag

SEQ ID NO: 26053 - protein, 273 aa, Homo sapiens; identical to SEQ ID NO: 26037

SEQ ID NO: 26054 - DNA, 585 bp, Homo sapiens
cactcgggagtgggcaagagatatcgttacgcagctgctgtgtgcccgaccgaccctgtccgaaacccttcctatcaggaaacagagctcagtgcagcccactaaattgctcagggccctacagctaacaagcggcagaggcaggatctgcactcaggagctgcttggagatgctgctgtggccactgctgctgctgctgctgctgctgccaacattggccctgctcaggcagcagcggtcccaggatgccaggctgtcctggcttgctggcctccagcaccgagtggcatggggggccctggtctgggcagccacctggcagcggcggaggctggagcagagcacgctccatgtgcaccagagccagcagcaggccctgaggtggtgtctacagggagcccagcgcccccactgttccctcagaaggagcacagggtctcaccagtcttgcctgaaactcttgggaaactggcttcctgaggcgtttctgttgtcattggggctatagacataagcaccttccggaatcatctccctctgaccaaggccagccagacccagcaggaagacagtggagagcagcc

SEQ ID NO: 26055 - protein, 112 aa, Homo sapiens
MLLWPLLLLLLLLPTLALLRQQRSQDARLSWLAGLQHRVAWGALVWAATWQRRRLEQSTLHVHQSQQQALRWCLQGAQRPHCSLRRSTGSHQSCLKLLGNWLPEAFLLSLGL

SEQ ID NO: 26056 - DNA, 5159 bp, Homo sapiens
gcggcgcgcgtccctgggcctccgcgcgtgagcggcgcgcgcgcccccgcgggccccggcgggaggagagtcggcggccggagccgtcaccccgggcggggacccagcgcaggcaactccgcgcggcggcccggccgagggagggagcgagcgggcgggcgggcaagccagacagctgggccggagcagccgcgggcgcccgaggggccgagcgagattgtaaaccatggctgtgtggatacaagctcagcagctccaaggagaagcccttcatcagatgcaagcgttatatggccagcattttcccattgaggtgcggcattatttatcccagtggattgaaagccaagcatgggactcagtagatcttgataatccacaggagaacattaaggccacccagctcctggagggcctggtgcaggagctgcagaagaaggcagagcaccaggtgggggaagatgggtttttactgaagatcaagctggggcactatgccacacagctccagaacacgtatgaccgctgccccatggagctggtccgctgcatccgccatatattgtacaatgaacagaggttggtccgagaagccaacaatggtagctctccagctggaagccttgctgatgccatgtcccagaaacacctccagatcaaccagacgtttgaggagctgcgactggtcacgcaggacacagagaatgagttaaaaaagctgcagcagactcaggagtacttcatcatccagtaccaggagagcctgaggatccaagctcagtttggcccgctggcccagctgagcccccaggagcgtctgagccgggagacggccctccagcagaagcaggtgtctctggaggcctggttgcagcgtgaggcacagacactgcagcagtaccgcgtggagctggccgagaagcaccagaagaccctgcagctgctgcggaagcagcagaccatcatcctggatgacgagctgatccagtggaagcggcggcagcagctggccgggaacggcgggccccccgagggcagcctggacgtgctacagtcctggtgtgagaagttggccgagatcatctggcagaaccggcagcagatccgcagggctgagcacctctgccagcagctgcccatccccggcccagtggaggagatgctggccgaggtcaacgccaccatcacggacattatctcagccctggtgaccagcacgttcatcattgagaagcagcctcctcaggtcctgaagacccagaccaagtttgcagccactgtgcgcctgctggtgggcgggaagctgaacgtgcacatgaaccccccccaggtgaaggccaccatcatcagtgagcagcaggccaagtctctgctcaagaacgagaacacccgcaatgattacagtggcgagatcttgaacaactgctgcgtcatggagtaccaccaagccacaggcacccttagtgcccacttcaggaatatgtccctgaaacgaattaagaggtcagaccgtcgtggggcagagtcggtgacagaagaaaaatttacaatcctgtttgaatcccagttcagtgttggtggaaatgagctggtttttcaagtcaagaccctgtccctgccagtggtggtgatcgttcatggcagccaggacaacaatgcgacggccactgttctctgggacaatgcttttgcagagcctggcagggtgccatttgccgtgcctgacaaagtgctgtggccacagctgtgtgaggcgctcaacatgaaattcaaggccgaagtgcagagcaaccggggcctgaccaaggagaacctcgtgttcctggcgcagaaactgttcaacaacagcagcagccacctggaggactacagtggcctgtctgtgtcctggtcccagttcaacagggagaatttaccaggacggaattacactttctggcaatggtttgacggtgtgatggaagtgttaaaaaaacatctcaagcctcattggaatgatggggccattttggggtttgtaaacaagcaacaggcccatgacctactcattaacaagccagatgggaccttcctcctgagattcagtgactcagaaattggcggcatcaccattgcttggaagtttgattctcaggaaagaatgttttggaatctgatgccttttaccaccagagacttctccattcggtccctagccgaccgcttgggagacttgaattaccttatctacgtgtttcctgatcggccaaaagatgaagtatactccaaatactacacaccagttccctgcgagtctgctactgctaaagctgttgatggatacgtgaagccacagatcaagcaagtggtccctgagtttgtgaacgcatctgcagatgccgggggcggcagcgccacgtacatggaccaggccccctccccagctgtgtgtccccaggctcactataacatgtacccacagaaccctgactcagtccttgacaccgatggggacttcgatctggaggacacaatggacgtagcgcggcgtgtggaggagctcctgggccggccaatggacagtcagtggatcccgcacgcacaatcgtgaccccgcgacctctccatcttcagcttcttcatcttcaccagaggaatcactcttgtggatgttttaattccatgaatcgcttctcttttgaaacaatactcataatgtgaagtgttaatactagttgtgaccttagtgtttctgtgcatggtggcaccagcgaagggagtgcgagtatgtgtttgtgtgtgtgtgtgtgtgtgtgtgtgtgtgcgtgtttgcacgttatggtgtttctccctctcactgtctgagagtttagttgtagcagaggggccacagacagaagctgtggtggtttttactttgtgcaaaaaggcagtgagtttcgtgaagcctggaagttggccatgtgtcttaagagtggctggactttgacatgtggctgtttgaataagagaaggacaaagggaggagaaagcacatgtgctccagtgagtcttcgtcactctgtctgccaagcaattgatatataaccgtgattgtctctgcttttcttctgaaatgtagataactgctttttgacaaagagagccttccctctcccccacccctgtgttcttgggtaggaatgggaaaaggggcaacctacaaagattgttggggcaagggaagtcacaagctttcggatgggcggtggcttttcacaaaacatttagctcatcttattctctctttgtcctctctcccctcctgcccgcccgcaccctggaattgccactcagttcctctgggtgtgcacatatgtttggagaaatagaggagagaaaagagggccacgtaactgagagcttacagtgccaatgccgtttgtgttctggccagagtggagtgcgcagccctgactcccaggcgctgagattgttgcctggttacccaggaagctgctgttccggctgcccagcctttctctgagccagcggatgcacagtccgtggccttcttcaggcttattgatgatgctttttgcaaatgttgaatcatggttctgtttctaagttggatcttttttgttttctccttgccaccctaatttgacatcaaaattctctcttgtgcattgggccctgggtcattcaaacccaggtcacctcattccccttctctgttcacacctaatgtcttgaagagtaggtagcagcagtgtgggctgaacctaggccagcttgcttagcgggtcaccctgctgtgaagtcctggcaggtgttggtaatgtgtggaaatgcagtcagcaagtttgctggggagtttgataaaagtataaaacaaaacaaaaaaagcctcggtataattttgttccacgacttcttctgtagctttacaccagaaggaaggaatgggctacagcaggtagtggaggaagaggggggtgagcaggtgtattaaaatagcttacgggtaaggcctaaaaggtcacccctcggccccctctccaaaagaagggcatgggcacccccaggagaggatggccccaaaaaccttatttttatacatgagagtaaataaacatattttttttacaaaaataacttctgaatttatcagtgttttgccgttaaaaatattcctctatagtaaattatttattggaagatgacttttttaaagctgccgtttgccttggcttggtttcatacactgatttatttttctatgccaggcagtagagtctctctgcctctgaggagcaggctacccgcatcccactcagcccctccctacccctcaagatttgatgaaaattccaaccatgaggatgggtgcatcggggaagggtgagaaggagagcctgcctgctcagggatccaggctcgtagagtcactccctgcccgtctcccagagatgcttcaccagcacctgcctctgagacctcgctctctgttccagcaaccctggttggggggtcagacttgatacactttcaggttgggagtggacccaccccagggcctgctgaggacagagcagccaggccgtcctggctcactttgcagttggcactgggttggggaggaagagagctgatgagtgtggcttccctgagctggggtttccctgcttgtccagttgtgagctgtcctcggtgttaccgaggctgtgcctagagagtggagatttttgatgaaaggtgtgctcgctctctgcgttctatcttctctctcctccttgttcctgcaaaccacaagataaaggtagtggtgtgtctcgaccccatcagcctctcacccactcccagacacacacaagtcctcaaaagtttcagctccgtgtgtgagatgtgcaggttttttctagggggtagggggagactaaaatcgaatataacttaaaatgaaagtatactttttataatttttctttttaaaacttggtgaaattatttcagatacatattttagtgtcaaggcagattagttatttagccaccaaaaaaaagtattgtgtacaatttggggcctcaaatttgactctgcctcaaaaaaaagaaatatatcctatgcagagttacagtcacaaagttgtgtattttatgttacaataaagccttcctctgaagggatggtattg

SEQ ID NO: 26057 - protein, 787 aa, Homo sapiens; identical to SEQ ID NO: 3473

SEQ ID NO: 26058 - DNA, 1888 bp, Homo sapiens
gcggcgcgcgtccctgggcctccgcgcgtgagcggcgcgcgcgcccccgcgggccccggcgggaggagagtcggcggccggagccgtcaccccgggcggggacccagcgcaggcaactccgcgcggcggcccggccgagggagggagcgagcgggcgggcgggcaagccagacagctgggccggagcagccgcgggcgcccgaggggccgagcgagattgtaaaccatggctgtgtggatacaagctcagcagctccaaggagaagcccttcatcagatgcaagcgttatatggccagcattttcccattgaggtgcggcattatttatcccagtggattgaaagccaagcatgggactcagtagatcttgataatccacaggagaacattaaggccacccagctcctggagggcctggtgcaggagctgcagaagaaggcagagcaccaggtgggggaagatgggtttttactgaagatcaagctggggcactatgccacacagctccagaacacgtatgaccgctgccccatggagctggtccgctgcatccgccatatattgtacaatgaacagaggttggtccgagaagccaacaatggtagctctccagctggaagccttgctgatgccatgtcccagaaacacctccagatcaaccagacgtttgaggagctgcgactggtcacgcaggacacagagaatgagttaaaaaagctgcagcagactcaggagtacttcatcatccagtaccaggagagcctgaggatccaagctcagtttggcccgctggcccagctgagcccccaggagcgtctgagccgggagacggccctccagcagaagcaggtgtctctggaggcctggttgcagcgtgaggcacagacactgcagcagtaccgcgtggagctggccgagaagcaccagaagaccctgcagctgctgcggaagcagcagaccatcatcctggatgacgagctgatccagtggaagcggcggcagcagctggccgggaacggcgggccccccgagggcagcctggacgtgctacagtcctggtgtgagaagttggccgagatcatctggcagaaccggcagcagatccgcagggctgagcacctctgccagcagctgcccatccccggcccagtggaggagatgctggccgaggtcaacgccaccatcacggacattatctcagccctggtgaccagcacgttcatcattgagaagcagcctcctcaggtcctgaagacccagaccaagtttgcagccactgtgcgcctgctggtgggcgggaagctgaacgtgcacatgaaccccccccaggtgaaggccaccatcatcagtgagcagcaggccaagtctctgctcaagaacgagaacacccgcaagtaattgtgcagcttcctctcattccctgctacttgtctcatgtcctggcaacaggaaaaaaagaattctgcctcctgtgtcagatccctgtttgcccttctggcctcttctgggcatcagcaaaggaatataaggaagttcttgggcctggtgtggtggctcacacctgtaatccaagcactttaagaggccgaggtgggcagatcacctgaggtcaggagttcaagaccagcctggccaacatggtgaaaccctgtctctactaaaaatacaaaaaattagccgggcgtggtggcaggcacctgtaatcccagccactagagagcctgaggcaggagaatcccttgaacctgggaggcagagattgcagtgagctgagattgcagtgagctgagatcacgccactgcactccagcctgggcaacaagagcaaaactccgtcacaaaaaaaaaaaaaaaagttctcttaggaactgttttctgtgaagatag

SEQ ID NO: 26059 - protein, 390 aa, Homo sapiens
MAVWIQAQQLQGEALHQMQALYGQHFPIEVRHYLSQWIESQAWDSVDLDNPQENIKATQLLEGLVQELQKKAEHQVGEDGFLLKIKLGHYATQLQNTYDRCPMELVRCIRHILYNEQRLVREANNGSSPAGSLADAMSQKHLQINQTFEELRLVTQDTENELKKLQQTQEYFIIQYQESLRIQAQFGPLAQLSPQERLSRETALQQKQVSLEAWLQREAQTLQQYRVELAEKHQKTLQLLRKQQTIILDDELIQWKRRQQLAGNGGPPEGSLDVLQSWCEKLAEIIWQNRQQIRRAEHLCQQLPIPGPVEEMLAEVNATITDIISALVTSTFIIEKQPPQVLKTQTKFAATVRLLVGGKLNVHMNPPQVKATIISEQQAKSLLKNENTRK

SEQ ID NO: 26060 - DNA, 581 bp, Homo sapiens
cagcattttcccattgaggtgcggcattatttatcccagtggattgaaagccaagcatgggactcagtagatcttgataatccacaggagaacattaaggccacccagctcctggagggcctggtgcaggagctgcagaagaaggcagagcaccaggtgggggaagatgggtttttactgaagatcaagctggggcactatgccacacagctccagaacacgtatgaccgctgccccatggagctggtccgctgcatccgccatatattgtacaatgaacagaggttggtccgagaagccaacaatgtgagtgtcccatagggatggggagggcagtcgggaagtcttttcttacccacctccctctggacccacctttgtcaaggtgactcagggtgcactattggtgtctctttaaagagagcttcatcctaaggggcacaaaagaaataggagacttgactgagtgcagcccagcactttgggaggctgaggcaggcagattgcctgagcccaggagttcgagagcaccctgggcaacatgatgaaaccccgtctctaccaaaaatacaaaaaaatta

SEQ ID NO: 26061 - protein, 36 aa, Homo sapiens
MPHSSRTRMTAAPWSWSAASAIYCTMNRGWSEKPTM

SEQ ID NO: 26062 - DNA, 496 bp, Homo sapiens
ggcatcctttggttgtgcttgaaggtttgtcttcttagtgctaaccctcagggaagggagtcttatttaaagcctttttttttggattgtcaaataatctttttgtattcatttgtgaattgcattttatgataattcattttgtggctcgtgttataaaggagttaaactgcaggtatcactgtcaggagaaactcatttgactagctgatgatttttttttttttttttttgagacagagtttcccttgcactccagcatgggtgacagggtgagaccctgtctcaaaaaaaaaaattatattttctatcctcttcccctttttgttatgtgttttacagtcttttctccatgtctaatctaagaaacttatatattcattgtatatatatctactggttgtcagcattgaaccttgcctgtgccctagcatgttgcagaatgactgacttgactttattttgagaataagttcaaaatttattctttttttat

SEQ ID NO: 26063 - protein, 37 aa, Homo sapiens
MSNLRNLYIHCIYIYWLSALNLACALACCRMTDLTLF

SEQ ID NO: 26064 - DNA, 685 bp, Homo sapiens
cggaataagaatctagtatccagttctcactatacatagctttccctcactttctatcagaaatgagataggagtcccaccttcctggcatcagaaacagatcaccaatcctgcaaacaaattcacagggctggaaaaccccagtgaaggcttttaaaactcatcagacatagaaaaaaagaagcagctttaattgtaggatctcactgacacaaacataaggaaattctgagttatagatacctcacattaagctttttccactgacattgtaacttctgtcaacattcaaagaaaattcaaccctggtcaaaggtgacagttgacaatcctggaagctaacatcctctgtttatttgaacaagtttatactctgcacagggaattgaagttcttcttgtctgtgacttgatctcccaaagttaaagcactacgctttagggttgtgaattctgtttccaagacttaacttcacaatccactcccaaggaaaagtgctgagagaaagtaagcatcataaatgaaaaaaaaaaaaaaatctgagactattttctaatggcctttgcagagctctagacatacaatagttcagttgccttaaaaattcgcccaaataggctgggcatggtggcttatgcctgtaatcccagcacttcggaaggccaaggcaggaggatcacctgag

SEQ ID NO: 26065 - protein, 46 aa, Homo sapiens
YPVLTIHSFPSLSIRNEIGVPPSWHQKQITNPANKFTGLENPSEGF

SEQ ID NO: 26066 - DNA, 615 bp, Homo sapiens
acatttttattttaaacttatacagacaaacatcagatgccatgtggtttgtctctgaccctttgcgctacttcatgacagctttactgagtgaagcctgaatacccaatcgggaaggcaagatgttcttgtcttttcccaactctcttcaaagtttaacagccttggaaggagtcttagaacagcaacaaaagcacaatttacagaaaaatggaggtgctgctatctgtttcctcgcaggtttattcttaataactatgtccattttcacatggatgacaccactgagatgatgaatacctgtattgattgattgatgaagaacatttatctttttctacctacttttggaagctagcttgcaaaatctactgcaacattcactcttcatgtatccttctattacctttggtaccctgaataaccttttaaaaatttttgtacttttctaatatgaagagaagtagcttcatattctatgctagttttctgaggtgcttgtgctgactcattttttaaattatactaagatatagagcatggtttgagagcagtaatgagattctcagaaaatatgaaaactttcctttctgactagttagagaaaggttgggg

SEQ ID NO: 26067 - protein, 56 aa, Homo sapiens
MFLSFPNSLQSLTALEGVLEQQQKHNLQKNGGAAICFLAGLFLITMSIFTWMTPLR

SEQ ID NO: 26068 - DNA, 4298 bp, Homo sapiens
agacaggatattcactgctgtggcaaggcctgtagagagtttcgaagttaggaggactcaagacggtccctccctggacttttctgaaggggctcaaaagatgacacgcgccagagctggaaggcgtcgccaattggtccacttttccctcctccctttttgcggatgagaaaactgaggcccaggtttgggatttccagagcccgggatttcccggcaacgcccgacaaccacattcccccggctattctgacccgccccggttccgggacgctccctgggagccgccgccgagggcctgctgggactcccgggggaccccgccgtcggggcagcccccacgcccggcgccgcccgccgggaacggccgccgctgttgcgcacttgcaggggagccggcgactgagggcgaggcagggagggagcaagcggggctgggagggctgctggcgcgggctcgcgcgctgtgtatggtctatcgcaggcagctgacctttgaggaggaaatcgctgctctccgctccttcctgtagtaacagccgccgctgccgccgccgccaggaaccccggccgggagcgagagccgcggggcgcagagccggcccggctgccggacggtgcggccccaccaggtgaacggccatggcgggctggatccaggcccagcagctgcagggagacgcgctgcgccagatgcaggtgctgtacggccagcacttccccatcgaggtccggcactacttggcccagtggattgagagccagccatgggatgccattgacttggacaatccccaggacagagcccaagccacccagctcctggagggcctggtgcaggagctgcagaagaaggcggagcaccaggtgggggaagatgggtttttactgaagatcaagctggggcactacgccacgcagctccagaaaacatatgaccgctgccccctggagctggtccgctgcatccggcacattctgtacaatgaacagaggctggtccgagaagccaacaattgcagctctccggctgggatcctggttgacgccatgtcccagaagcaccttcagatcaaccagacatttgaggagctgcgactggtcacgcaggacacagagaatgagctgaagaaactgcagcagactcaggagtacttcatcatccagtaccaggagagcctgaggatccaagctcagtttgcccagctggcccagctgagcccccaggagcgtctgagccgggagacggccctccagcagaagcaggtgtctctggaggcctggttgcagcgtgaggcacagacactgcagcagtaccgcgtggagctggccgagaagcaccagaagaccctgcagctgctgcggaagcagcagaccatcatcctggatgacgagctgatccagtggaagcggcggcagcagctggccgggaacggcgggccccccgagggcagcctggacgtgctacagtcctggtgtgagaagttggccgagatcatctggcagaaccggcagcagatccgcagggctgagcacctctgccagcagctgcccatccccggcccagtggaggagatgctggccgaggtcaacgccaccatcacggacattatctcagccctggtgaccagcacattcatcattgagaagcagcctcctcaggtcctgaagacccagaccaagtttgcagccaccgtacgcctgctggtgggcgggaagctgaacgtgcacatgaatcccccccaggtgaaggccaccatcatcagtgagcagcaggccaagtctctgcttaaaaatgagaacacccgcaacgagtgcagtggtgagatcctgaacaactgctgcgtgatggagtaccaccaagccacgggcaccctcagtgcccacttcaggaacatgtcactgaagaggatcaagcgtgctgaccggcggggtgcagagtccgtgacagaggagaagttcacagtcctgtttgagtctcagttcagtgttggcagcaatgagcttgtgttccaggtgaagactctgtccctacctgtggttgtcatcgtccacggcagccaggaccacaatgccacggctactgtgctgtgggacaatgcctttgctgagccgggcagggtgccatttgccgtgcctgacaaagtgctgtggccgcagctgtgtgaggcgctcaacatgaaattcaaggccgaagtgcagagcaaccggggcctgaccaaggagaacctcgtgttcctggcgcagaaactgttcaacaacagcagcagccacctggaggactacagtggcctgtccgtgtcctggtcccagttcaacagggagaacttgccgggctggaactacaccttctggcagtggtttgacggggtgatggaggtgttgaagaagcaccacaagccccactggaatgatggggccatcctaggttttgtgaataagcaacaggcccacgacctgctcatcaacaagcccgacgggaccttcttgttgcgctttagtgactcagaaatcgggggcatcaccatcgcctggaagtttgactccccggaacgcaacctgtggaacctgaaaccattcaccacgcgggatttctccatcaggtccctggctgaccggctgggggacctgagctatctcatctatgtgtttcctgaccgccccaaggatgaggtcttctccaagtactacactcctgtgctggctaaagctgttgatggatatgtgaaaccacagatcaagcaagtggtccctgagtttgtgaatgcatctgcagatgctgggggcagcagcgccacgtacatggaccaggccccctccccagctgtgtgcccccaggctccctataacatgtacccacagaaccctgaccatgtactcgatcaggatggagaattcgacctggatgagaccatggatgtggccaggcacgtggaggaactcttacgccgaccaatggacagtcttgactcccgcctctcgccccctgccggtcttttcacctctgccagaggctccctctcatgaatgtttgaatcccacgcttctctttggaaacaatatgcaatgtgaagcggtcgtgttgtgagtttagtaaggctgtgtacactgacacctttgcaggcatgcatgtgcttgtgtgtgtgtgtgtgtgtgtgtccttgtgcatgagctacgcctgcctcccctgtgcagtcctgggatgtggctgcagcagcggtggcctcttttcagatcatggcatccaagagtgcgccgagtctgtctctgtcatggtagagaccgagcctctgtcactgcaggcactcaatgcagccagacctattcctcctgggcccctcatctgctcagcagctatttgaatgagatgattcagaaggggaggggagacaggtaacgtctgtaagctgaagtttcactccggagtgagaagctttgccctcctaagagagagagacagagagacagagagagagaaagagagagtgtgtgggtctatgtaaatgcatctgtcctcatgtgttgatgtaaccgattcatctctcagaagggaggctggggttcattttcgagtagtattttatactttagtgaacgtggactccagactctctgtgaaccctatgagagcgcgtctgggcccggccatgtccttagcacaggggggccgccggtttgagtgagggtttctgagctgctctgaattagtccttgcttggctgcttggccttgggcttcattcaagtctatgatgctgttgcccacgtttcccgggatatatattctctcccctccgttgggccccagccttctttgcttgcctctctgtttgtaaccttgtcgacaaagaggtagaaaagattgggtctaggatatggtgggtggacaggggccccgggacttggagggttggtcctcttgcctcctggaaaaaacaaaaacaaaaaactgcagtgaaagacaagctgcaaatcagccatgtgctgcgtgcctgtggaatctggagtgaggggtaaaagctgatctggtttgactccgctggaggtggggcctggagcaggccttgcgctgttgcgtaactggctgtgttctggtgaggccttgctcccaaccccacacgctcctccctctgaggctgtaggactcgcagtcaggggcagctgaccatggaagattgagagcccaaggtttaaacttctctgaagggaggtggggatgagaagaggggtttttttgtactttgtacaaagaccacacatttgtgtaaacagtgttttggaataaaatatttttttcat

SEQ ID NO: 26069 - protein, 794 aa, Homo sapiens; identical to SEQ ID NO: 3475

SEQ ID NO: 26070 - DNA, 4518 bp, Homo sapiens
agacaggatattcactgctgtggcaaggcctgtagagagtttcgaagttaggaggactcaagacggtccctccctggacttttctgaaggggctcaaaagatgacacgcgccagagctggaaggcgtcgccaattggtccacttttccctcctccctttttgcggatgagaaaactgaggcccaggtttgggatttccagagcccgggatttcccggcaacgcccgacaaccacattcccccggctattctgacccgccccggttccgggacgctccctgggagccgccgccgagggcctgctgggactcccgggggaccccgccgtcggggcagcccccacgcccggcgccgcccgccgggaacggccgccgctgttgcgcacttgcaggggagccggcgactgagggcgaggcagggagggagcaagcggggctgggagggctgctggcgcgggctcgcgcgctgtgtatggtctatcgcaggcagctgacctttgaggaggaaatcgctgctctccgctccttcctgtagtaacagccgccgctgccgccgccgccaggaaccccggccgggagcgagagccgcggggcgcagagccggcccggctgccggacggtgcggccccaccaggtgaacggccatggcgggctggatccaggcccagcagctgcagggagacgcgctgcgccagatgcaggtgctgtacggccagcacttccccatcgaggtccggcactacttggcccagtggattgagagccagccatgggatgccattgacttggacaatccccaggacagagcccaagccacccagctcctggagggcctggtgcaggagctgcagaagaaggcggagcaccaggtgggggaagatgggtttttactgaagatcaagctggggcactacgccacgcagctccagaaaacatatgaccgctgccccctggagctggtccgctgcatccggcacattctgtacaatgaacagaggctggtccgagaagccaacaattgcagctctccggctgggatcctggttgacgccatgtcccagaagcaccttcagatcaaccagacatttgaggagctgcgactggtcacgcaggacacagagaatgagctgaagaaactgcagcagactcaggagtacttcatcatccagtaccaggagagcctgaggatccaagctcagtttgcccagctggcccagctgagcccccaggagcgtctgagccgggagacggccctccagcagaagcaggtgtctctggaggcctggttgcagcgtgaggcacagacactgcagcagtaccgcgtggagctggccgagaagcaccagaagaccctgcagctgctgcggaagcagcagaccatcatcctggatgacgagctgatccagtggaagcggcggcagcagctggccgggaacggcgggccccccgagggcagcctggacgtgctacagtcctggtgtgagaagttggccgagatcatctggcagaaccggcagcagatccgcagggctgagcacctctgccagcagctgcccatccccggcccagtggaggagatgctggccgaggtcaacgccaccatcacggacattatctcagccctggtgaccagcacattcatcattgagaagcagcctcctcaggtcctgaagacccagaccaagtttgcagccaccgtacgcctgctggtgggcgggaagctgaacgtgcacatgaatcccccccaggtgaaggccaccatcatcagtgagcagcaggccaagtctctgcttaaaaatgagaacacccgcaacgagtgcagtggtgagatcctgaacaactgctgcgtgatggagtaccaccaagccacgggcaccctcagtgcccacttcaggaacatgtcactgaagaggatcaagcgtgctgaccggcggggtgcagagtccgtgacagaggagaagttcacagtcctgtttgagtctcagttcagtgttggcagcaatgagcttgtgttccaggtgaagactctgtccctacctgtggttgtcatcgtccacggcagccaggaccacaatgccacggctactgtgctgtgggacaatgcctttgctgagccgggcagggtgccatttgccgtgcctgacaaagtgctgtggccgcagctgtgtgaggcgctcaacatgaaattcaaggccgaagtgcagagcaaccggggcctgaccaaggagaacctcgtgttcctggcgcagaaactgttcaacaacagcagcagccacctggaggactacagtggcctgtccgtgtcctggtcccagttcaacagggagaacttgccgggctggaactacaccttctggcagtggtttgacggggtgatggaggtgttgaagaagcaccacaagccccactggaatgatggggccatcctaggttttgtgaataagcaacaggcccacgacctgctcatcaacaagcccgacgggaccttcttgttgcgctttagtgactcagaaatcgggggcatcaccatcgcctggaagtttgactccccggaacgcaacctgtggaacctgaaaccattcaccacgcgggatttctccatcaggtccctggctgaccggctgggggacctgagctatctcatctatgtgtttcctgaccgccccaaggatgaggtcttctccaagtactacactcctgtgctggctaaagctgttgatggatatgtgaaaccacagatcaagcaagtggtccctgagtttgtgaatgcatctgcagatgctgggggcagcagcgccacgtacatggaccaggccccctccccagctgtgtgcccccaggctccctataacatgtacccacagaaccctgaccatgtactcgatcaggatggagaattcgacctggatgagaccatggatgtggccaggcacgtggaggaactcttacgccgaccaatggacagtcttgactcccgcctctcgccccctgccggtcttttcacctctgccagaggctccctctcatgaatgtttgaatcccacgcttctctttggaaacaatatgcaatgtgaagcggtcgtgttgtgagtttagtaaggctgtgtacactgacacctttgcaggcatgcatgtgcttgtgtgtgtgtgtgtgtgtgtgtccttgtgcatgagctacgcctgcctcccctgtgcagtcctgggatgtggctgcagcagcggtggcctcttttcagatcatggcatccaagagtgcgccgagtctgtctctgtcatggtagagaccgagcctctgtcactgcaggcactcaatgcagccagacctattcctcctgggcccctcatctgctcagcagctatttgaatgagatgattcagaaggggaggggagacaggtaacgtctgtaagctgaagtttcactccggagtgagaagctttgccctcctaagagagagagacagagagacagagagagagaaagagagagtgtgtgggtctatgtaaatgcatctgtcctcatgtgttgatgtaaccgattcatctctcagaagggaggctggggttcattttcgagtagtattttatactttagtgaacgtggactccagactctctgtgaaccctatgagagcgcgtctgggcccggccatgtccttagcacaggggggccgccggtttgagtgagggtttctgagctgctctgaattagtccttgcttggctgcttggccttgggcttcattcaagtctatgatgctgttgcccacgtttcccgggatatatattctctcccctccgttgggccccagccttctttgcttgcctctctgtttgtaaccttgtcgacaaagaggtagaaaagattgggtctaggatatggtgggtggacaggggccccgggacttggagggttggtcctcttgcctcctggaaaaaacaaaaacaaaaaactgcagtgaaagacaagctgcaaatcagccatgtgctgcgtgcctgtggaatctggagtgaggggtaaaagctgatctggtttgactccgctggaggtggggcctggagcaggccttgcgctgttgcgtaactggctgtgttctggtgaggccttgctcccaaccccacacgctcctccctctgaggctgtaggactcgcagtcaggggcagctgaccatggaagattgagagcccaaggtttaaacttctctgaagggaggtggggatgagaagaggggtttttttgtactttgtacaaagaccacacatttgtgtaaacagtgttttggaataaaatatttttttcataaatttgctgctatggctcctggttggggcgttggtggcctccctgggtgatgggaacccctggagctggttgttctgttccttcccgcgtgcatgcctgatgctgtcatttttagtcttaaattttaactctgcccgctttgctgtggttttcagggtgctggccacccctggaatactgtcaatgcttctcagaagggtaaggagccagtttaggggg

SEQ ID NO: 26071 - protein, 794 aa, Homo sapiens; identical to SEQ ID NO: 3475

SEQ ID NO: 26072 - DNA, 2063 bp, Homo sapiens
aacggaagctgcagaaagatacgactgaggcgcctacctgcattctgccacccctcacacagccaaaccccagatcatctgaaactactaactttgtggttccagattttttttaatctcctacttctgctatctttgagcaatctgggcacttttaaaaatagagaaatgagtgaatgtgggtgatctgcttttatctaaatgcaaataaggatgtgttctctgagacccatgatcaggggatgtggcggggggtggctagagggagaaaaaggaaatgtcttgtgttgttttgttcccctgccctcctttctcagcagctttttgttattgttgttgttgttcttagacaagtgcctcctggtgcctgcggcatccttctgcctgtttctgtaagcaaatgccacaggccacctatagctacatactcctggcattgcactttttaaccttgctgacatccaaatagaagataggactatctaagccctaggtttctttttaaattaagaaataataacaattaaagggcaaaaaacactgtatcagcatagcctttctgtatttaagaaacttaagcagccgggcatggtggctcacgcctgtaatcccagcactttgggaggccgaggcggatcataaggtcaggagatcaagaccatcctggctaacacggtgaaaccccgtctctactaaaagtacaaaaaattagctgggtgtggtggtgggcgcctgtagtcccagctactcgggaggctgaggcaggagaatcgcttgaacctgagaggcggaggttgcagtgagccaaaattgcaccactgcacactgcactccatcctgggcgacagtctgagactctgtctcaaaaaaaaaaaaaaaaaaaagaaacttcagttaacagcctccttggtgctttaagcattcagcttccttcaggctggtaatttatataatccctgaaacgggcttcaggtcaaacccttaagacatctgaagctgcaacctggcctttggtgttgaaataggaaggtttaaggagaatctaagcattttagacttttttttataaatagacttattttcctttgtaatgtattggccttttagtgagtaaggctgggcagagggtgcttacaaccttgactccctttctccctggacttgatctgctgtttcagaggctaggttgtttctgtgggtgccttatcagggctgggatacttctgattctggcttccttcctgccccaccaggtgaggcagaacagctagagggcctccccgcctgcccgccttggctggctagctcgcctctcctgtgcgtatgggaacacctagcacgtgctggatgggctgcctctgactcagaggcatggccggatttggcaactcaaaaccaccttgcctcagctgatcagagtttctgtggaattctgtttgttaaatcaaattagctggtctctgaattaagggggagacgaccttctctaagatgaacagggttcgccccagtcctcctgcctggagacagttgatgtgtcatgcagagctcttacttctccagcaacactcttcagtacataataagcttaactgataaacagaatatttagaaaggtgagacttgggcttaccattgggtttaaatcatagggacctagggcgagggttcagggcttctctggagcagatattgtcaagttcatggccttaggtagcatgtatctggtcttaactctgattgtagcaaaagttctgagaggagctgagccctgttgtggcccattaaagaacagggtcctcaggccctgcccgcttcctgtccactgccccctccccatccccagcccagccgagggaatcccgtgggttgcttacctacctataaggtggtttataagctgctgtcctggccactgcattcaaattccaatgtgtacttcatagtgtaaaaatttatattattgtgaggttttttgtcttttttttttttttttttttttggtatattgctgtatctactttaacttccagaaataaacgttatataggaaccgtctgata

SEQ ID NO: 26073 - protein, 90 aa, Homo sapiens [sequence omitted]

SEQ ID NO: 26074 - DNA, 2780 bp, Homo sapiens
tggaagcccctgggctatgtttagtactcaaagtgaccttgtgtgtttaaaaagcttgagcttttatttttctgttggagaccagagtttgatggcttgtgtgtgtgtgttttgttcttttttttttttccattgtgtcttgtcaaccccccgtttcccctcctgctgccccccatttcctacagaacgacctgcagcaataccattgacctgccgatgtccccccgcactttagattcattgatgcagtttggaaataatggtgaaggtgctgaaccctcagcaggagggcagtttgagtccctcacctttgacatggagttgacctcggagtgcgctacctcccccatgtgaggagctgagaacggaagctgcagaaagatacgactgaggcgcctacctgcattctgccacccctcacacagccaaaccccagatcatctgaaactactaactttgtggttccagattttttttaatctcctacttctgctatctttgagcaatctgggcacttttaaaaatagagaaatgagtgaatgtgggtgatctgcttttatctaaatgcaaataaggatgtgttctctgagacccatgatcaggggatgtggcggggggtggctagagggagaaaaaggaaatgtcttgtgttgttttgttcccctgccctcctttctcagcagctttttgttattgttgttgttgttcttagacaagtgcctcctggtgcctgcggcatccttctgcctgtttctgtaagcaaatgccacaggccacctatagctacatactcctggcattgcactttttaaccttgctgacatccaaatagaagataggactatctaagccctaggtttctttttaaattaagaaataataacaattaaagggcaaaaaacactgtatcagcatagcctttctgtatttaagaaacttaagcagccgggcatggtggctcacgcctgtaatcccagcactttgggaggccgaggcggatcataaggtcaggagatcaagaccatcctggctaacacggtgaaaccccgtctctactaaaagtacaaaaaattagctgggtgtggtggtgggcgcctgtagtcccagctactcgggaggctgaggcaggagaatcgcttgaacctgagaggcggaggttgcagtgagccaaaattgcaccactgcacactgcactccatcctgggcgacagtctgagactctgtctcaaaaaaaaaaaaaaaaaaaagaaacttcagttaacagcctccttggtgctttaagcattcagcttccttcaggctggtaatttatataatccctgaaacgggcttcaggtcaaacccttaagacatctgaagctgcaacctggcctttggtgttgaaataggaaggtttaaggagaatctaagcattttagacttttttttataaatagacttattttcctttgtaatgtattggccttttagtgagtaaggctgggcagagggtgcttacaaccttgactccctttctccctggacttgatctgctgtttcagaggctaggttgtttctgtgggtgccttatcagggctgggatacttctgattctggcttccttcctgccccaccctcccgaccccagtccccctgatcctgctagaggcatgtctccttgcgtgtctaaaggtccctcatcctgtttgttttaggaatcctggtctcaggacctcatggaagaagagggggagagagttacaggttggacatgatgcacactatggggccccagcgacgtgtctggttgagctcagggaatatggttcttagccagtttcttggtgatatccagtggcacttgtaatggcgtcttcattcagttcatgcagggcaaaggcttactgataaacttgagtctgccctcgtatgagggtgtatacctggcctccctctgaggctggtgactcctccctgctggggccccacaggtgaggcagaacagctagagggcctccccgcctgcccgccttggctggctagctcgcctctcctgtgcgtatgggaacacctagcacgtgctggatgggctgcctctgactcagaggcatggccggatttggcaactcaaaaccaccttgcctcagctgatcagagtttctgtggaattctgtttgttaaatcaaattagctggtctctgaattaagggggagacgaccttctctaagatgaacagggttcgccccagtcctcctgcctggagacagttgatgtgtcatgcagagctcttacttctccagcaacactcttcagtacataataagcttaactgataaacagaatatttagaaaggtgagacttgggcttaccattgggtttaaatcatagggacctagggcgagggttcagggcttctctggagcagatattgtcaagttcatggccttaggtagcatgtatctggtcttaactctgattgtagcaaaagttctgagaggagctgagccctgttgtggcccattaaagaacagggtcctcaggccctgcccgcttcctgtccactgccccctccccatccccagcccagccgagggaatcccgtgggttgcttacctacctataaggtggtttataagctgctgtcctggccactgcattcaaattccaatgtgtacttcatagtgtaaaaatttatattattgtgaggttttttgtcttttttttttttttttttttttggtatattgctgtatctactttaacttccagaaataaacgttatataggaaccgtctgata

SEQ ID NO: 26075 - protein, 45 aa, Homo sapiens
MSPRTLDSLMQFGNNGEGAEPSAGGQFESLTFDMELTSECATSPM

SEQ ID NO: 26076 - DNA, 3336 bp, Homo sapiens
aggtctcttagctattgaagatgtacctggacccaggtctccggtcttctagttgaagcaattgtactgccttacaaagtcacattctctttggtgctttttgattgacgtatttatccaactagaaagttactcatgccctcatccaaaaatgtggtagaggccagattagtgctggtaggaataagagatataacctttggctttggaaccacaagcattagcagtctccatgttctttaaagacttggtgatattggtatttaggctggacaccatgcaaagactacacaggctcggttcctgcatgcagagaagttatctaagagatatgaccaggccggaatagaatgctcagaccacgtggaggctgttaaacttttacataatctagggaaagaagggacacaaggtggcattagtctagggtcaggtgggaaaaggttatgctgaaaagtctctgcagctcaggacagctttgtgcaaagaactgaagttcacagctgctagtgcctgggagatcaaatagtataaatgagggcagacaaccctgaggggcagatggagctttccagacaatcttggcatgaggatgagtgagtttcaaatcagtcctgccgaggcagatggcttcctccagctctgcttactgaatgcgaagtcacagtcagtaagaaaactggttttcttcttcccaggcgctgccccatacctgaagaccaagtttatctgtgtgacaccaacgacctgcagcaataccattgacctgccgatgtccccccgcactttagattcattgatgcagtttggaaataatggtgaaggtgctgaaccctcagcaggagggcagtttgagtccctcacctttgacatggagttgacctcggagtgcgctacctcccccatgtgaggagctgagaacggaagctgcagaaagatacgactgaggcgcctacctgcattctgccacccctcacacagccaaaccccagatcatctgaaactactaactttgtggttccagattttttttaatctcctacttctgctatctttgagcaatctgggcacttttaaaaatagagaaatgagtgaatgtgggtgatctgcttttatctaaatgcaaataaggatgtgttctctgagacccatgatcaggggatgtggcggggggtggctagagggagaaaaaggaaatgtcttgtgttgttttgttcccctgccctcctttctcagcagctttttgttattgttgttgttgttcttagacaagtgcctcctggtgcctgcggcatccttctgcctgtttctgtaagcaaatgccacaggccacctatagctacatactcctggcattgcactttttaaccttgctgacatccaaatagaagataggactatctaagccctaggtttctttttaaattaagaaataataacaattaaagggcaaaaaacactgtatcagcatagcctttctgtatttaagaaacttaagcagccgggcatggtggctcacgcctgtaatcccagcactttgggaggccgaggcggatcataaggtcaggagatcaagaccatcctggctaacacggtgaaaccccgtctctactaaaagtacaaaaaattagctgggtgtggtggtgggcgcctgtagtcccagctactcgggaggctgaggcaggagaatcgcttgaacctgagaggcggaggttgcagtgagccaaaattgcaccactgcacactgcactccatcctgggcgacagtctgagactctgtctcaaaaaaaaaaaaaaaaaaaagaaacttcagttaacagcctccttggtgctttaagcattcagcttccttcaggctggtaatttatataatccctgaaacgggcttcaggtcaaacccttaagacatctgaagctgcaacctggcctttggtgttgaaataggaaggtttaaggagaatctaagcattttagacttttttttataaatagacttattttcctttgtaatgtattggccttttagtgagtaaggctgggcagagggtgcttacaaccttgactccctttctccctggacttgatctgctgtttcagaggctaggttgtttctgtgggtgccttatcagggctgggatacttctgattctggcttccttcctgccccaccctcccgaccccagtccccctgatcctgctagaggcatgtctccttgcgtgtctaaaggtccctcatcctgtttgttttaggaatcctggtctcaggacctcatggaagaagagggggagagagttacaggttggacatgatgcacactatggggccccagcgacgtgtctggttgagctcagggaatatggttcttagccagtttcttggtgatatccagtggcacttgtaatggcgtcttcattcagttcatgcagggcaaaggcttactgataaacttgagtctgccctcgtatgagggtgtatacctggcctccctctgaggctggtgactcctccctgctggggccccacaggtgaggcagaacagctagagggcctccccgcctgcccgccttggctggctagctcgcctctcctgtgcgtatgggaacacctagcacgtgctggatgggctgcctctgactcagaggcatggccggatttggcaactcaaaaccaccttgcctcagctgatcagagtttctgtggaattctgtttgttaaatcaaattagctggtctctgaattaagggggagacgaccttctctaagatgaacagggttcgccccagtcctcctgcctggagacagttgatgtgtcatgcagagctcttacttctccagcaacactcttcagtacataataagcttaactgataaacagaatatttagaaaggtgagacttgggcttaccattgggtttaaatcatagggacctagggcgagggttcagggcttctctggagcagatattgtcaagttcatggccttaggtagcatgtatctggtcttaactctgattgtagcaaaagttctgagaggagctgagccctgttgtggcccattaaagaacagggtcctcaggccctgcccgcttcctgtccactgccccctccccatccccagcccagccgagggaatcccgtgggttgcttacctacctataaggtggtttataagctgctgtcctggccactgcattcaaattccaatgtgtacttcatagtgtaaaaatttatattattgtgaggttttttgtcttttttttttttttttttttttggtatattgctgtatctactttaacttccagaaataaacgttatataggaaccgtctgata

SEQ ID NO: 26077 - protein, 107 aa, Homo sapiens
MRMSEFQISPAEADGFLQLCLLNAKSQSVRKLVFFFPGAAPYLKTKFICVTPTTCSNTIDLPMSPRTLDSLMQFGNNGEGAEPSAGGQFESLTFDMELTSECATSPM

SEQ ID NO: 26078 - DNA, 3286 bp, Homo sapiens
aggtctcttagctattgaagatgtacctggacccaggtctccggtcttctagttgaagcaattgtactgccttacaaagtcacattctctttggtgctttttgattgacgtatttatccaactagaaagttactcatgccctcatccaaaaatgtggtagaggccagattagtgctggtaggaataagagatataacctttggctttggaaccacaagcattagcagtctccatgttctttaaagacttggtgatattggtatttaggctggacaccatgcaaagactacacaggctcggttcctgcatgcagagaagttatctaagagatatgaccaggccggaatagaatgctcagaccacgtggaggctgttaaacttttacataatctagggaaagaagggacacaaggtggcattagtctagggtcaggtgggaaaaggttatgctgaaaagtctctgcagctcaggacagctttgtgcaaagaactgaagttcacagctgctagtgcctgggagatcaaatagtataaatgagggcagacaaccctgaggggcagatggagctttccagacaatcttggcatgaggatgagtgagtttcaaatcagtcctgccgaggcagatggcttcctccagctctgcttactgaatgcgaagtcacagtcagtaagaaaactggttttcttcttcccaggcgctgccccatacctgaagaccaagtttatctgtgtgacaccattcattgatgcagtttggaaataatggtgaaggtgctgaaccctcagcaggagggcagtttgagtccctcacctttgacatggagttgacctcggagtgcgctacctcccccatgtgaggagctgagaacggaagctgcagaaagatacgactgaggcgcctacctgcattctgccacccctcacacagccaaaccccagatcatctgaaactactaactttgtggttccagattttttttaatctcctacttctgctatctttgagcaatctgggcacttttaaaaatagagaaatgagtgaatgtgggtgatctgcttttatctaaatgcaaataaggatgtgttctctgagacccatgatcaggggatgtggcggggggtggctagagggagaaaaaggaaatgtcttgtgttgttttgttcccctgccctcctttctcagcagctttttgttattgttgttgttgttcttagacaagtgcctcctggtgcctgcggcatccttctgcctgtttctgtaagcaaatgccacaggccacctatagctacatactcctggcattgcactttttaaccttgctgacatccaaatagaagataggactatctaagccctaggtttctttttaaattaagaaataataacaattaaagggcaaaaaacactgtatcagcatagcctttctgtatttaagaaacttaagcagccgggcatggtggctcacgcctgtaatcccagcactttgggaggccgaggcggatcataaggtcaggagatcaagaccatcctggctaacacggtgaaaccccgtctctactaaaagtacaaaaaattagctgggtgtggtggtgggcgcctgtagtcccagctactcgggaggctgaggcaggagaatcgcttgaacctgagaggcggaggttgcagtgagccaaaattgcaccactgcacactgcactccatcctgggcgacagtctgagactctgtctcaaaaaaaaaaaaaaaaaaaagaaacttcagttaacagcctccttggtgctttaagcattcagcttccttcaggctggtaatttatataatccctgaaacgggcttcaggtcaaacccttaagacatctgaagctgcaacctggcctttggtgttgaaataggaaggtttaaggagaatctaagcattttagacttttttttataaatagacttattttcctttgtaatgtattggccttttagtgagtaaggctgggcagagggtgcttacaaccttgactccctttctccctggacttgatctgctgtttcagaggctaggttgtttctgtgggtgccttatcagggctgggatacttctgattctggcttccttcctgccccaccctcccgaccccagtccccctgatcctgctagaggcatgtctccttgcgtgtctaaaggtccctcatcctgtttgttttaggaatcctggtctcaggacctcatggaagaagagggggagagagttacaggttggacatgatgcacactatggggccccagcgacgtgtctggttgagctcagggaatatggttcttagccagtttcttggtgatatccagtggcacttgtaatggcgtcttcattcagttcatgcagggcaaaggcttactgataaacttgagtctgccctcgtatgagggtgtatacctggcctccctctgaggctggtgactcctccctgctggggccccacaggtgaggcagaacagctagagggcctccccgcctgcccgccttggctggctagctcgcctctcctgtgcgtatgggaacacctagcacgtgctggatgggctgcctctgactcagaggcatggccggatttggcaactcaaaaccaccttgcctcagctgatcagagtttctgtggaattctgtttgttaaatcaaattagctggtctctgaattaagggggagacgaccttctctaagatgaacagggttcgccccagtcctcctgcctggagacagttgatgtgtcatgcagagctcttacttctccagcaacactcttcagtacataataagcttaactgataaacagaatatttagaaaggtgagacttgggcttaccattgggtttaaatcatagggacctagggcgagggttcagggcttctctggagcagatattgtcaagttcatggccttaggtagcatgtatctggtcttaactctgattgtagcaaaagttctgagaggagctgagccctgttgtggcccattaaagaacagggtcctcaggccctgcccgcttcctgtccactgccccctccccatccccagcccagccgagggaatcccgtgggttgcttacctacctataaggtggtttataagctgctgtcctggccactgcattcaaattccaatgtgtacttcatagtgtaaaaatttatattattgtgaggttttttgtcttttttttttttttttttttttggtatattgctgtatctactttaacttccagaaataaacgttatataggaaccgtctgata

SEQ ID NO: 26079 - protein, 59 aa, Homo sapiens
MRMSEFQISPAEADGFLQLCLLNAKSQSVRKLVFFFPGAAPYLKTKFICVTPFIDAVWK

SEQ ID NO: 26080 - DNA, 3012 bp, Homo sapiens
ggcttctccttctgggtctggctggacaatatcattgacctttaaggagcgggagcgggccatcttgagcactaagcctccaggcaccttcctgctaagattcagtgaaagcagcaaagaaggaggcgtcactttcacttgggtggagaaggacatcagcggtaagacccagatccagtccgtggaaccatacacaaagcagcagctgaacaacatgtcatttgctgaaatcatcatgggctataagatcatggatgctaccaatatcctggtgtctccactggtctatctctatcctgacattcccaaggaggaggcattcggaaagtattgtcggccagagagccaggagcatcctgaagctgacccaggtagcgctgccccatacctgaagaccaagtttatctgtgtgacaccaacgacctgcagcaataccattgacctgccgatgtccccccgcactttagattcattgatgcagtttggaaataatggtgaaggtgctgaaccctcagcaggagggcagtttgagtccctcacctttgacatggagttgacctcggagtgcgctacctcccccatgtgaggagctgagaacggaagctgcagaaagatacgactgaggcgcctacctgcattctgccacccctcacacagccaaaccccagatcatctgaaactactaactttgtggttccagattttttttaatctcctacttctgctatctttgagcaatctgggcacttttaaaaatagagaaatgagtgaatgtgggtgatctgcttttatctaaatgcaaataaggatgtgttctctgagacccatgatcaggggatgtggcggggggtggctagagggagaaaaaggaaatgtcttgtgttgttttgttcccctgccctcctttctcagcagctttttgttattgttgttgttgttcttagacaagtgcctcctggtgcctgcggcatccttctgcctgtttctgtaagcaaatgccacaggccacctatagctacatactcctggcattgcactttttaaccttgctgacatccaaatagaagataggactatctaagccctaggtttctttttaaattaagaaataataacaattaaagggcaaaaaacactgtatcagcatagcctttctgtatttaagaaacttaagcagccgggcatggtggctcacgcctgtaatcccagcactttgggaggccgaggcggatcataaggtcaggagatcaagaccatcctggctaacacggtgaaaccccgtctctactaaaagtacaaaaaattagctgggtgtggtggtgggcgcctgtagtcccagctactcgggaggctgaggcaggagaatcgcttgaacctgagaggcggaggttgcagtgagccaaaattgcaccactgcacactgcactccatcctgggcgacagtctgagactctgtctcaaaaaaaaaaaaaaaaaaaagaaacttcagttaacagcctccttggtgctttaagcattcagcttccttcaggctggtaatttatataatccctgaaacgggcttcaggtcaaacccttaagacatctgaagctgcaacctggcctttggtgttgaaataggaaggtttaaggagaatctaagcattttagacttttttttataaatagacttattttcctttgtaatgtattggccttttagtgagtaaggctgggcagagggtgcttacaaccttgactccctttctccctggacttgatctgctgtttcagaggctaggttgtttctgtgggtgccttatcagggctgggatacttctgattctggcttccttcctgccccaccctcccgaccccagtccccctgatcctgctagaggcatgtctccttgcgtgtctaaaggtccctcatcctgtttgttttaggaatcctggtctcaggacctcatggaagaagagggggagagagttacaggttggacatgatgcacactatggggccccagcgacgtgtctggttgagctcagggaatatggttcttagccagtttcttggtgatatccagtggcacttgtaatggcgtcttcattcagttcatgcagggcaaaggcttactgataaacttgagtctgccctcgtatgagggtgtatacctggcctccctctgaggctggtgactcctccctgctggggccccacaggtgaggcagaacagctagagggcctccccgcctgcccgccttggctggctagctcgcctctcctgtgcgtatgggaacacctagcacgtgctggatgggctgcctctgactcagaggcatggccggatttggcaactcaaaaccaccttgcctcagctgatcagagtttctgtggaattctgtttgttaaatcaaattagctggtctctgaattaagggggagacgaccttctctaagatgaacagggttcgccccagtcctcctgcctggagacagttgatgtgtcatgcagagctcttacttctccagcaacactcttcagtacataataagcttaactgataaacagaatatttagaaaggtgagacttgggcttaccattgggtttaaatcatagggacctagggcgagggttcagggcttctctggagcagatattgtcaagttcatggccttaggtagcatgtatctggtcttaactctgattgtagcaaaagttctgagaggagctgagccctgttgtggcccattaaagaacagggtcctcaggccctgcccgcttcctgtccactgccccctccccatccccagcccagccgagggaatcccgtgggttgcttacctacctataaggtggtttataagctgctgtcctggccactgcattcaaattccaatgtgtacttcatagtgtaaaaatttatattattgtgaggttttttgtcttttttttttttttttttttttggtatattgctgtatctactttaacttccagaaataaacgttatataggaaccgtctgata

SEQ ID NO: 26081 - protein, 123 aa, Homo sapiens
MSFAEIIMGYKIMDATNILVSPLVYLYPDIPKEEAFGKYCRPESQEHPEADPGSAAPYLKTKFICVTPTTCSNTIDLPMSPRTLDSLMQFGNNGEGAEPSAGGQFESLTFDMELTSECATSPM

SEQ ID NO: 26082 - DNA, 4967 bp, Homo sapiens
gtaattcagcggtttccggagctgcggcggcgcagactgggagggggagccgggggttccgacgtcgcagccgagggaacaagccccaaccggatcctggacaggcaccccggcttggcgctgtctctccccctcggctcggagaggcccttcggcctgagggagcctcgccgcccgtccccggcacacgcgcagccccggcctctcggcctctgccggagaaacaggatggcccaatggaatcagctacagcagcttgacacacggtacctggagcagctccatcagctctacagtgacagcttcccaatggagctgcggcagtttctggccccttggattgagagtcaagattgggcatatgcggccagcaaagaatcacatgccactttggtgtttcataatctcctgggagagattgaccagcagtatagccgcttcctgcaagagtcgaatgttctctatcagcacaatctacgaagaatcaagcagtttcttcagagcaggtatcttgagaagccaatggagattgcccggattgtggcccggtgcctgtgggaagaatcacgccttctacagactgcagccactgcggcccagcaagggggccaggccaaccaccccacagcagccgtggtgacggagaagcagcagatgctggagcagcaccttcaggatgtccggaagagagtgcaggatctagaacagaaaatgaaagtggtagagaatctccaggatgactttgatttcaactataaaaccctcaagagtcaaggagacatgcaagatctgaatggaaacaaccagtcagtgaccaggcagaagatgcagcagctggaacagatgctcactgcgctggaccagatgcggagaagcatcgtgagtgagctggcggggcttttgtcagcgatggagtacgtgcagaaaactctcacggacgaggagctggctgactggaagaggcggcaacagattgcctgcattggaggcccgcccaacatctgcctagatcggctagaaaactggataacgtcattagcagaatctcaacttcagacccgtcaacaaattaagaaactggaggagttgcagcaaaaagtttcctacaaaggggaccccattgtacagcaccggccgatgctggaggagagaatcgtggagctgtttagaaacttaatgaaaagtgcctttgtggtggagcggcagccctgcatgcccatgcatcctgaccggcccctcgtcatcaagaccggcgtccagttcactactaaagtcaggttgctggtcaaattccctgagttgaattatcagcttaaaattaaagtgtgcattgacaaagactctggggacgttgcagctctcagaggatcccggaaatttaacattctgggcacaaacacaaaagtgatgaacatggaagaatccaacaacggcagcctctctgcagaattcaaacacttgaccctgagggagcagagatgtgggaatgggggccgagccaattgtgatgcttccctgattgtgactgaggagctgcacctgatcacctttgagaccgaggtgtatcaccaaggcctcaagattgacctagagacccactccttgccagttgtggtgatctccaacatctgtcagatgccaaatgcctgggcgtccatcctgtggtacaacatgctgaccaacaatcccaagaatgtaaacttttttaccaagcccccaattggaacctgggatcaagtggccgaggtcctgagctggcagttctcctccaccaccaagcgaggactgagcatcgagcagctgactacactggcagagaaactcttgggacctggtgtgaattattcagggtgtcagatcacatgggctaaattttgcaaagaaaacatggctggcaagggcttctccttctgggtctggctggacaatatcattgaccttgtgaaaaagtacatcctggccctttggaacgaagggtacatcatgggctttatcagtaaggagcgggagcgggccatcttgagcactaagcctccaggcaccttcctgctaagattcagtgaaagcagcaaagaaggaggcgtcactttcacttgggtggagaaggacatcagcggtaagacccagatccagtccgtggaaccatacacaaagcagcagctgaacaacatgtcatttgctgaaatcatcatgggctataagatcatggatgctaccaatatcctggtgtctccactggtctatctctatcctgacattcccaaggaggaggcattcggaaagtattgtcggccagagagccaggagcatcctgaagctgacccaggtagcgctgccccatacctgaagaccaagtttatctgtgtgacaccaacgacctgcagcaataccattgacctgccgatgtccccccgcactttagattcattgatgcagtttggaaataatggtgaaggtgctgaaccctcagcaggagggcagtttgagtccctcacctttgacatggagttgacctcggagtgcgctacctcccccatgtgaggagctgagaacggaagctgcagaaagatacgactgaggcgcctacctgcattctgccacccctcacacagccaaaccccagatcatctgaaactactaactttgtggttccagattttttttaatctcctacttctgctatctttgagcaatctgggcacttttaaaaatagagaaatgagtgaatgtgggtgatctgcttttatctaaatgcaaataaggatgtgttctctgagacccatgatcaggggatgtggcggggggtggctagagggagaaaaaggaaatgtcttgtgttgttttgttcccctgccctcctttctcagcagctttttgttattgttgttgttgttcttagacaagtgcctcctggtgcctgcggcatccttctgcctgtttctgtaagcaaatgccacaggccacctatagctacatactcctggcattgcactttttaaccttgctgacatccaaatagaagataggactatctaagccctaggtttctttttaaattaagaaataataacaattaaagggcaaaaaacactgtatcagcatagcctttctgtatttaagaaacttaagcagccgggcatggtggctcacgcctgtaatcccagcactttgggaggccgaggcggatcataaggtcaggagatcaagaccatcctggctaacacggtgaaaccccgtctctactaaaagtacaaaaaattagctgggtgtggtggtgggcgcctgtagtcccagctactcgggaggctgaggcaggagaatcgcttgaacctgagaggcggaggttgcagtgagccaaaattgcaccactgcacactgcactccatcctgggcgacagtctgagactctgtctcaaaaaaaaaaaaaaaaaaaagaaacttcagttaacagcctccttggtgctttaagcattcagcttccttcaggctggtaatttatataatccctgaaacgggcttcaggtcaaacccttaagacatctgaagctgcaacctggcctttggtgttgaaataggaaggtttaaggagaatctaagcattttagacttttttttataaatagacttattttcctttgtaatgtattggccttttagtgagtaaggctgggcagagggtgcttacaaccttgactccctttctccctggacttgatctgctgtttcagaggctaggttgtttctgtgggtgccttatcagggctgggatacttctgattctggcttccttcctgccccaccctcccgaccccagtccccctgatcctgctagaggcatgtctccttgcgtgtctaaaggtccctcatcctgtttgttttaggaatcctggtctcaggacctcatggaagaagagggggagagagttacaggttggacatgatgcacactatggggccccagcgacgtgtctggttgagctcagggaatatggttcttagccagtttcttggtgatatccagtggcacttgtaatggcgtcttcattcagttcatgcagggcaaaggcttactgataaacttgagtctgccctcgtatgagggtgtatacctggcctccctctgaggctggtgactcctccctgctggggccccacaggtgaggcagaacagctagagggcctccccgcctgcccgccttggctggctagctcgcctctcctgtgcgtatgggaacacctagcacgtgctggatgggctgcctctgactcagaggcatggccggatttggcaactcaaaaccaccttgcctcagctgatcagagtttctgtggaattctgtttgttaaatcaaattagctggtctctgaattaagggggagacgaccttctctaagatgaacagggttcgccccagtcctcctgcctggagacagttgatgtgtcatgcagagctcttacttctccagcaacactcttcagtacataataagcttaactgataaacagaatatttagaaaggtgagacttgggcttaccattgggtttaaatcatagggacctagggcgagggttcagggcttctctggagcagatattgtcaagttcatggccttaggtagcatgtatctggtcttaactctgattgtagcaaaagttctgagaggagctgagccctgttgtggcccattaaagaacagggtcctcaggccctgcccgcttcctgtccactgccccctccccatccccagcccagccgagggaatcccgtgggttgcttacctacctataaggtggtttataagctgctgtcctggccactgcattcaaattccaatgtgtacttcatagtgtaaaaatttatattattgtgaggttttttgtcttttttttttttttttttttttggtatattgctgtatctactttaacttccagaaataaacgttatataggaaccgtctgata

SEQ ID NO: 26083 - protein, 770 aa, Homo sapiens; identical to SEQ ID NO: 3479

SEQ ID NO: 26084 - DNA, 3414 bp, Homo sapiens
gtaattcagcggtttccggagctgcggcggcgcagactgggagggggagccgggggttccgacgtcgcagccgagggaacaagccccaaccggatcctggacaggcaccccggcttggcgctgtctctccccctcggctcggagaggcccttcggcctgagggagcctcgccgcccgtccccggcacacgcgcagccccggcctctcggcctctgccggagaaacaggatggcccaatggaatcagctacagcagcttgacacacggtacctggagcagctccatcagctctacagtgacagcttcccaatggagctgcggcagtttctggccccttggattgagagtcaagattgggcatatgcggccagcaaagaatcacatgccactttggtgtttcataatctcctgggagagattgaccagcagtatagccgcttcctgcaagagtcgaatgttctctatcagcacaatctacgaagaatcaagcagtttcttcagagcaggtatcttgagaagccaatggagattgcccggattgtggcccggtgcctgtgggaagaatcacgccttctacagactgcagccactgcggcccagcaagggggccaggccaaccaccccacagcagccgtggtgacggagaagcagcagatgctggagcagcaccttcaggatgtccggaagagagtgcaggatctagaacagaaaatgaaagtggtagagaatctccaggatgactttgatttcaactataaaaccctcaagagtcaaggagacatgcaagatctgaatggaaacaaccagtcagtgaccaggcagaagatgcagcagctggaacagatgctcactgcgctggaccagatgcggagaagcatcgtgagtgagctggcggggcttttgtcagcgatggagtacgtgcagaaaactctcacggacgaggagctggctgactggaagaggcggcaacagattgcctgcattggaggcccgcccaacatctgcctagatcggctagaaaactggataacgtcattagcagaatctcaacttcagacccgtcaacaaattaagaaactggaggagttgcagcaaaaagtttcctacaaaggggaccccattgtacagcaccggccgatgctggaggagagaatcgtggagctgtttagaaacttaatgaaaagtgcctttgtggtggagcggcagccctgcatgcccatgcatcctgaccggcccctcgtcatcaagaccggcgtccagttcactactaaagtcaggttgctggtcaaattccctgagttgaattatcagcttaaaattaaagtgtgcattgacaaagactctggggacgttgcagctctcagaggatcccggaaatttaacattctgggcacaaacacaaaagtgatgaacatggaagaatccaacaacggcagcctctctgcagaattcaaacacttgaccctgagggagcagagatgtgggaatgggggccgagccaattgtgatgcttccctgattgtgactgaggagctgcacctgatcacctttgagaccgaggtgtatcaccaaggcctcaagattgacctagagacccactccttgccagttgtggtgatctccaacatctgtcagatgccaaatgcctgggcgtccatcctgtggtacaacatgctgaccaacaatcccaagaatgtaaacttttttaccaagcccccaattggaacctgggatcaagtggccgaggtcctgagctggcagttctcctccaccaccaagcgaggactgagcatcgagcagctgactacactggcagagaaactcttgggacctggtgtgaattattcagggtgtcagatcacatgggctaaattttgcaaagaaaacatggctggcaagggcttctccttctgggtctggctggacaatatcattgaccttgtgaaaaagtacatcctggccctttggaacgaagggtacatcatgggctttatcagtaaggagcgggagcgggccatcttgagcactaagcctccaggcaccttcctgctaagattcagtgaaagcagcaaagaaggaggcgtcactttcacttgggtggagaaggacatcagcggtaagacccagatccagtccgtggaaccatacacaaagcagcagctgaacaacatgtcatttgctgaaatcatcatgggctataagatcatggatgctaccaatatcctggtgtctccactggtctatctctatcctgacattcccaaggaggaggcattcggaaagtattgtcggccagagagccaggagcatcctgaagctgacccaggtagcgctgccccatacctgaagaccaagtttatctgtgtgacaccaacgacctgcagcaataccattgacctgccgatgtccccccgcactttagattcattgatgcagtttggaaataatggtgaaggtgctgaaccctcagcaggagggcagtttgagtccctcacctttgacatggagttgacctcggagtgcgctacctcccccatgtgaggagctgagaacggaagctgcagaaagatacgactgaggcgcctacctgcattctgccacccctcacacagccaaaccccagatcatctgaaactactaactttgtggttccagattttttttaatctcctacttctgctatctttgagcaatctgggcacttttaaaaatagagaaatgagtgaatgtgggtgatctgcttttatctaaatgcaaataaggatgtgttctctgagacccatgatcaggggatgtggcggggggtggctagagggagaaaaaggaaatgtcttgtgttgttttgttcccctgccctcctttctcagcagctttttgttattgttgttgttgttcttagacaagtgcctcctggtgcctgcggcatccttctgcctgtttctgtaagcaaatgccacaggccacctatagctacatactcctggcattgcactttttaaccttgctgacatccaaatagaagataggactatctaagccctaggtttctttttaaattaagaaataataacaattaaagggcaaaaaacactgtatcagcatagcctttctgtatttaagaaacttaagcagccgggcatggtggctcacgcctgtaatcccagcactttgggaggccgaggcggatcataaggtcaggagatcaagaccatcctggctaacacggtgaaaccccgtctctactaaaagtacaaaaaattagctgggtgtggtggtgggcgcctgtagtcccagctactcgggaggctgaggcaggagaatcgcttgaacctgagaggcggaggttgcagtgagccaaaattgcaccactgcacactgcactccatcctgggcgacagtctgagactctgtctc

SEQ ID NO: 26085 - protein, 770 aa, Homo sapiens; identical to SEQ ID NO: 3479

SEQ ID NO: 26086 - DNA, 907 bp, Homo sapiens
tggaagcccctgggctatgtttagtactcaaagtgaccttgtgtgtttaaaaagcttgagcttttatttttctgttggagaccagagtttgatggcttgtgtgtgtgtgttttgttcttttttttttttccattgtgtcttgtcaaccccccgtttcccctcctgctgccccccatttcctacagaacgacctgcagcaataccattgacctgccgatgtccccccgcactttagattcattgatgcagtttggaaataatggtgaaggtgctgaaccctcagcaggagggcagtttgagtccctcacctttgacatggagttgacctcggagtgcgctacctcccccatgtgaggagctgagaacggaagctgcagaaagatacgactgaggcgcctacctgcattctgccacccctcacacagccaaaccccagatcatctgaaactactaactttgtggttccagattttttttaatctcctacttctgctatctttgagcaatctgggcacttttaaaaatagagaaatgagtgaatgtgggtgatctgcttttatctaaatgcaaataaggatgtgttctctgagacccatgatcaggggatgtggcggggggtggctagagggagaaaaaggaaatgtcttgtgttgttttgttcccctgccctcctttctcagcagctttttgttattgttgttgttgttcttagacaagtgcctcctggtgcctgcggcatccttctgcctgtttctgtaagcaaatgccacaggccacctatagctacatactcctggcattgcactttttaaccttgctgacatccaaatagaagataggactatctaagccctaggtttctttttaaattaagaaataataacaattaaagggcaaaaaacactgt

SEQ ID NO: 26087 - protein, 45 aa, Homo sapiens; identical to SEQ ID NO: 26075

SEQ ID NO: 26088 - DNA, 1463 bp, Homo sapiens
aggtctcttagctattgaagatgtacctggacccaggtctccggtcttctagttgaagcaattgtactgccttacaaagtcacattctctttggtgctttttgattgacgtatttatccaactagaaagttactcatgccctcatccaaaaatgtggtagaggccagattagtgctggtaggaataagagatataacctttggctttggaaccacaagcattagcagtctccatgttctttaaagacttggtgatattggtatttaggctggacaccatgcaaagactacacaggctcggttcctgcatgcagagaagttatctaagagatatgaccaggccggaatagaatgctcagaccacgtggaggctgttaaacttttacataatctagggaaagaagggacacaaggtggcattagtctagggtcaggtgggaaaaggttatgctgaaaagtctctgcagctcaggacagctttgtgcaaagaactgaagttcacagctgctagtgcctgggagatcaaatagtataaatgagggcagacaaccctgaggggcagatggagctttccagacaatcttggcatgaggatgagtgagtttcaaatcagtcctgccgaggcagatggcttcctccagctctgcttactgaatgcgaagtcacagtcagtaagaaaactggttttcttcttcccaggcgctgccccatacctgaagaccaagtttatctgtgtgacaccaacgacctgcagcaataccattgacctgccgatgtccccccgcactttagattcattgatgcagtttggaaataatggtgaaggtgctgaaccctcagcaggagggcagtttgagtccctcacctttgacatggagttgacctcggagtgcgctacctcccccatgtgaggagctgagaacggaagctgcagaaagatacgactgaggcgcctacctgcattctgccacccctcacacagccaaaccccagatcatctgaaactactaactttgtggttccagattttttttaatctcctacttctgctatctttgagcaatctgggcacttttaaaaatagagaaatgagtgaatgtgggtgatctgcttttatctaaatgcaaataaggatgtgttctctgagacccatgatcaggggatgtggcggggggtggctagagggagaaaaaggaaatgtcttgtgttgttttgttcccctgccctcctttctcagcagctttttgttattgttgttgttgttcttagacaagtgcctcctggtgcctgcggcatccttctgcctgtttctgtaagcaaatgccacaggccacctatagctacatactcctggcattgcactttttaaccttgctgacatccaaatagaagataggactatctaagccctaggtttctttttaaattaagaaataataacaattaaagggcaaaaaacactgt

SEQ ID NO: 26089 - protein, 107 aa, Homo sapiens; identical to SEQ ID NO: 26077

SEQ ID NO: 26090 - DNA, 1413 bp, Homo sapiens
aggtctcttagctattgaagatgtacctggacccaggtctccggtcttctagttgaagcaattgtactgccttacaaagtcacattctctttggtgctttttgattgacgtatttatccaactagaaagttactcatgccctcatccaaaaatgtggtagaggccagattagtgctggtaggaataagagatataacctttggctttggaaccacaagcattagcagtctccatgttctttaaagacttggtgatattggtatttaggctggacaccatgcaaagactacacaggctcggttcctgcatgcagagaagttatctaagagatatgaccaggccggaatagaatgctcagaccacgtggaggctgttaaacttttacataatctagggaaagaagggacacaaggtggcattagtctagggtcaggtgggaaaaggttatgctgaaaagtctctgcagctcaggacagctttgtgcaaagaactgaagttcacagctgctagtgcctgggagatcaaatagtataaatgagggcagacaaccctgaggggcagatggagctttccagacaatcttggcatgaggatgagtgagtttcaaatcagtcctgccgaggcagatggcttcctccagctctgcttactgaatgcgaagtcacagtcagtaagaaaactggttttcttcttcccaggcgctgccccatacctgaagaccaagtttatctgtgtgacaccattcattgatgcagtttggaaataatggtgaaggtgctgaaccctcagcaggagggcagtttgagtccctcacctttgacatggagttgacctcggagtgcgctacctcccccatgtgaggagctgagaacggaagctgcagaaagatacgactgaggcgcctacctgcattctgccacccctcacacagccaaaccccagatcatctgaaactactaactttgtggttccagattttttttaatctcctacttctgctatctttgagcaatctgggcacttttaaaaatagagaaatgagtgaatgtgggtgatctgcttttatctaaatgcaaataaggatgtgttctctgagacccatgatcaggggatgtggcggggggtggctagagggagaaaaaggaaatgtcttgtgttgttttgttcccctgccctcctttctcagcagctttttgttattgttgttgttgttcttagacaagtgcctcctggtgcctgcggcatccttctgcctgtttctgtaagcaaatgccacaggccacctatagctacatactcctggcattgcactttttaaccttgctgacatccaaatagaagataggactatctaagccctaggtttctttttaaattaagaaataataacaattaaagggcaaaaaacactgt

SEQ ID NO: 26091 - protein, 59 aa, Homo sapiens; identical to SEQ ID NO: 26079

SEQ ID NO: 26092 - DNA, 1139 bp, Homo sapiens
ggcttctccttctgggtctggctggacaatatcattgacctttaaggagcgggagcgggccatcttgagcactaagcctccaggcaccttcctgctaagattcagtgaaagcagcaaagaaggaggcgtcactttcacttgggtggagaaggacatcagcggtaagacccagatccagtccgtggaaccatacacaaagcagcagctgaacaacatgtcatttgctgaaatcatcatgggctataagatcatggatgctaccaatatcctggtgtctccactggtctatctctatcctgacattcccaaggaggaggcattcggaaagtattgtcggccagagagccaggagcatcctgaagctgacccaggtagcgctgccccatacctgaagaccaagtttatctgtgtgacaccaacgacctgcagcaataccattgacctgccgatgtccccccgcactttagattcattgatgcagtttggaaataatggtgaaggtgctgaaccctcagcaggagggcagtttgagtccctcacctttgacatggagttgacctcggagtgcgctacctcccccatgtgaggagctgagaacggaagctgcagaaagatacgactgaggcgcctacctgcattctgccacccctcacacagccaaaccccagatcatctgaaactactaactttgtggttccagattttttttaatctcctacttctgctatctttgagcaatctgggcacttttaaaaatagagaaatgagtgaatgtgggtgatctgcttttatctaaatgcaaataaggatgtgttctctgagacccatgatcaggggatgtggcggggggtggctagagggagaaaaaggaaatgtcttgtgttgttttgttcccctgccctcctttctcagcagctttttgttattgttgttgttgttcttagacaagtgcctcctggtgcctgcggcatccttctgcctgtttctgtaagcaaatgccacaggccacctatagctacatactcctggcattgcactttttaaccttgctgacatccaaatagaagataggactatctaagccctaggtttctttttaaattaagaaataataacaattaaagggcaaaaaacactgt

SEQ ID NO: 26093 - protein, 123 aa, Homo sapiens; identical to SEQ ID NO: 26081

SEQ ID NO: 26094 - DNA, 3094 bp, Homo sapiens
gtaattcagcggtttccggagctgcggcggcgcagactgggagggggagccgggggttccgacgtcgcagccgagggaacaagccccaaccggatcctggacaggcaccccggcttggcgctgtctctccccctcggctcggagaggcccttcggcctgagggagcctcgccgcccgtccccggcacacgcgcagccccggcctctcggcctctgccggagaaacaggatggcccaatggaatcagctacagcagcttgacacacggtacctggagcagctccatcagctctacagtgacagcttcccaatggagctgcggcagtttctggccccttggattgagagtcaagattgggcatatgcggccagcaaagaatcacatgccactttggtgtttcataatctcctgggagagattgaccagcagtatagccgcttcctgcaagagtcgaatgttctctatcagcacaatctacgaagaatcaagcagtttcttcagagcaggtatcttgagaagccaatggagattgcccggattgtggcccggtgcctgtgggaagaatcacgccttctacagactgcagccactgcggcccagcaagggggccaggccaaccaccccacagcagccgtggtgacggagaagcagcagatgctggagcagcaccttcaggatgtccggaagagagtgcaggatctagaacagaaaatgaaagtggtagagaatctccaggatgactttgatttcaactataaaaccctcaagagtcaaggagacatgcaagatctgaatggaaacaaccagtcagtgaccaggcagaagatgcagcagctggaacagatgctcactgcgctggaccagatgcggagaagcatcgtgagtgagctggcggggcttttgtcagcgatggagtacgtgcagaaaactctcacggacgaggagctggctgactggaagaggcggcaacagattgcctgcattggaggcccgcccaacatctgcctagatcggctagaaaactggataacgtcattagcagaatctcaacttcagacccgtcaacaaattaagaaactggaggagttgcagcaaaaagtttcctacaaaggggaccccattgtacagcaccggccgatgctggaggagagaatcgtggagctgtttagaaacttaatgaaaagtgcctttgtggtggagcggcagccctgcatgcccatgcatcctgaccggcccctcgtcatcaagaccggcgtccagttcactactaaagtcaggttgctggtcaaattccctgagttgaattatcagcttaaaattaaagtgtgcattgacaaagactctggggacgttgcagctctcagaggatcccggaaatttaacattctgggcacaaacacaaaagtgatgaacatggaagaatccaacaacggcagcctctctgcagaattcaaacacttgaccctgagggagcagagatgtgggaatgggggccgagccaattgtgatgcttccctgattgtgactgaggagctgcacctgatcacctttgagaccgaggtgtatcaccaaggcctcaagattgacctagagacccactccttgccagttgtggtgatctccaacatctgtcagatgccaaatgcctgggcgtccatcctgtggtacaacatgctgaccaacaatcccaagaatgtaaacttttttaccaagcccccaattggaacctgggatcaagtggccgaggtcctgagctggcagttctcctccaccaccaagcgaggactgagcatcgagcagctgactacactggcagagaaactcttgggacctggtgtgaattattcagggtgtcagatcacatgggctaaattttgcaaagaaaacatggctggcaagggcttctccttctgggtctggctggacaatatcattgaccttgtgaaaaagtacatcctggccctttggaacgaagggtacatcatgggctttatcagtaaggagcgggagcgggccatcttgagcactaagcctccaggcaccttcctgctaagattcagtgaaagcagcaaagaaggaggcgtcactttcacttgggtggagaaggacatcagcggtaagacccagatccagtccgtggaaccatacacaaagcagcagctgaacaacatgtcatttgctgaaatcatcatgggctataagatcatggatgctaccaatatcctggtgtctccactggtctatctctatcctgacattcccaaggaggaggcattcggaaagtattgtcggccagagagccaggagcatcctgaagctgacccaggtagcgctgccccatacctgaagaccaagtttatctgtgtgacaccaacgacctgcagcaataccattgacctgccgatgtccccccgcactttagattcattgatgcagtttggaaataatggtgaaggtgctgaaccctcagcaggagggcagtttgagtccctcacctttgacatggagttgacctcggagtgcgctacctcccccatgtgaggagctgagaacggaagctgcagaaagatacgactgaggcgcctacctgcattctgccacccctcacacagccaaaccccagatcatctgaaactactaactttgtggttccagattttttttaatctcctacttctgctatctttgagcaatctgggcacttttaaaaatagagaaatgagtgaatgtgggtgatctgcttttatctaaatgcaaataaggatgtgttctctgagacccatgatcaggggatgtggcggggggtggctagagggagaaaaaggaaatgtcttgtgttgttttgttcccctgccctcctttctcagcagctttttgttattgttgttgttgttcttagacaagtgcctcctggtgcctgcggcatccttctgcctgtttctgtaagcaaatgccacaggccacctatagctacatactcctggcattgcactttttaaccttgctgacatccaaatagaagataggactatctaagccctaggtttctttttaaattaagaaataataacaattaaagggcaaaaaacactgt

SEQ ID NO: 26095 - protein, 770 aa, Homo sapiens; identical to SEQ ID NO: 3479

SEQ ID NO: 26096 - DNA, 776 bp, Homo sapiens
ggcttctccttctgggtctggctggacaatatcattgacctttaaggagcgggagcgggccatcttgagcactaagcctccaggcaccttcctgctaagattcagtgaaagcagcaaagaaggaggcgtcactttcacttgggtggagaaggacatcagcggtaagacccagatccagtccgtggaaccatacacaaagcagcagctgaacaacatgtcatttgctgaaatcatcatgggctataagatcatggatgctaccaatatcctggtgtctccactggtctatctctatcctgacattcccaaggaggaggcattcggaaagtattgtcggccagagagccaggagcatcctgaagctgacccaggtagcgctgccccatacctgaagaccaagtttatctgtgtgacaccaacgacctgcagcaataccattgacctgccgatgtccccccgcactttagattcattgatgcagtttggaaataatggtgaaggtgctgaaccctcagcaggagggcagtttgagtccctcacctttgacatggagttgacctcggagtgcgctacctcccccatgtgaggagctgagaacggaagctgcagaaagatacgactgaggcgcctacctgcattctgccacccctcacacagccaaaccccagatcatctgaaactactaactttgtggttccagattttttttaatctcctacttctgctatctttgagcaatctgggcacttttaaaaatagagaaatgagtgaatgtg

SEQ ID NO: 26097 - protein, 123 aa, Homo sapiens; identical to SEQ ID NO: 26081

SEQ ID NO: 26098 - DNA, 2731 bp, Homo sapiens
gtaattcagcggtttccggagctgcggcggcgcagactgggagggggagccgggggttccgacgtcgcagccgagggaacaagccccaaccggatcctggacaggcaccccggcttggcgctgtctctccccctcggctcggagaggcccttcggcctgagggagcctcgccgcccgtccccggcacacgcgcagccccggcctctcggcctctgccggagaaacaggatggcccaatggaatcagctacagcagcttgacacacggtacctggagcagctccatcagctctacagtgacagcttcccaatggagctgcggcagtttctggccccttggattgagagtcaagattgggcatatgcggccagcaaagaatcacatgccactttggtgtttcataatctcctgggagagattgaccagcagtatagccgcttcctgcaagagtcgaatgttctctatcagcacaatctacgaagaatcaagcagtttcttcagagcaggtatcttgagaagccaatggagattgcccggattgtggcccggtgcctgtgggaagaatcacgccttctacagactgcagccactgcggcccagcaagggggccaggccaaccaccccacagcagccgtggtgacggagaagcagcagatgctggagcagcaccttcaggatgtccggaagagagtgcaggatctagaacagaaaatgaaagtggtagagaatctccaggatgactttgatttcaactataaaaccctcaagagtcaaggagacatgcaagatctgaatggaaacaaccagtcagtgaccaggcagaagatgcagcagctggaacagatgctcactgcgctggaccagatgcggagaagcatcgtgagtgagctggcggggcttttgtcagcgatggagtacgtgcagaaaactctcacggacgaggagctggctgactggaagaggcggcaacagattgcctgcattggaggcccgcccaacatctgcctagatcggctagaaaactggataacgtcattagcagaatctcaacttcagacccgtcaacaaattaagaaactggaggagttgcagcaaaaagtttcctacaaaggggaccccattgtacagcaccggccgatgctggaggagagaatcgtggagctgtttagaaacttaatgaaaagtgcctttgtggtggagcggcagccctgcatgcccatgcatcctgaccggcccctcgtcatcaagaccggcgtccagttcactactaaagtcaggttgctggtcaaattccctgagttgaattatcagcttaaaattaaagtgtgcattgacaaagactctggggacgttgcagctctcagaggatcccggaaatttaacattctgggcacaaacacaaaagtgatgaacatggaagaatccaacaacggcagcctctctgcagaattcaaacacttgaccctgagggagcagagatgtgggaatgggggccgagccaattgtgatgcttccctgattgtgactgaggagctgcacctgatcacctttgagaccgaggtgtatcaccaaggcctcaagattgacctagagacccactccttgccagttgtggtgatctccaacatctgtcagatgccaaatgcctgggcgtccatcctgtggtacaacatgctgaccaacaatcccaagaatgtaaacttttttaccaagcccccaattggaacctgggatcaagtggccgaggtcctgagctggcagttctcctccaccaccaagcgaggactgagcatcgagcagctgactacactggcagagaaactcttgggacctggtgtgaattattcagggtgtcagatcacatgggctaaattttgcaaagaaaacatggctggcaagggcttctccttctgggtctggctggacaatatcattgaccttgtgaaaaagtacatcctggccctttggaacgaagggtacatcatgggctttatcagtaaggagcgggagcgggccatcttgagcactaagcctccaggcaccttcctgctaagattcagtgaaagcagcaaagaaggaggcgtcactttcacttgggtggagaaggacatcagcggtaagacccagatccagtccgtggaaccatacacaaagcagcagctgaacaacatgtcatttgctgaaatcatcatgggctataagatcatggatgctaccaatatcctggtgtctccactggtctatctctatcctgacattcccaaggaggaggcattcggaaagtattgtcggccagagagccaggagcatcctgaagctgacccaggtagcgctgccccatacctgaagaccaagtttatctgtgtgacaccaacgacctgcagcaataccattgacctgccgatgtccccccgcactttagattcattgatgcagtttggaaataatggtgaaggtgctgaaccctcagcaggagggcagtttgagtccctcacctttgacatggagttgacctcggagtgcgctacctcccccatgtgaggagctgagaacggaagctgcagaaagatacgactgaggcgcctacctgcattctgccacccctcacacagccaaaccccagatcatctgaaactactaactttgtggttccagattttttttaatctcctacttctgctatctttgagcaatctgggcacttttaaaaatagagaaatgagtgaatgtg

SEQ ID NO: 26099 - protein, 770 aa, Homo sapiens; identical to SEQ ID NO: 3479

SEQ ID NO: 26100 - DNA, 543 bp, Homo sapiens
tggaagcccctgggctatgtttagtactcaaagtgaccttgtgtgtttaaaaagcttgagcttttatttttctgttggagaccagagtttgatggcttgtgtgtgtgtgttttgttcttttttttttttccattgtgtcttgtcaaccccccgtttcccctcctgctgccccccatttcctacagaacgacctgcagcaataccattgacctgccgatgtccccccgcactttagattcattgatgcagtttggaaataatggtgaaggtgctgaaccctcagcaggagggcagtttgagtccctcacctttgacatggagttgacctcggagtgcgctacctcccccatgtgaggagctgagaacggaagctgcagaaagatacgactgaggcgcctacctgcattctgccacccctcacacagccaaaccccagatcatctgaaactactaactttgtggttccagattttttttaatctcctacttctgctatctttgagcaatctgggcacttttaaaaatagagaaatgagtgaatgt

SEQ ID NO: 26101 - protein, 45 aa, Homo sapiens; identical to SEQ ID NO: 26075

SEQ ID NO: 26102 - DNA, 1099 bp, Homo sapiens
aggtctcttagctattgaagatgtacctggacccaggtctccggtcttctagttgaagcaattgtactgccttacaaagtcacattctctttggtgctttttgattgacgtatttatccaactagaaagttactcatgccctcatccaaaaatgtggtagaggccagattagtgctggtaggaataagagatataacctttggctttggaaccacaagcattagcagtctccatgttctttaaagacttggtgatattggtatttaggctggacaccatgcaaagactacacaggctcggttcctgcatgcagagaagttatctaagagatatgaccaggccggaatagaatgctcagaccacgtggaggctgttaaacttttacataatctagggaaagaagggacacaaggtggcattagtctagggtcaggtgggaaaaggttatgctgaaaagtctctgcagctcaggacagctttgtgcaaagaactgaagttcacagctgctagtgcctgggagatcaaatagtataaatgagggcagacaaccctgaggggcagatggagctttccagacaatcttggcatgaggatgagtgagtttcaaatcagtcctgccgaggcagatggcttcctccagctctgcttactgaatgcgaagtcacagtcagtaagaaaactggttttcttcttcccaggcgctgccccatacctgaagaccaagtttatctgtgtgacaccaacgacctgcagcaataccattgacctgccgatgtccccccgcactttagattcattgatgcagtttggaaataatggtgaaggtgctgaaccctcagcaggagggcagtttgagtccctcacctttgacatggagttgacctcggagtgcgctacctcccccatgtgaggagctgagaacggaagctgcagaaagatacgactgaggcgcctacctgcattctgccacccctcacacagccaaaccccagatcatctgaaactactaactttgtggttccagattttttttaatctcctacttctgctatctttgagcaatctgggcacttttaaaaatagagaaatgagtgaatgt

SEQ ID NO: 26103 - protein, 107 aa, Homo sapiens; identical to SEQ ID NO: 26077

SEQ ID NO: 26104 - DNA, 1049 bp, Homo sapiens
aggtctcttagctattgaagatgtacctggacccaggtctccggtcttctagttgaagcaattgtactgccttacaaagtcacattctctttggtgctttttgattgacgtatttatccaactagaaagttactcatgccctcatccaaaaatgtggtagaggccagattagtgctggtaggaataagagatataacctttggctttggaaccacaagcattagcagtctccatgttctttaaagacttggtgatattggtatttaggctggacaccatgcaaagactacacaggctcggttcctgcatgcagagaagttatctaagagatatgaccaggccggaatagaatgctcagaccacgtggaggctgttaaacttttacataatctagggaaagaagggacacaaggtggcattagtctagggtcaggtgggaaaaggttatgctgaaaagtctctgcagctcaggacagctttgtgcaaagaactgaagttcacagctgctagtgcctgggagatcaaatagtataaatgagggcagacaaccctgaggggcagatggagctttccagacaatcttggcatgaggatgagtgagtttcaaatcagtcctgccgaggcagatggcttcctccagctctgcttactgaatgcgaagtcacagtcagtaagaaaactggttttcttcttcccaggcgctgccccatacctgaagaccaagtttatctgtgtgacaccattcattgatgcagtttggaaataatggtgaaggtgctgaaccctcagcaggagggcagtttgagtccctcacctttgacatggagttgacctcggagtgcgctacctcccccatgtgaggagctgagaacggaagctgcagaaagatacgactgaggcgcctacctgcattctgccacccctcacacagccaaaccccagatcatctgaaactactaactttgtggttccagattttttttaatctcctacttctgctatctttgagcaatctgggcacttttaaaaatagagaaatgagtgaatgt

SEQ ID NO: 26105 - protein, 59 aa, Homo sapiens; identical to SEQ ID NO: 26079

SEQ ID NO: 26106 - DNA, 642 bp, Homo sapiens
gctctctttcgcccaggttggagtgcagtagcgccatcttggctctctacaacctctgcctccagggttcaaagtgacagactgtcaaaacaaaacaaaaacaaaaacaaggctgggcactgtggctcacacctataatcccagcactataatttatatataacatataagtacatgtcctcttacacattaaaatataccttattttcaatagttgcacactctaaatactaatcccttgcccctccacccagtcactgtcttccccttcaaacgtgatgctcccagctcttctactctagtgtaaaccatactcccatgcagctaataataatttcctccagaaaccctttcttcagaccatctggcacactgacatggttcagttacaggcaaaaagccatatgctgggctgaaatctgggcctcaaaccttctagcatctactaagaagcactgtgccagcagggcatcctgttaactgccctcactttcccttctcgtgtttcaggcatgttttgggggacgtatgtgtattgatcccctctttatttttattttttgacacagtatctcactctatcagccaggctggagtgcggtggcatgatcaccgctcactacagccttgaactccttggct

SEQ ID NO: 26107 - protein, 53 aa, Homo sapiens
MQLIIISSRNPFFRPSGTLTWFSYRQKAICWAEIWASNLLASTKKHCASRASC

SEQ ID NO: 26108 - DNA, 389 bp, Homo sapiens
ggctctttgaggtcttttccagtaaaacagttacagtaaagctgcttggcagtgattttcctagacactttggctagtcatctcctgtgactgctgttaattaaatatggtttgtagctaagcagcctgtaaggagaagactatggaagtatttgcatattctctccttgaaaatactacctggtctttggctttaagttatacttttattttcccctgtagaataactattaaagtattacctatggtgattagactaagaagtaaaacatgaaatcagtcattgttggtgccctggtgccttcttttttttttttttgagacagagtctcactctgttgcccagatcgccccactgcacaccagcccgggtgacagtatttcatctc

SEQ ID NO: 26109 - protein, 43 aa, Homo sapiens
MEVFAYSLLENTTWSLALSYTFIFPCRITIKVLPMVIRLRSKT

SEQ ID NO: 26110 - DNA, 406 bp, Homo sapiens
tgtaatcccagcactttgggaggccgaggcgggagacaagcttttctatgaaaatcttatcaaaatgtataatgtacttagaaaactaagtgacctcattacacatcatagttttgcatgatgtaaccactcttcagagaatatctcattttgtccttcagctcccacacaagagaaggttaaggaaattccactactcatgaaattataatcccacaatgtaagtgaagtggtggctgtgcctaggaaagaaagagaatacacgcttagagagaatctagaaagaaacattatccagtttgtgttggggatagcccatgatctaaattctaaaaagcacacccatatagaacctagcctgggctgggtgcggtggctcatgcctgtaatcccagcactttgggag

SEQ ID NO: 26111 - protein, 37 aa, Homo sapiens
VTSLHIIVLHDVTTLQRISHFVLQLPHKRRLRKFHYS

SEQ ID NO: 26112 - DNA, 604 bp, Homo sapiens
ctgttatggtcagttctcatttgtcatgttaggattactgcaactcttacccagccgggtgtggtggctcatgcctgtaattccagcactttgggaggctgtgggcggatcacgagctcctcacattgtgatccgcctgcctcggcctcccaaagtgctgggattacaggcgtgagccagcacgcctggccttccaaattccttttaacagcctagcaaaagaataataaggaaggtaaatctgcccctacaagaaaataatgcttcgacgatccggctttccttcctgctacccccagccataagaataaatgaccttgctcatcactgaaattttacctgacctttgaatttttaactgcgtcagccaaagaacttatattttgagtattcctaaggtgattgctattgtagttttgaaacacttggttggtatgtttgagggtttcatggtccaaagttactatagcagttaaaagagtggactatcaggtcagacctattgggctttaatcccagttctgccttctcttagaccttgggcctgttgttttcacttctctggttttcagtttctctgtccacaattgtggaaacgaggtcc

SEQ ID NO: 26113 - protein, 49 aa, Homo sapiens [sequence omitted]

SEQ ID NO: 26114 - DNA, 1693 bp, Homo sapiens
gcgaggagctgggcgagggcgagcggcccgaggaggacgcagcggcgctggagctttcgtcggacgaggcggtggaggttgaggaggttattgaggagtcccgcgcagagcgtatcaagcgcagcggcctgcggcgcgtggacgacttcaagaaggccttctccaaggagaagatggagaagaccaaggtgcgtacccgcgagaacctggagaagacgcgcctcaagaccaaggaaaacctggagaagacgcggcacaccctggagaagcgcatgaacaagctgggcacgcgcctggtgcccgccgagcggcgcgagaaactgaagacgtcgcgggacaagttgcgcaaatccttcacgcccgaccacgtggtgtacgcgcgctccaagaccgcggtctacaaggtgccacccttcaccttccacgtcaagaagatccgcgagggccaggtggaagtgctcaaggccaccgagatggtggaggtgggcgccgacgacgacgagggcggcgcggagcgcggggaggccggcgacctgcggcgcgggagcagccccgacgtgcacgcgctgctggagatcaccgaggagtcggacgccgtgctggtggacaagagcgacagcgactgagccgcccccgctgccacccaccccattcctcgctccttccgaacttcctctttcgcattctctctcggctcgagctggctgagatttttctaaattgaaaacacgcccccctccccacacctccaggaactccactcccagtcttagagctgttaggacccgatggggaggcagcccccgcagtggacaacccccgcttggacacagtccgagtggaatgggaagggaatggtcaatccctgtcctggttgtccaagtcgggatctcagaggaaattgcagtgattccacggttaggcccccctgggggggctgccttcccctcagcctctccccacaccacccacccagctgctgtcattccgctcactgagctcttcttcattctcaccctgatccctgggggactcaaagccaaaactgcccaaagaggaaagattgaatccttccctagagctagtatcctaaagctgcagagctagcccagacctcattggtttccttgtccttggggtgcttttcctgaatctttgcgggtgaagggagtgttgctcccagtccagaggcctgattctgtttggactgggttctcaagacacgaccaggttctcaagacacgagtccccttgttcctccccattaaagggggtttgtcagaagcaagaacagcccctctccccagtcacagcctgaagggaggccccgagagcttcctccttccccccacctgctccttaccttctctgccctgctttttagaactgcagttcattgttttaagggattgggggagggagcctggggacacaaaccttttatacaatacaaagctttgctttttttttttttttcttccttttccctttctcggttctcttctctcctctgaatggctgaagacccctctgccgagggaggttggggattgtgggacaaggtcccttggtgctgatggcctgaaggggcctgagctgtgggcagatgcagttttctgtgggcttggggaacctctcacgttgctgtgtcctggtgagcagcccgaccaataaacctgcttttctaaaagga

SEQ ID NO: 26115 - protein, 87 aa, Homo sapiens
MGREWSIPVLVVQVGISEEIAVIPRLGPPGGAAFPSASPHTTHPAAVIPLTELFFILTLIPGGLKAKTAQRGKIESFPRASILKLQS

SEQ ID NO: 26116 - DNA, 1776 bp, Homo sapiens
aggatgaagtgaagctgccggccaaactgagcatcagcaaatcgctgaaagagtcggaggcgctgccagagaaggagggcgaggagctgggcgagggcgagcggcccgaggaggacgcagcggcgctggagctttcgtcggacgaggcggtggaggttgaggaggttattgaggagtcccgcgcagagcgtatcaagcgcagcggcctgcggcgcgtggacgacttcaagaaggccttctccaaggagaagatggagaagaccaaggtgcgtacccgcgagaacctggagaagacgcgcctcaagaccaaggaaaacctggagaagacgcggcacaccctggagaagcgcatgaacaagctgggcacgcgcctggtgcccgccgagcggcgcgagaaactgaagacgtcgcgggacaagttgcgcaaatccttcacgcccgaccacgtggtgtacgcgcgctccaagaccgcggtctacaaggtgccacccttcaccttccacgtcaagaagatccgcgagggccaggtggaagtgctcaaggccaccgagatggtggaggtgggcgccgacgacgacgagggcggcgcggagcgcggggaggccggcgacctgcggcgcgggagcagccccgacgtgcacgcgctgctggagatcaccgaggagtcggacgccgtgctggtggacaagagcgacagcgactgagccgcccccgctgccacccaccccattcctcgctccttccgaacttcctctttcgcattctctctcggctcgagctggctgagatttttctaaattgaaaacacgcccccctccccacacctccaggaactccactcccaaagggggcagcagcaggctgggagttaggagggagagcagggtgccggccctgccaccaagttgagagctggaggggaggtggggagagaacatcacagagcagccagccctggttcactcctggcagtttcttctcaagctccttccctaggagcatggtggcacgtgcctgtggtctcagctacttgggaggctgaggcgggaggatcgccagagcccaggagtttgaggctgcagtgagctatgagggtgcctctgtgctccatcctaggcaacagagtgatacgctgtttaaaaaggaaaaaatccttccctagagctagtatcctaaagctgcagagctagcccagacctcattggtttccttgtccttggggtgcttttcctgaatctttgcgggtgaagggagtgttgctcccagtccagaggcctgattctgtttggactgggttctcaagacacgaccaggttctcaagacacgagtccccttgttcctccccattaaagggggtttgtcagaagcaagaacagcccctctccccagtcacagcctgaagggaggccccgagagcttcctccttccccccacctgctccttaccttctctgccctgctttttagaactgcagttcattgttttaagggattgggggagggagcctggggacacaaaccttttatacaatacaaagctttgctttttttttttttttcttccttttccctttctcggttctcttctctcctctgaatggctgaagacccctctgccgagggaggttggggattgtgggacaaggtcccttggtgctgatggcctgaaggggcctgagctgtgggcagatgcagttttctgtgggcttggggaacctctcacgttgctgtgtcctggtgagcagcccgaccaataaacctgcttttctaaaagga

SEQ ID NO: 26117 - protein, 150 aa, Homo sapiens
MEKTKVRTRENLEKTRLKTKENLEKTRHTLEKRMNKLGTRLVPAERREKLKTSRDKLRKSFTPDHVVYARSKTAVYKVPPFTFHVKKIREGQVEVLKATEMVEVGADDDEGGAERGEAGDLRRGSSPDVHALLEITEESDAVLVDKSDSD

SEQ ID NO: 26118 - DNA, 2640 bp, Homo sapiens
aggatgaagtgaagctgccggccaaactgagcatcagcaaatcgctgaaagagtcggaggcgctgccagagaaggagggcgaggagctgggcgagggcgagcggcccgaggaggacgcagcggcgctggagctttcgtcggacgaggcggtggaggttgaggaggttattgaggagtcccgcgcagagcgtatcaagcgcagcggcctgcggcgcgtggacgacttcaagaaggccttctccaaggagaagatggagaagaccaaggtgcgtacccgcgagaacctggagaagacgcgcctcaagaccaaggaaaacctggagaagacgcggcacaccctggagaagcgcatgaacaagctgggcacgcgcctggtgcccgccgagcggcgcgagaaactgaagacgtcgcgggacaagttgcgcaaatccttcacgcccgaccacgtggtgtacgcgcgctccaagaccgcggtctacaaggtgccacccttcaccttccacgtcaagaagatccgcgagggccaggtggaagtgctcaaggccaccgagatggtggaggtgggcgccgacgacgacgagggcggcgcggagcgcggggaggccggcgacctgcggcgcgggagcagccccgacgtgcacgcgctgctggagatcaccgaggagtcggacgccgtgctggtggacaagagcgacagcgactgagccgcccccgtgccttcccctcagcctctccccacaccacccacccagctgctgtcattccgctcactgagctcttcttcattctcaccctgatccctgggggactcaaagccaaaactgcccaaagaggaaagattgaatcctaaaggggatccctgcccccatgggaggccccctactagaaggacgtgaaagcagcttttgggggaaactgaggcagtggggaagacagagcagaatgagccctcaccctggctgggggtccagcacaggctgtatctgcagagggtcccagaggaacgctggagccaagagaagccctgggaaggaggggtggggaacgacatgcatgtgagggatggcacactgatgtgtttatgcacctgtacacaggagcgcatggccatggctttggaaaggagaatggaaaaatagaagaaggtcggccgggcttggtggcttatgcctgtaaccccagcactttgggaggccgaggtgggcggatcacctgaagtcaggagttcgggaccagcctggcaaacaccccatctctactaagcgaaaacccatctctactaaaattacaaaaattagctgggcatggttgcgcatgcctgtaatcccagctactttggaggctgaggtggggagaattgcttgaacctgggaggtggaggttgcagtgagccaaggtcgcgacactgcactccagcctgggtgacagagtgagactccatctcaacagaaggaaaaaaaaggaaaataggagaaggtggaaatgggtgaagagagaagtcccctcactagctgcatgagaaatctatcttactgtggttctccatgggcagcaggaccatttttcagaatcaagagggaggacagtgtgagaaggcgatgatccaaagaagacagagaggtcagccccacccgatccctcaaatgggctcttggaggcacccccaggggcagcccatttctcaaagtccagaaaattagggtcccagaagggggcagcagcaggctgggagttaggagggagagcagggtgccggccctgccaccaagttgagagctggaggggaggtggggagagaacatcacagagcagccagccctggttcactcctggcagtttcttctcaagctccttccctaggagcatggtggcacgtgcctgtggtctcagctacttgggaggctgaggcgggaggatcgccagagcccaggagtttgaggctgcagtgagctatgagggtgcctctgtgctccatcctaggcaacagagtgatacgctgtttaaaaaggaaaaaatccttccctagagctagtatcctaaagctgcagagctagcccagacctcattggtttccttgtccttggggtgcttttcctgaatctttgcgggtgaagggagtgttgctcccagtccagaggcctgattctgtttggactgggttctcaagacacgaccaggttctcaagacacgagtccccttgttcctccccattaaagggggtttgtcagaagcaagaacagcccctctccccagtcacagcctgaagggaggccccgagagcttcctccttccccccacctgctccttaccttctctgccctgctttttagaactgcagttcattgttttaagggattgggggagggagcctggggacacaaaccttttatacaatacaaagctttgctttttttttttttttcttccttttccctttctcggttctcttctctcctctgaatggctgaagacccctctgccgagggaggttggggattgtgggacaaggtcccttggtgctgatggcctgaaggggcctgagctgtgggcagatgcagttttctgtgggcttggggaacctctcacgttgctgtgtcctggtgagcagcccgaccaataaacctgcttttctaaaagga

SEQ ID NO: 26119 - protein, 150 aa, Homo sapiens; identical to SEQ ID NO: 26117

SEQ ID NO: 26120 - DNA, 3271 bp, Homo sapiens
agttctggccgctgtcccggtgcgcacggacgtggctcgagtttcctctgctctccgctctcgcccgctagctctcctcccttccgctcctgcttctctccgggtctcccgctccagctccagccccacccggccggtcccgcacggctccgggtagccatggaggaccccacgctctatattgtcgagcggccgcttcccgggtaccccgacgccgagaccagatccagctgactcaagcacagctggaggagcggcaggcggagatggagggcgcagtgcagagcatccagggcgagctgagcaagctgggcaaggcgcacgccaccacgagcaatacggtgagcaagctgctggagaaggtgcgcaaggtcagcgtcaacgtgaagaccgtgcgcggcagcctggagcgccaggcggggcagatcaagaagctggaggtcaacgaggccgagctgctgcggcgccgcaactttaaagtcatgatctaccaggatgaagtgaagctgccggccaaactgagcatcagcaaatcgctgaaagagtcggaggcgctgccagagaaggagggcgaggagctgggcgagggcgagcggcccgaggaggacgcagcggcgctggagctttcgtcggacgaggcggtggaggttgaggaggttattgaggagtcccgcgcagagcgtatcaagcgcagcggcctgcggcgcgtggacgacttcaagaaggccttctccaaggagaagatggagaagaccaaggtgcgtacccgcgagaacctggagaagacgcgcctcaagaccaaggaaaacctggagaagacgcggcacaccctggagaagcgcatgaacaagctgggcacgcgcctggtgcccgccgagcggcgcgagaaactgaagacgtcgcgggacaagttgcgcaaatccttcacgcccgaccacgtggtgtacgcgcgctccaagaccgcggtctacaaggtgccacccttcaccttccacgtcaagaagatccgcgagggccaggtggaagtgctcaaggccaccgagatggtggaggtgggcgccgacgacgacgagggcggcgcggagcgcggggaggccggcgacctgcggcgcgggagcagccccgacgtgcacgcgctgctggagatcaccgaggagtcggacgccgtgctggtggacaagagcgacagcgactgagccgcccccgctgccacccaccccattcctcgctccttccgaacttcctctttcgcattctctctcggctcgagctggctgagatttttctaaattgaaaacacgcccccctccccacacctccaggaactccactcccagtcttagagtgccttcccctcagcctctccccacaccacccacccagctgctgtcattccgctcactgagctcttcttcattctcaccctgatccctgggggactcaaagccaaaactgcccaaagaggaaagattgaatcctaaaggggatccctgcccccatgggaggccccctactagaaggacgtgaaagcagcttttgggggaaactgaggcagtggggaagacagagcagaatgagccctcaccctggctgggggtccagcacaggctgtatctgcagagggtcccagaggaacgctggagccaagagaagccctgggaaggaggggtggggaacgacatgcatgtgagggatggcacactgatgtgtttatgcacctgtacacaggagcgcatggccatggctttggaaaggagaatggaaaaatagaagaaggtcggccgggcttggtggcttatgcctgtaaccccagcactttgggaggccgaggtgggcggatcacctgaagtcaggagttcgggaccagcctggcaaacaccccatctctactaagcgaaaacccatctctactaaaattacaaaaattagctgggcatggttgcgcatgcctgtaatcccagctactttggaggctgaggtggggagaattgcttgaacctgggaggtggaggttgcagtgagccaaggtcgcgacactgcactccagcctgggtgacagagtgagactccatctcaacagaaggaaaaaaaaggaaaataggagaaggtggaaatgggtgaagagagaagtcccctcactagctgcatgagaaatctatcttactgtggttctccatgggcagcaggaccatttttcagaatcaagagggaggacagtgtgagaaggcgatgatccaaagaagacagagaggtcagccccacccgatccctcaaatgggctcttggaggcacccccaggggcagcccatttctcaaagtccagaaaattagggtcccagaagggggcagcagcaggctgggagttaggagggagagcagggtgccggccctgccaccaagttgagagctggaggggaggtggggagagaacatcacagagcagccagccctggttcactcctggcagtttcttctcaagctccttccctaggagcatggtggcacgtgcctgtggtctcagctacttgggaggctgaggcgggaggatcgccagagcccaggagtttgaggctgcagtgagctatgagggtgcctctgtgctccatcctaggcaacagagtgatacgctgtttaaaaaggaaaaaatccttccctagagctagtatcctaaagctgcagagctagcccagacctcattggtttccttgtccttggggtgcttttcctgaatctttgcgggtgaagggagtgttgctcccagtccagaggcctgattctgtttggactgggttctcaagacacgaccaggttctcaagacacgagtccccttgttcctccccattaaagggggtttgtcagaagcaagaacagcccctctccccagtcacagcctgaagggaggccccgagagcttcctccttccccccacctgctccttaccttctctgccctgctttttagaactgcagttcattgttttaagggattgggggagggagcctggggacacaaaccttttatacaatacaaagctttgctttttttttttttttcttccttttccctttctcggttctcttctctcctctgaatggctgaagacccctctgccgagggaggttggggattgtgggacaaggtcccttggtgctgatggcctgaaggggcctgagctgtgggcagatgcagttttctgtgggcttggggaacctctcacgttgctgtgtcctggtgagcagcccgaccaataaacctgcttttctaaaagga

SEQ ID NO: 26121 - protein, 309 aa, Homo sapiens
MEGAVQSIQGELSKLGKAHATTSNTVSKLLEKVRKVSVNVKTVRGSLERQAGQIKKLEVNEAELLRRRNFKVMIYQDEVKLPAKLSISKSLKESEALPEKEGEELGEGERPEEDAAALELSSDEAVEVEEVIEESRAERIKRSGLRRVDDFKKAFSKEKMEKTKVRTRENLEKTRLKTKENLEKTRHTLEKRMNKLGTRLVPAERREKLKTSRDKLRKSFTPDHVVYARSKTAVYKVPPFTFHVKKIREGQVEVLKATEMVEVGADDDEGGAERGEAGDLRRGSSPDVHALLEITEESDAVLVDKSDSD

SEQ ID NO: 26122 - DNA, 3305 bp, Homo sapiens
agcagttctggccgctgtcccggtgcgcacggacgtggctcgagtttcctctgctctccgctctcgcccgctagctctcctcccttccgctcctgcttctctccgggtctcccgctccagctccagccccacccggccggtcccgcacggctccgggtagccatggaggaccccacgctctatattgtcgagcggccgcttcccgggtaccccgacgccgaggccccggagccttcctccgctggggctcaggcagcggaggagccgtcgggggccggctcagaagagctgatcaagtcggaccaggtgaacggcgtgctggtgctgagcctcctggacaaaatcatcggggccgtagaccagatccagctgactcaagcacagctggaggagcggcaggcggagatggagggcgcagtgcagagcatccagggcgagctgagcaagagctgggcgagggcgagcggcccgaggaggacgcagcggcgctggagctttcgtcggacgaggcggtggaggttgaggaggttattgaggagtcccgcgcagagcgtatcaagcgcagcggcctgcggcgcgtggacgacttcaagaaggccttctccaaggagaagatggagaagaccaaggtgcgtacccgcgagaacctggagaagacgcgcctcaagaccaaggaaaacctggagaagacgcggcacaccctggagaagcgcatgaacaagctgggcacgcgcctggtgcccgccgagcggcgcgagaaactgaagacgtcgcgggacaagttgcgcaaatccttcacgcccgaccacgtggtgtacgcgcgctccaagaccgcggtctacaaggtgccacccttcaccttccacgtcaagaagatccgcgagggccaggtggaagtgctcaaggccaccgagatggtggaggtgggcgccgacgacgacgagggcggcgcggagcgcggggaggccggcgacctgcggcgcgggagcagccccgacgtgcacgcgctgctggagatcaccgaggagtcggacgccgtgctggtggacaagagcgacagcgactgagccgcccccgctgccacccaccccattcctcgctccttccgaacttcctctttcgcattctctctcggctcgagctggctgagatttttctaaattgaaaacacgcccccctccccacacctccaggaactccactcccagtcttagagctgttaggacccgatggggaggcagcccccgcagtggacaacccccgcttggacacagtccgagtggaatgggaagggaatggtcaatccctgtcctggttgtccaagtcgggatctcagaggaaattgcagtgattccacggttaggcccccctgggggggctgccttcccctcagcctctccccacaccacccacccagctgctgtcattccgctcactgagctcttcttcattctcaccctgatccctgggggactcaaagccaaaactgcccaaagaggaaagattgaatcctaaaggggatccctgcccccatgggaggccccctactagaaggacgtgaaagcagcttttgggggaaactgaggcagtggggaagacagagcagaatgagccctcaccctggctgggggtccagcacaggctgtatctgcagagggtcccagaggaacgctggagccaagagaagccctgggaaggaggggtggggaacgacatgcatgtgagggatggcacactgatgtgtttatgcacctgtacacaggagcgcatggccatggctttggaaaggagaatggaaaaatagaagaaggtcggccgggcttggtggcttatgcctgtaaccccagcactttgggaggccgaggtgggcggatcacctgaagtcaggagttcgggaccagcctggcaaacaccccatctctactaagcgaaaacccatctctactaaaattacaaaaattagctgggcatggttgcgcatgcctgtaatcccagctactttggaggctgaggtggggagaattgcttgaacctgggaggtggaggttgcagtgagccaaggtcgcgacactgcactccagcctgggtgacagagtgagactccatctcaacagaaggaaaaaaaaggaaaataggagaaggtggaaatgggtgaagagagaagtcccctcactagctgcatgagaaatctatcttactgtggttctccatgggcagcaggaccatttttcagaatcaagagggaggacagtgtgagaaggcgatgatccaaagaagacagagaggtcagccccacccgatccctcaaatgggctcttggaggcacccccaggggcagcccatttctcaaagtccagaaaattagggtcccagaagggggcagcagcaggctgggagttaggagggagagcagggtgccggccctgccaccaagttgagagctggaggggaggtggggagagaacatcacagagcagccagccctggttcactcctggcagtttcttctcaagctccttccctaggagcatggtggcacgtgcctgtggtctcagctacttgggaggctgaggcgggaggatcgccagagcccaggagtttgaggctgcagtgagctatgagggtgcctctgtgctccatcctaggcaacagagtgatacgctgtttaaaaaggaaaaaatccttccctagagctagtatcctaaagctgcagagctagcccagacctcattggtttccttgtccttggggtgcttttcctgaatctttgcgggtgaagggagtgttgctcccagtccagaggcctgattctgtttggactgggttctcaagacacgaccaggttctcaagacacgagtccccttgttcctccccattaaagggggtttgtcagaagcaagaacagcccctctccccagtcacagcctgaagggaggccccgagagcttcctccttccccccacctgctccttaccttctctgccctgctttttagaactgcagttcattgttttaagggattgggggagggagcctggggacacaaaccttttatacaatacaaagctttgctttttttttttttttcttccttttccctttctcggttctcttctctcctctgaatggctgaagacccctctgccgagggaggttggggattgtgggacaaggtcccttggtgctgatggcctgaaggggcctgagctgtgggcagatgcagttttctgtgggcttggggaacctctcacgttgctgtgtcctggtgagcagcccgaccaataaacctgcttttctaaaagga

SEQ ID NO: 26123 - protein, 184 aa, Homo sapiens
MEDPTLYIVERPLPGYPDAEAPEPSSAGAQAAEEPSGAGSEELIKSDQVNGVLVLSLLDKIIGAVDQIQLTQAQLEERQAEMEGAVQSIQGELSKSWARASGPRRTQRRWSFRRTRRWRLRRLLRSPAQSVSSAAACGAWTTSRRPSPRRRWRRPRCVPARTWRRRASRPRKTWRRRGTPWRSA

SEQ ID NO: 26124 - DNA, 3831 bp, Homo sapiens
acctgattccgttcctcagctcgcattcctccgcccgtcccgctcccgccgccagcggaggccctagtctcccgctccaactattccaaccatcccgggaagggtggggcgctcggctcttgggtccccctccgccgccccgcctcgtcgatctccccttctgccccggtccctccctttctggggtggggccagccaatcagcgatcagactccggagtttggcccgggagctggggagctcaccgatcccccgcccagcagttctggccgctgtcccggtgcgcacggacgtggctcgagtttcctctgctctccgctctcgcccgctagctctcctcccttccgctcctgcttctctccgggtctcccgctccagctccagccccacccggccggtcccgcacggctccgggtagccatggaggaccccacgctctatattgtcgagcggccgcttcccgggtaccccgacgccgaggccccggagccttcctccgctggggctcaggcagcggaggagccgtcgggggccggctcagaagagctgatcaagtcggaccaggtgaacggcgtgctggtgctgagcctcctggacaaaatcatcggggccgtagaccagatccagctgactcaagcacagctggaggagcggcaggcggagatggagggcgcagtgcagagcatccagggcgagctgagcaagctgggcaaggcgcacgccaccacgagcaatacggtgagcaagctgctggagaaggtgcgcaaggtcagcgtcaacgtgaagaccgtgcgcggcagcctggagcgccaggcggggcagatcaagaagctggaggtcaacgaggccgagctgctgcggcgccgcaactttaaagtcatgatctaccaggatgaagtgaagctgccggccaaactgagcatcagcaaatcgctgaaagagtcggaggcgctgccagagaaggagggcgaggagctgggcgagggcgagcggcccgaggaggacgcagcggcgctggagctttcgtcggacgaggcggtggaggttgaggaggttattgaggagtcccgcgcagagcgtatcaagcgcagcggcctgcggcgcgtggacgacttcaagaaggccttctccaaggagaagatggagaagaccaaggtgcgtacccgcgagaacctggagaagacgcgcctcaagaccaaggaaaacctggagaagacgcggcacaccctggagaagcgcatgaacaagctgggcacgcgcctggtgcccgccgagcggcgcgagaaactgaagacgtcgcgggacaagttgcgcaaatccttcacgcccgaccacgtggtgtacgcgcgctccaagaccgcggtctacaaggtgccacccttcaccttccacgtcaagaagatccgcgagggccaggtggaagtgctcaaggccaccgagatggtggaggtgggcgccgacgacgacgagggcggcgcggagcgcggggaggccggcgacctgcggcgcgggagcagccccgacgtgcacgcgctgctggagatcaccgaggagtcggacgccgtgctggtggacaagagcgacagcgactgagccgcccccgctgccacccaccccattcctcgctccttccgaacttcctctttcgcattctctctcggctcgagctggctgagatttttctaaattgaaaacacgcccccctccccacacctccaggaactccactcccagtcttagagctgttaggacccgatggggaggcagcccccgcagtggacaacccccgcttggacacagtccgagtggaatgggaagggaatggtcaatccctgtcctggttgtccaagtcgggatctcagaggaaattgcagtgattccacggttaggcccccctgggggggctgccttcccctcagcctctccccacaccacccacccagctgctgtcattccgctcactgagctcttcttcattctcaccctgatccctgggggactcaaagccaaaactgcccaaagaggaaagattgaatcctaaaggggatccctgcccccatgggaggccccctactagaaggacgtgaaagcagcttttgggggaaactgaggcagtggggaagacagagcagaatgagccctcaccctggctgggggtccagcacaggctgtatctgcagagggtcccagaggaacgctggagccaagagaagccctgggaaggaggggtggggaacgacatgcatgtgagggatggcacactgatgtgtttatgcacctgtacacaggagcgcatggccatggctttggaaaggagaatggaaaaatagaagaaggtcggccgggcttggtggcttatgcctgtaaccccagcactttgggaggccgaggtgggcggatcacctgaagtcaggagttcgggaccagcctggcaaacaccccatctctactaagcgaaaacccatctctactaaaattacaaaaattagctgggcatggttgcgcatgcctgtaatcccagctactttggaggctgaggtggggagaattgcttgaacctgggaggtggaggttgcagtgagccaaggtcgcgacactgcactccagcctgggtgacagagtgagactccatctcaacagaaggaaaaaaaaggaaaataggagaaggtggaaatgggtgaagagagaagtcccctcactagctgcatgagaaatctatcttactgtggttctccatgggcagcaggaccatttttcagaatcaagagggaggacagtgtgagaaggcgatgatccaaagaagacagagaggtcagccccacccgatccctcaaatgggctcttggaggcacccccaggggcagcccatttctcaaagtccagaaaattagggtcccagaagggggcagcagcaggctgggagttaggagggagagcagggtgccggccctgccaccaagttgagagctggaggggaggtggggagagaacatcacagagcagccagccctggttcactcctggcagtttcttctcaagctccttccctaggagcatggtggcacgtgcctgtggtctcagctacttgggaggctgaggcgggaggatcgccagagcccaggagtttgaggctgcagtgagctatgagggtgcctctgtgctccatcctaggcaacagagtgatacgctgtttaaaaaggaaaaaatccttccctagagctagtatcctaaagctgcagagctagcccagacctcattggtttccttgtccttggggtgcttttcctgaatctttgcgggtgaagggagtgttgctcccagtccagaggcctgattctgtttggactgggttctcaagacacgaccaggttctcaagacacgagtccccttgttcctccccattaaagggggtttgtcagaagcaagaacagcccctctccccagtcacagcctgaagggaggccccgagagcttcctccttccccccacctgctccttaccttctctgccctgctttttagaactgcagttcattgttttaagggattgggggagggagcctggggacacaaaccttttatacaatacaaagctttgctttttttttttttttcttccttttccctttctcggttctcttctctcctctgaatggctgaagacccctctgccgagggaggttggggattgtgggacaaggtcccttggtgctgatggcctgaaggggcctgagctgtgggcagatgcagttttctgtgggcttggggaacctctcacgttgctgtgtcctggtgagcagcccgaccaataaacctgcttttctaaaagga

SEQ ID NO: 26125 - protein, 390 aa, Homo sapiens; identical to SEQ ID NO: 3483

SEQ ID NO: 26126 - DNA, 1246 bp, Homo sapiens
acccaccccattcctcgctccttccgaacttcctctttcgcattctctctcggctcgagctggctgagatttttctaaattgaaaacacgcccccctccccacacctccaggaactccactcccagtcttagagctgttaggacccgatggggaggcagcccccgcagtggacaacccccgcttggacacagtccgagtggaatgggaagggaatggtcaatccctgtcctggttgtccaagtcgggatctcagaggaaattgcagtgattccacggttaggcccccctgggggggctgccttcccctcagcctctccccacaccacccacccagctgctgtcattccgctcactgagctcttcttcattctcaccctgatccctgggggactcaaagccaaaactgcccaaagaggaaagattgaatcctaaaggggatccctgcccccatgggaggccccctactagaaggacgtgaaagcagcttttgggggaaactgaggcagtggggaagacagagcagaatgagccctcaccctggctgggggtccagcacaggctgtatctgcagagggtcccagaggaacgctggagccaagagaagccctgggaaggaggggtggggaacgacatgcatgtgagggatggcacactgatgtgtttatgcacctgtacacaggagcgcatggccatggctttggaaaggagaatggaaaaatagaagaaggtcggccgggcttggtggcttatgcctgtaaccccagcactttgggaggccgaggtgggcggatcacctgaagtcaggagttcgggaccagcctggcaaacaccccatctctactaagcgaaaacccatctctactaaaattacaaaaattagctgggcatggttgcgcatgcctgtaatcccagctactttggaggctgaggtggggagaattgcttgaacctgggaggtggaggttgcagtgagccaaggtcgcgacactgcactccagcctgggtgacagagtgagactccatctcaacagaaggaaaaaaaaggaaaataggagaaggtggaaatgggtgaagagagaagtcccctcactagctgcatgagaaatctatcttactgtggttctccatgggcagcaggaccatttttcagaatcaagagggaggacagtgtgagaaggcgatgatcctctcacgttgctgtgtcctggtgagcagcccgaccaataaacctgcttttctaaaagg

SEQ ID NO: 26127 - protein, 38 aa, Homo sapiens
MGSRTIFQNQEGGQCEKAMILSRCCVLVSSPTNKPAFL

SEQ ID NO: 26128 - DNA, 1191 bp, Homo sapiens
aggatgaagtgaagctgccggccaaactgagcatcagcaaatcgctgaaagagtcggaggcgctgccagagaaggagggcgaggagctgggcgagggcgagcggcccgaggaggacgcagcggcgctggagctttcgtcggacgaggcggtggaggttgaggaggttattgaggagtcccgcgcagagcgtatcaagcgcagcggcctgcggcgcgtggacgacttcaagaaggccttctccaaggagaagatggagaagaccaaggtgcgtacccgcgagaacctggagaagacgcgcctcaagaccaaggaaaacctggagaagacgcggcacaccctggagaagcgcatgaacaagctgggcacgcgcctggtgcccgccgagcggcgcgagaaactgaagacgtcgcgggacaagttgcgcaaatccttcacgcccgaccacgtggtgtacgcgcgctccaagaccgcggtctacaaggtgccacccttcaccttccacgtcaagaagatccgcgagggccaggtggaagtgctcaaggccaccgagatggtggaggtgggcgccgacgacgacgagggcggcgcggagcgcggggaggccggcgacctgcggcgcgggagcagccccgacgtgcacgcgctgctggagatcaccgaggagtcggacgccgtgctggtggacaagagcgacagcgactgagccgcccccgctgccacccaccccattcctcgctccttccgaacttcctctttcgcattctctctcggctcgagctggctgagatttttctaaattgaaaacacgcccccctccccacacctccaggaactccactcccagtcttagagctgttaggacccgatggggaggcagcccccgcagtggacaacccccgcttggacacagtccgagtggaatgggaagggaatggtcaatccctgtcctggttgtccaagtcgggatctcagaggaaattgcagtgattccacggttaggcccccctgggggggctgccttcccccctctgccgagggaggttggggattgtgggacaaggtcccttggtgctgatggcctgaaggggcctgagctgtgggcagatgcagttttctgtgggcttggggaacctctcacgttgctgtgtcctggtgagcagcccgaccaataaacctgcttttctaaaagg

SEQ ID NO: 26129 - protein, 83 aa, Homo sapiens
MGREWSIPVLVVQVGISEEIAVIPRLGPPGGAAFPPLPREVGDCGTRSLGADGLKGPELWADAVFCGLGEPLTLLCPGEQPDQ

SEQ ID NO: 26130 - DNA, 1286 bp, Homo sapiens
cgtgaaagcagcttttgggggaaactgaggcagtggggaagacagagcagaatgagccctcaccctggctgggggtccagcacaggctgtatctgcagagggtcccagaggaacgctggagccaagagaagccctgggaaggaggggtggggaacgacatgcatgtgagggatggcacactgatgtgtttatgcacctgtacacaggagcgcatggccatggctttggaaaggagaatggaaaaatagaagaaggtcggccgggcttggtggcttatgcctgtaaccccagcactttgggaggccgaggtgggcggatcacctgaagtcaggagttcgggaccagcctggcaaacaccccatctctactaagcgaaaacccatctctactaaaattacaaaaattagctgggcatggttgcgcatgcctgtaatcccagctactttggaggctgaggtggggagaattgcttgaacctgggaggtggaggttgcagtgagccaaggtcgcgacactgcactccagcctgggtgacagagtgagactccatctcaacagaaggaaaaaaaaggaaaataggagaaggtggaaatgggtgaagagagaagtcccctcactagctgcatgagaaatctatcttactgtggttctccatgggcagcaggaccatttttcagaatcaagagggaggacagtgtgagaaggcgatgatccaaagaagacagagaggtcagccccacccgatccctcaaatgggctcttggaggcacccccaggggcagcccatttctcaaagtccagaaaattagggtcccagaagggggcagcagcaggctgggagttaggagggagagcagggtgccggccctgccaccaagttgagagctggaggggaggtggggagagaacatcacagagcagccagccctggttcactcctggcagtttcttctcaagctccttccctaggagcatggtggcacgtgcctgtggtctcagctacttgggaggctgaggcgggaggatcgccagagcccaggagtttgaggctgcagtgagctatgagggtgcctctgtgctccatcctaggcaacagagtgatacgctgtttaaaaaggaaaaaatccttccctagagctagtatcctaaagctgcagagctagtcccttggtgctgatggcctgaaggggcctgagctgtgggcagatgcagttttctgtgggcttggggaacctctcacgttgctgtgtcctggtgagcagcccgaccaataaacctgcttttct

SEQ ID NO: 26131 - protein, 51 aa, Homo sapiens
MGSRTIFQNQEGGQCEKAMIQRRQRGQPHPIPQMGSWRHPQGQPISQSPEN

SEQ ID NO: 26132 - DNA, 1453 bp, Homo sapiens
aggatgaagtgaagctgccggccaaactgagcatcagcaaatcgctgaaagagtcggaggcgctgccagagaaggagggcgaggagctgggcgagggcgagcggcccgaggaggacgcagcggcgctggagctttcgtcggacgaggcggtggaggttgaggaggttattgaggagtcccgcgcagagcgtatcaagcgcagcggcctgcggcgcgtggacgacttcaagaaggccttctccaaggagaagatggagaagaccaaggtgcgtacccgcgagaacctggagaagacgcgcctcaagaccaaggaaaacctggagaagacgcggcacaccctggagaagcgcatgaacaagctgggcacgcgcctggtgcccgccgagcggcgcgagaaactgaagacgtcgcgggacaagttgcgcaaatccttcacgcccgaccacgtggtgtacgcgcgctccaagaccgcggtctacaaggtgccacccttcaccttccacgtcaagaagatccgcgagggccaggtggaagtgctcaaggccaccgagatggtggaggtgggcgccgacgacgacgagggcggcgcggagcgcggggaggccggcgacctgcggcgcgggagcagccccgacgtgcacgcgctgctggagatcaccgaggagtcggacgccgtgctggtggacaagagcgacagcgactgagccgcccccgtgccttcccctcagcctctccccacaccacccacccagctgctgtcattccgctcactgagctcttcttcattctcaccctgatccctgggggactcaaagccaaaactgcccaaagaggaaagattgaatcctaaaggggatccctgcccccatgggaggccccctactagaaggacgtgaaagcagcttttgggggaaactgaggcagtggggaagacagagcagaatgagccctcaccctggctgggggtccagcacaggctgtatctgcagagggtcccagaggaacgctggagccaagagaagccctgggaaggaggggtggggaacgacatgcatgtgagggatggcacactgatgtgtttatgcacctgtacacaggagcgcatggccatggctttggaaaggagaatggaaaaatagaagaaggtcggccgggcttggtggcttatgcctgtaaccccagcactttgggaggccgaggtgggcggatcacctgaagtcaggagttcgggaccagcctggcaaacaccccatctctactaagcgaaaacccatctctactaaaattacaaaaattagctgggcatggttgcgcatgcctgtaatcccagctactttggaggctgaggtggggagaattgcttgaacctgggaggtggaggttgcagtgagccaaggtcgcgacactgcactccagcctgggtgacagagtgagactccatctcaacagaagg

SEQ ID NO: 26133 - protein, 150 aa, Homo sapiens; identical to SEQ ID NO: 26117

SEQ ID NO: 26134 - DNA, 1722 bp, Homo sapiens
gctcctgcttctctccgggtctcccgctccagctccagccccacccggccggtcccgcacggctccgggtagccatggaggacgcagcggcgctggagctttcgtcggacgaggcggtggaggttgaggaggttattgaggagtcccgcgcagagcgtatcaagcgcagcggcctgcggcgcgtggacgacttcaagaaggccttctccaaggagaagatggagaagaccaaggtgcgtacccgcgagaacctggagaagacgcgcctcaagaccaaggaaaacctggagaagacgcggcacaccctggagaagcgcatgaacaagctgggcacgcgcctggtgcccgccgagcggcgcgagaaactgaagacgtcgcgggacaagttgcgcaaatccttcacgcccgaccacgtggtgtacgcgcgctccaagaccgcggtctacaaggtgccacccttcaccttccacgtcaagaagatccgcgagggccaggtggaagtgctcaaggccaccgagatggtggaggtgggcgccgacgacgacgagggcggcgcggagcgcggggaggccggcgacctgcggcgcgggagcagccccgacgtgcacgcgctgctggagatcaccgaggagtcggacgccgtgctggtggacaagagcgacagcgactgagccgcccccgctgccacccaccccattcctcgctccttccgaacttcctctttcgcattctctctcggctcgagctggctgagatttttctaaattgaaaacacgcccccctccccacacctccaggaactccactcccagtcttagagctgttaggacccgatggggaggcagcccccgcagtggacaacccccgcttggacacagtccgagtggaatgggaagggaatggtcaatccctgtcctggttgtccaagtcgggatctcagaggaaattgcagtgattccacggttaggcccccctgggggggctgccttcccctcagcctctccccacaccacccacccagctgctgtcattccgctcactgagctcttcttcattctcaccctgatccctgggggactcaaagccaaaactgcccaaagaggaaagattgaatcctaaaggggatccctgcccccatgggaggccccctactagaaggacgtgaaagcagcttttgggggaaactgaggcagtggggaagacagagcagaatgagccctcaccctggctgggggtccagcacaggctgtatctgcagagggtcccagaggaacgctggagccaagagaagccctgggaaggaggggtggggaacgacatgcatgtgagggatggcacactgatgtgtttatgcacctgtacacaggagcgcatggccatggctttggaaaggagaatggaaaaatagaagaaggtcggccgggcttggtggcttatgcctgtaaccccagcactttgggaggccgaggtgggcggatcacctgaagtcaggagttcgggaccagcctggcaaacaccccatctctactaagcgaaaacccatctctactaaaattacaaaaattagctgggcatggttgcgcatgcctgtaatcccagctactttggaggctgaggtggggagaattgcttgaacctgggaggtggaggttgcagtgagccaaggtcgcgacactgcactccagcctgggtgacagagtgagactccatctcaacagaagg

SEQ ID NO: 26135 - protein, 198 aa, Homo sapiens
MEDAAALELSSDEAVEVEEVIEESRAERIKRSGLRRVDDFKKAFSKEKMEKTKVRTRENLEKTRLKTKENLEKTRHTLEKRMNKLGTRLVPAERREKLKTSRDKLRKSFTPDHVVYARSKTAVYKVPPFTFHVKKIREGQVEVLKATEMVEVGADDDEGGAERGEAGDLRRGSSPDVHALLEITEESDAVLVDKSDSD

SEQ ID NO: 26136 - DNA, 2084 bp, Homo sapiens
agttctggccgctgtcccggtgcgcacggacgtggctcgagtttcctctgctctccgctctcgcccgctagctctcctcccttccgctcctgcttctctccgggtctcccgctccagctccagccccacccggccggtcccgcacggctccgggtagccatggaggaccccacgctctatattgtcgagcggccgcttcccgggtaccccgacgccgagaccagatccagctgactcaagcacagctggaggagcggcaggcggagatggagggcgcagtgcagagcatccagggcgagctgagcaagctgggcaaggcgcacgccaccacgagcaatacggtgagcaagctgctggagaaggtgcgcaaggtcagcgtcaacgtgaagaccgtgcgcggcagcctggagcgccaggcggggcagatcaagaagctggaggtcaacgaggccgagctgctgcggcgccgcaactttaaagtcatgatctaccaggatgaagtgaagctgccggccaaactgagcatcagcaaatcgctgaaagagtcggaggcgctgccagagaaggagggcgaggagctgggcgagggcgagcggcccgaggaggacgcagcggcgctggagctttcgtcggacgaggcggtggaggttgaggaggttattgaggagtcccgcgcagagcgtatcaagcgcagcggcctgcggcgcgtggacgacttcaagaaggccttctccaaggagaagatggagaagaccaaggtgcgtacccgcgagaacctggagaagacgcgcctcaagaccaaggaaaacctggagaagacgcggcacaccctggagaagcgcatgaacaagctgggcacgcgcctggtgcccgccgagcggcgcgagaaactgaagacgtcgcgggacaagttgcgcaaatccttcacgcccgaccacgtggtgtacgcgcgctccaagaccgcggtctacaaggtgccacccttcaccttccacgtcaagaagatccgcgagggccaggtggaagtgctcaaggccaccgagatggtggaggtgggcgccgacgacgacgagggcggcgcggagcgcggggaggccggcgacctgcggcgcgggagcagccccgacgtgcacgcgctgctggagatcaccgaggagtcggacgccgtgctggtggacaagagcgacagcgactgagccgcccccgctgccacccaccccattcctcgctccttccgaacttcctctttcgcattctctctcggctcgagctggctgagatttttctaaattgaaaacacgcccccctccccacacctccaggaactccactcccagtcttagagtgccttcccctcagcctctccccacaccacccacccagctgctgtcattccgctcactgagctcttcttcattctcaccctgatccctgggggactcaaagccaaaactgcccaaagaggaaagattgaatcctaaaggggatccctgcccccatgggaggccccctactagaaggacgtgaaagcagcttttgggggaaactgaggcagtggggaagacagagcagaatgagccctcaccctggctgggggtccagcacaggctgtatctgcagagggtcccagaggaacgctggagccaagagaagccctgggaaggaggggtggggaacgacatgcatgtgagggatggcacactgatgtgtttatgcacctgtacacaggagcgcatggccatggctttggaaaggagaatggaaaaatagaagaaggtcggccgggcttggtggcttatgcctgtaaccccagcactttgggaggccgaggtgggcggatcacctgaagtcaggagttcgggaccagcctggcaaacaccccatctctactaagcgaaaacccatctctactaaaattacaaaaattagctgggcatggttgcgcatgcctgtaatcccagctactttggaggctgaggtggggagaattgcttgaacctgggaggtggaggttgcagtgagccaaggtcgcgacactgcactccagcctgggtgacagagtgagactccatctcaacagaagg

SEQ ID NO: 26137 - protein, 309 aa, Homo sapiens; identical to SEQ ID NO: 26121

SEQ ID NO: 26138 - DNA, 2118 bp, Homo sapiens
agcagttctggccgctgtcccggtgcgcacggacgtggctcgagtttcctctgctctccgctctcgcccgctagctctcctcccttccgctcctgcttctctccgggtctcccgctccagctccagccccacccggccggtcccgcacggctccgggtagccatggaggaccccacgctctatattgtcgagcggccgcttcccgggtaccccgacgccgaggccccggagccttcctccgctggggctcaggcagcggaggagccgtcgggggccggctcagaagagctgatcaagtcggaccaggtgaacggcgtgctggtgctgagcctcctggacaaaatcatcggggccgtagaccagatccagctgactcaagcacagctggaggagcggcaggcggagatggagggcgcagtgcagagcatccagggcgagctgagcaagagctgggcgagggcgagcggcccgaggaggacgcagcggcgctggagctttcgtcggacgaggcggtggaggttgaggaggttattgaggagtcccgcgcagagcgtatcaagcgcagcggcctgcggcgcgtggacgacttcaagaaggccttctccaaggagaagatggagaagaccaaggtgcgtacccgcgagaacctggagaagacgcgcctcaagaccaaggaaaacctggagaagacgcggcacaccctggagaagcgcatgaacaagctgggcacgcgcctggtgcccgccgagcggcgcgagaaactgaagacgtcgcgggacaagttgcgcaaatccttcacgcccgaccacgtggtgtacgcgcgctccaagaccgcggtctacaaggtgccacccttcaccttccacgtcaagaagatccgcgagggccaggtggaagtgctcaaggccaccgagatggtggaggtgggcgccgacgacgacgagggcggcgcggagcgcggggaggccggcgacctgcggcgcgggagcagccccgacgtgcacgcgctgctggagatcaccgaggagtcggacgccgtgctggtggacaagagcgacagcgactgagccgcccccgctgccacccaccccattcctcgctccttccgaacttcctctttcgcattctctctcggctcgagctggctgagatttttctaaattgaaaacacgcccccctccccacacctccaggaactccactcccagtcttagagctgttaggacccgatggggaggcagcccccgcagtggacaacccccgcttggacacagtccgagtggaatgggaagggaatggtcaatccctgtcctggttgtccaagtcgggatctcagaggaaattgcagtgattccacggttaggcccccctgggggggctgccttcccctcagcctctccccacaccacccacccagctgctgtcattccgctcactgagctcttcttcattctcaccctgatccctgggggactcaaagccaaaactgcccaaagaggaaagattgaatcctaaaggggatccctgcccccatgggaggccccctactagaaggacgtgaaagcagcttttgggggaaactgaggcagtggggaagacagagcagaatgagccctcaccctggctgggggtccagcacaggctgtatctgcagagggtcccagaggaacgctggagccaagagaagccctgggaaggaggggtggggaacgacatgcatgtgagggatggcacactgatgtgtttatgcacctgtacacaggagcgcatggccatggctttggaaaggagaatggaaaaatagaagaaggtcggccgggcttggtggcttatgcctgtaaccccagcactttgggaggccgaggtgggcggatcacctgaagtcaggagttcgggaccagcctggcaaacaccccatctctactaagcgaaaacccatctctactaaaattacaaaaattagctgggcatggttgcgcatgcctgtaatcccagctactttggaggctgaggtggggagaattgcttgaacctgggaggtggaggttgcagtgagccaaggtcgcgacactgcactccagcctgggtgacagagtgagactccatctcaacagaagg

SEQ ID NO: 26139 - protein, 184 aa, Homo sapiens; identical to SEQ ID NO: 26123

SEQ ID NO: 26140 - DNA, 2644 bp, Homo sapiens
acctgattccgttcctcagctcgcattcctccgcccgtcccgctcccgccgccagcggaggccctagtctcccgctccaactattccaaccatcccgggaagggtggggcgctcggctcttgggtccccctccgccgccccgcctcgtcgatctccccttctgccccggtccctccctttctggggtggggccagccaatcagcgatcagactccggagtttggcccgggagctggggagctcaccgatcccccgcccagcagttctggccgctgtcccggtgcgcacggacgtggctcgagtttcctctgctctccgctctcgcccgctagctctcctcccttccgctcctgcttctctccgggtctcccgctccagctccagccccacccggccggtcccgcacggctccgggtagccatggaggaccccacgctctatattgtcgagcggccgcttcccgggtaccccgacgccgaggccccggagccttcctccgctggggctcaggcagcggaggagccgtcgggggccggctcagaagagctgatcaagtcggaccaggtgaacggcgtgctggtgctgagcctcctggacaaaatcatcggggccgtagaccagatccagctgactcaagcacagctggaggagcggcaggcggagatggagggcgcagtgcagagcatccagggcgagctgagcaagctgggcaaggcgcacgccaccacgagcaatacggtgagcaagctgctggagaaggtgcgcaaggtcagcgtcaacgtgaagaccgtgcgcggcagcctggagcgccaggcggggcagatcaagaagctggaggtcaacgaggccgagctgctgcggcgccgcaactttaaagtcatgatctaccaggatgaagtgaagctgccggccaaactgagcatcagcaaatcgctgaaagagtcggaggcgctgccagagaaggagggcgaggagctgggcgagggcgagcggcccgaggaggacgcagcggcgctggagctttcgtcggacgaggcggtggaggttgaggaggttattgaggagtcccgcgcagagcgtatcaagcgcagcggcctgcggcgcgtggacgacttcaagaaggccttctccaaggagaagatggagaagaccaaggtgcgtacccgcgagaacctggagaagacgcgcctcaagaccaaggaaaacctggagaagacgcggcacaccctggagaagcgcatgaacaagctgggcacgcgcctggtgcccgccgagcggcgcgagaaactgaagacgtcgcgggacaagttgcgcaaatccttcacgcccgaccacgtggtgtacgcgcgctccaagaccgcggtctacaaggtgccacccttcaccttccacgtcaagaagatccgcgagggccaggtggaagtgctcaaggccaccgagatggtggaggtgggcgccgacgacgacgagggcggcgcggagcgcggggaggccggcgacctgcggcgcgggagcagccccgacgtgcacgcgctgctggagatcaccgaggagtcggacgccgtgctggtggacaagagcgacagcgactgagccgcccccgctgccacccaccccattcctcgctccttccgaacttcctctttcgcattctctctcggctcgagctggctgagatttttctaaattgaaaacacgcccccctccccacacctccaggaactccactcccagtcttagagctgttaggacccgatggggaggcagcccccgcagtggacaacccccgcttggacacagtccgagtggaatgggaagggaatggtcaatccctgtcctggttgtccaagtcgggatctcagaggaaattgcagtgattccacggttaggcccccctgggggggctgccttcccctcagcctctccccacaccacccacccagctgctgtcattccgctcactgagctcttcttcattctcaccctgatccctgggggactcaaagccaaaactgcccaaagaggaaagattgaatcctaaaggggatccctgcccccatgggaggccccctactagaaggacgtgaaagcagcttttgggggaaactgaggcagtggggaagacagagcagaatgagccctcaccctggctgggggtccagcacaggctgtatctgcagagggtcccagaggaacgctggagccaagagaagccctgggaaggaggggtggggaacgacatgcatgtgagggatggcacactgatgtgtttatgcacctgtacacaggagcgcatggccatggctttggaaaggagaatggaaaaatagaagaaggtcggccgggcttggtggcttatgcctgtaaccccagcactttgggaggccgaggtgggcggatcacctgaagtcaggagttcgggaccagcctggcaaacaccccatctctactaagcgaaaacccatctctactaaaattacaaaaattagctgggcatggttgcgcatgcctgtaatcccagctactttggaggctgaggtggggagaattgcttgaacctgggaggtggaggttgcagtgagccaaggtcgcgacactgcactccagcctgggtgacagagtgagactccatctcaacagaagg

SEQ ID NO: 26141 - protein, 390 aa, Homo sapiens; identical to SEQ ID NO: 3483

SEQ ID NO: 26142 - DNA, 868 bp, Homo sapiens
ctccttgtaccctgcaggggaggttgggacctgctgctttgtttttttgagactacaggctttatcaaatactgctattgcctgagtccaatagtgccgccaagtgtccctctcgcctggcatctgattgctcaaagcaagaagcctatagtcttccacaactcagcccctcaggagagagagttgggggctgccgcagaggtccagaggtcccaggacataggctcacctgtcataaaaatagcttggttttgccaggcacagtgatgtgtgcctgtagtcccagctactcaataagttgaggcaggaagattgcttgagactaggagtttgaagccaggttggacagcatagagagactctatcttaaaaaaaaaaatagagcttggttttggatcctgatttctctgtgcattttagtgtatgatatcttaagtggtagcaagagggaggggtggcaagggagacagaaggtggggacgtggccaaagggaaattgccaggatgtccctcttccatgcctatccctctcctcatttggggtagcatcctgtgtccaccctaccccagggaagaatgaaaacagattaatctgggcacactggctcatgcctgtaatcccagcactttgggaggctgaggtgggtggaccacttgaggtcaggagttcaagaccagcctggccaacatggcgaaactccgtctctaccaaaaatacaaaaaaaattagccgggcatggtggcacacacctgtaatcccagctactagggaggctgaggcaggagaatcacttgaactcaggaggcagaggttgcggtgaaccaagatcagagatcacgccactgcactacagtttagcagcctggg

SEQ ID NO: 26143 - protein, 70 aa, Homo sapiens
MPVIPALWEAEVGGPLEVRSSRPAWPTWRNSVSTKNTKKISRAWWHTPVIPATREAEAGESLELRRQRLR

SEQ ID NO: 26144 - DNA, 4124 bp, Homo sapiens
ggcggcgcaggggcggggctttacggacgcaagcacgtcgaagcgctgctcctggagccgcggagggtgcgggtttggctgcggtggtttctgtggcggttgctgtggcggagtttggaggttggagagaaatccaggtactcactagactggtaccttctgccaccatgggggagcttttccggagtgaagaaatgacactggcccagctttttctacagtcagaggctgcttattgttgtgtcagtgaattaggagaacttggaaaggttcagtttcgtgacttaaatccagatgtgaatgttttccaacggaaatttgtgaatgaagttagaagatgtgaagaaatggatcgaaagcttcgatttgttgagaaagagataagaaaagctaacattccgattatggacaccggtgaaaacccagaggttcccttcccccgggacatgattgacttagaggccaattttgagaagattgaaaatgaactgaaggaaatcaacacaaaccaggaagctctgaagagaaacttcctggaactgaccgaattaaaatttatacttcgcaaaactcagcaattttttgatgagatggcggatccagacttgttggaagagtcctcatccctcttggagccaagtgagatgggaagaggcactcctttaagacttggcttcgtggctggtgtcattaaccgggagcgcatccctacttttgagcgcatgctttggcgggtatgccggggaaatgtgttcctgcgacaggctgaaatcgagaaccccctggaggatcctgtgactggcgactacgtgcacaagtctgtgtttatcattttcttccaaggcgatcagctgaaaaacagagtcaagaaaatctgtgaagggttccgagcctcactctatccctgtcctgagacaccacaggagaggaaggaaatggcttctggagtgaataccaggattgatgatctccaaatggttctgaatcaaacggaggatcaccgccagagggttctgcaggcagctgctaagaacatccgtgtctggttcatcaaagtgcggaagatgaaggccatctatcacaccctgaacctgtgcaacatagatgtgactcagaaatgcttgattgcagaggtctggtgccctgtcaccgaccttgactccatccagtttgcactcagaaggggcacggaacacagtggttccactgtaccttccattttgaacaggatgcagacaaaccagactcccccaacctataacaaaaccaacaagtttacctatggctttcagaacatagtagatgcttatggaattggaacttaccgagagataaatccagctccgtatactattatcacgttcccttttctatttgctgtgatgtttggagacttcggtcatggcattttaatgaccctttttgctgtgtggatggtactgagggagagccggatcctttcccagaagaatgagaatgagatgtttagcactgtgttcagtggtcgatacattattttattgatgggtgtgttctccatgtacactggcctcatctacaatgattgcttttccaagtctcttaatatctttgggtcatcctggagtgtacggccgatgtttacttataattggactgaagagacgcttcgggggaaccctgttctacagctgaacccagccctccctggagtgtttggtggaccatacccttttggcattgatccaatttggaacattgctaccaataaactgacgttcttgaactcctttaagatgaagatgtctgttatccttggtatcatccatatgctgtttggagtcagcctgagtctgttcaaccatatctatttcaagaagcccctgaatatctactttggatttattcctgaaataatcttcatgacctctttgtttggctatttggttatccttattttttacaagtggacggcctatgatgctcatacctctgagaatgcaccaagccttctgatccatttcataaacatgttcctcttttcctacccagagtctggttattcaatgttgtattctggacagaaaggaattcagtgtttcctggtagtggttgcactactgtgtgtaccttggatgctgctgtttaaaccattggtccttcgccgtcagtatttgaggagaaagcatttgggaactctcaactttggtgggatcagggtgggcaacggaccgacagaggaggatgctgagattattcagcatgaccagctctccacccactcagaggacgcagacgagtttgactttggggacaccatggtccaccaggccatccacaccatcgagtactgcctgggctgcatctccaacactgcctcctacttgcggctctgggccctcagcctcgctcatgcgcagctgtctgaggtgctttggaccatggtgatccacatcggcctgagcgtgaagagcttggcgggaggtttggtgctgttcttcttcttcactgcctttgccaccctgaccgtggccatcctcctgatcatggagggcctctcggcctttctccacgcactgcgcttacactgggttgagttccagaataaattctacagcgggaccggtttcaagttcttacccttctccttcgagcatattcgggaagggaagtttgaagagtgagtccctgtgagggccgtgtgccccatgctaccctccccgcctccctccacagtgatcagctgtgcctctctgcctgttggttgtgatctgtgggcaccagctcattcgtgtcaccctgtctgtgagtcatttagatagaatagtcctccttgggtctcccaccacccctagctttgtgtgtagtgtagtgattttctggctgtcactcatactcactgggcaccagccttgccctcttagcctccatccatccagacagcccttcccacctcctggtggtgagccagtctgcattcccacgccatcccaaagccctttcatcttccccgtgcattgtagatggaaggagcacccatgccattcacatctagactttgagttccctgcatctgccaccgtagtttctagcaggagtagtggggggagtaatacagattcttccctagaaggggacactggtaacatgtcccactcttggattagcaggggtgggtccaggaagatgatatttgcgtcttttgcccacccccctggcattcagctggacccaactaggccatcatgagtggcttctccctgtcatccccaggggtcataggatatctacaccgcctttctgaccccaccctgcactcccatcctttcctctctccccgttcatgccctgcactacatagcacagccgggatgcttggaacagaggccttggctgctccgcagtgcacagggcttccctctctcggggttggcttcttcccaggccttgcatgggccctgcccacaagcacaccctcaggccgagggtgcagactgatgctcttccctgatggagaccctgagatcttccccacccccaatcatgatgtcttcagtgtgggactggggtcctcttggttctgcctgcagcctgcctggctccgcccctagtgccccctcctcaccacactggccccaggtctcaggaggggtgtcctgggcagggaaggtcagtgtcactgatggtttgctgtttggaagccattggcagggctgccgtgcatgtggctgtgagggctgcacagtcctgccaaggggcttcctccttgtcaccccgaaccttgtaatcgtgtgctggcgtggcagccctggctaagttaatccccaccgctttcagtggtagaaagaattccctgagtgggccaggctggtgccctcctcctaccctggcttttctgagtgagctgcctggagccctcatcccctctcccaggctgggctggccctgggcggggccactgtgtgctggcccactgtgacctgacccgaccttgtgcagcccccctgccctggtgtcctgggttttcgtgatgatctttgctctgtttccagtggggtttgaagcagagttcagggaaccctgcccaaggtcctcctgttcagacattcctatgttgaataaagtatgtttgacttccccggaga

SEQ ID NO: 26145 - protein, 831 aa, Homo sapiens; identical to SEQ ID NO: 3485

SEQ ID NO: 26146 - DNA, 1779 bp, Homo sapiens
ggggctttacggacgcaagcacgtcgaagcgctgctcctggagccgcggagggtgcgggtttggctgcggtggtttctgtggcggttgctgtggcggagtttggaggttggagagaaatccaggtactcactagactggtaccttctgccaccatgggggagcttttccggagtgaagaaatgacactggcccagctttttctacagtcagaggctgcttattgttgtgtcagtgaattaggagaacttggaaaggttcagtttcgtgacttaaatccagatgtgaatgttttccaacggaaatttgtgaatgaagttagaagatgtgaagaaatggatcgaaagcttcgatttgttgagaaagagataagaaaagctaacattccgattatggacaccggtgaaaacccagaggttcccttcccccgggacatgattgacttagaggccaattttgagaagattgaaaatgaactgaaggaaatcaacacaaaccaggaagctctgaagagaaacttcctggaactgaccgaattaaaatttatacttcgcaaaactcagcaattttttgatgaggtcagactattgtttcttttagtatttgagcagctgatattatactcacacaagtgggccatatttttattccagtaattattttaatttgctagtttggaagcaatgccatttttgcaccctgttttagttacagaaatgtgagattatgttccatttttcatgcagtacacaaccagccatggttttgcattttttcacattttcttcaatttttcatctcaatatgaggaaaagaaccctgaagtagttgtataaacatagttagtataaatttttacattatatttatacttataaggtaagtatatgcttaaggttaaagctgaggaagcaaacatttggttatagacaaaattataacaaaggtttaatcaccaaaccttttgtcatcaaatttttatttcattgtctatgtttgcttataaaccttcgagcacatttttcagtacttcagatagcacacatcacactaatttttcaagagtttttcattgtatttattgtatggaaaatattggtaggatgcttgtttgaaacttctggattatcacataaacttagacgcattacctcagagggaaaaatgttagtaaagttcttgggttaaatatgtaggtgaggccaggcatggtggctcatgcgtgtagtccctgcactttgggaggccgaggcaggtggatcacctgaggtcaggagttcgagatcagcctggccaacatggtgaaacccggtctctactaaaaatacaaaaactagccgggtgaggtggtggttgcctgtaatcccagctactcgagaggctgaggcaggaaaatcatttgaacctgggaggtggacgttgcattgagctgagattgctccactgcactccagcctgggcgacagagtgagactctatctcaaaaaaaaaaaatgtaggctgggcgcggtggctcatgcctgtaatcccagcactttgggagtccgaggtgggcggatcacgaggtcaggagatcaagaccatcttggctaacacggtgaaaccccgtctctgctaaaaaaatacaaaaaattagccgggcatggtggtgggcacctgtagtcccagctaatcaggaggctgaggcaggagaatggcgtgaacccgggaggcggagcttatagtgagccgagatcgcgccactgcactccagcctgggcgacagagcaagactctgtctc

SEQ ID NO: 26147 - protein, 166 aa, Homo sapiens
MGELFRSEEMTLAQLFLQSEAAYCCVSELGELGKVQFRDLNPDVNVFQRKFVNEVRRCEEMDRKLRFVEKEIRKANIPIMDTGENPEVPFPRDMIDLEANFEKIENELKEINTNQEALKRNFLELTELKFILRKTQQFFDEVRLLFLLVFEQLILYSHKWAIFLFQ

SEQ ID NO: 26148 - DNA, 4125 bp, Homo sapiens
gctttacggacgcaagcacgtcgaagcgctgctcctggagccgcggagggtgcgggtttggctgcggtggtttctgtggcggttgctgtggcggagtttggaggttggagagaaatccaggtactcactagactggtaccttctgccaccatgggggagcttttccggagtgaagaaatgacactggcccagctttttctacagtcagaggctgcttattgttgtgtcagtgaattaggagaacttggaaaggttcagtttcgtgacttaaatccagatgtgaatgttttccaacggaaatttgtgaatgaagttagaagatgtgaagaaatggatcgaaagcttcgatttgttgagaaagagataagaaaagctaacattccgattatggacaccggtgaaaacccagaggttcccttcccccgggacatgattgacttagaggccaattttgagaagattgaaaatgaactgaaggaaatcaacacaaaccaggaagctctgaagagaaacttcctggaactgaccgaattaaaatttatacttcgcaaaactcagcaattttttgatgagatggcggatccagacttgttggaagagtcctcatccctcttggagccaagtgagatgggaagaggcactcctttaagacttggcttcgtggctggtgtcattaaccgggagcgcatccctacttttgagcgcatgctttggcgggtatgccggggaaatgtgttcctgcgacaggctgaaatcgagaaccccctggaggatcctgtgactggcgactacgtgcacaagtctgtgtttatcattttcttccaaggcgatcagctgaaaaacagagtcaagaaaatctgtgaagggttccgagcctcactctatccctgtcctgagacaccacaggagaggaaggaaatggcttctggagtgaataccaggattgatgatctccaaatggttctgaatcaaacggaggatcaccgccagagggttctgcaggcagctgctaagaacatccgtgtctggttcatcaaagtgcggaagatgaaggccatctatcacaccctgaacctgtgcaacatagatgtgactcagaaatgcttgattgcagaggtctggtgccctgtcaccgaccttgactccatccagtttgcactcagaaggggcacggaacacagtggttccactgtaccttccattttgaacaggatgcagacaaaccagactcccccaacctataacaaaaccaacaagtttacctatggctttcagaacatagtagatgcttatggaattggaacttaccgagagataaatccagctccgtatactattatcacgttcccttttctatttgctgtgatgtttggagacttcggtcatggcattttaatgaccctttttgctgtgtggatggtactgagggagagccggatcctttcccagaagaatgagaatgagatgtttagcactgtgttcagtggtcgatacattattttattgatgggtgtgttctccatgtacactggcctcatctacaatgattgcttttccaagtctcttaatatctttgggtcatcctggagtgtacggccgatgtttacttataattggactgaagagacgcttcgggggaaccctgttctacagctgaacccagccctccctggagtgtttggtggaccatacccttttggcattgatccaatttggaacattgctaccaataaactgacgttcttgaactcctttaagatgaagatgtctgttatccttggtatcatccatatgctgtttggagtcagcctgagtctgttcaaccatatctatttcaagaagcccctgaatatctactttggatttattcctgaaataatcttcatgacctctttgtttggctatttggttatccttattttttacaagtggacggcctatgatgctcatacctctgagaatgcaccaagccttctgatccatttcataaacatgttcctcttttcctacccagagtctggttattcaatgttgtattctggacagaaaggaattcagtgtttcctggtagtggttgcactactgtgtgtaccttggatgctgctgtttaaaccattggtccttcgccgtcagtatttgaggagaaagcatttgggaactctcaactttggtgggatcagggtgggcaacggaccgacagaggaggatgctgagattattcagcatgaccagctctccacccactcagaggacgcagacgagccttccgaggacgaagtgtttgactttggggacaccatggtccaccaggccatccacaccatcgagtactgcctgggctgcatctccaacactgcctcctacttgcggctctgggccctcagcctcgctcatgcgcagctgtctgaggtgctttggaccatggtgatccacatcggcctgagcgtgaagagcttggcgggaggtttggtgctgttcttcttcttcactgcctttgccaccctgaccgtggccatcctcctgatcatggagggcctctcggcctttctccacgcactgcgcttacactgggttgagttccagaataaattctacagcgggaccggtttcaagttcttacccttctccttcgagcatattcgggaagggaagtttgaagagtgagtccctgtgagggccgtgtgccccatgctaccctccccgcctccctccacagtgatcagctgtgcctctctgcctgttggttgtgatctgtgggcaccagctcattcgtgtcaccctgtctgtgagtcatttagatagaatagtcctccttgggtctcccaccacccctagctttgtgtgtagtgtagtgattttctggctgtcactcatactcactgggcaccagccttgccctcttagcctccatccatccagacagcccttcccacctcctggtggtgagccagtctgcattcccacgccatcccaaagccctttcatcttccccgtgcattgtagatggaaggagcacccatgccattcacatctagactttgagttccctgcatctgccaccgtagtttctagcaggagtagtggggggagtaatacagattcttccctagaaggggacactggtaacatgtcccactcttggattagcaggggtgggtccaggaagatgatatttgcgtcttttgcccacccccctggcattcagctggacccaactaggccatcatgagtggcttctccctgtcatccccaggggtcataggatatctacaccgcctttctgaccccaccctgcactcccatcctttcctctctccccgttcatgccctgcactacatagcacagccgggatgcttggaacagaggccttggctgctccgcagtgcacagggcttccctctctcggggttggcttcttcccaggccttgcatgggccctgcccacaagcacaccctcaggccgagggtgcagactgatgctcttccctgatggagaccctgagatcttccccacccccaatcatgatgtcttcagtgtgggactggggtcctcttggttctgcctgcagcctgcctggctccgcccctagtgccccctcctcaccacactggccccaggtctcaggaggggtgtcctgggcagggaaggtcagtgtcactgatggtttgctgtttggaagccattggcagggctgccgtgcatgtggctgtgagggctgcacagtcctgccaaggggcttcctccttgtcaccccgaaccttgtaatcgtgtgctggcgtggcagccctggctaagttaatccccaccgctttcagtggtagaaagaattccctgagtgggccaggctggtgccctcctcctaccctggcttttctgagtgagctgcctggagccctcatcccctctcccaggctgggctggccctgggcggggccactgtgtgctggcccactgtgacctgacccgaccttgtgcagcccccctgccctggtgtcctgggttttcgtgatgatctttgctctgtttccagtggggtttgaagcagagttcagggaaccctgcccaaggtcctcctgttcagacattcctatgttgaataaagtatgtttgacttccccggaga

SEQ ID NO: 26149 - protein, 837 aa, Homo sapiens
MGELFRSEEMTLAQLFLQSEAAYCCVSELGELGKVQFRDLNPDVNVFQRKFVNEVRRCEEMDRKLRFVEKEIRKANIPIMDTGENPEVPFPRDMIDLEANFEKIENELKEINTNQEALKRNFLELTELKFILRKTQQFFDEMADPDLLEESSSLLEPSEMGRGTPLRLGFVAGVINRERIPTFERMLWRVCRGNVFLRQAEIENPLEDPVTGDYVHKSVFIIFFQGDQLKNRVKKICEGFRASLYPCPETPQERKEMASGVNTRIDDLQMVLNQTEDHRQRVLQAAAKNIRVWFIKVRKMKAIYHTLNLCNIDVTQKCLIAEVWCPVTDLDSIQFALRRGTEHSGSTVPSILNRMQTNQTPPTYNKTNKFTYGFQNIVDAYGIGTYREINPAPYTIITFPFLFAVMFGDFGHGILMTLFAVWMVLRESRILSQKNENEMFSTVFSGRYIILLMGVFSMYTGLIYNDCFSKSLNIFGSSWSVRPMFTYNWTEETLRGNPVLQLNPALPGVFGGPYPFGIDPIWNIATNKLTFLNSFKMKMSVILGIIHMLFGVSLSLFNHIYFKKPLNIYFGFIPEIIFMTSLFGYLVILIFYKWTAYDAHTSENAPSLLIHFINMFLFSYPESGYSMLYSGQKGIQCFLVVVALLCVPWMLLFKPLVLRRQYLRRKHLGTLNFGGIRVGNGPTEEDAEIIQHDQLSTHSEDADEPSEDEVFDFGDTMVHQAIHTIEYCLGCISNTASYLRLWALSLAHAQLSEVLWTMVIHIGLSVKSLAGGLVLFFFFTAFATLTVAILLIMEGLSAFLHALRLHWVEFQNKFYSGTGFKFLPFSFEHIREGKFEE

SEQ ID NO: 26150 - DNA, 472 bp, Homo sapiens
gcttgtgatgcctactgagttacattccccacatagaaagtcgttgctctttaataagccaagttaaaggcagtgacctacatttgttgtgccttggattggtggtaagattgaacatatatagaaaagctaaactattttctcaggtttctttttaggttgaagctaaataaaagtgaatgttagtaactagaactctaatttcttgtaatttggaaaaaagaaaccattctagccagaggaagaaaaagacaattccctggcaactcttttcagaaagctatgcctctttgccattcataccctgagatctaaaactggtgttaaaaggatccctcgcttgttccttttctccccaaaggttctgaatcaaacggagatgaaggccatctatcacaccctgaacctgtgcaacatagatgtgactcagaaatgcttgattgcagaggtctggtgccctgtcaccgacctt

SEQ ID NO: 26151 - protein, 30 aa, Homo sapiens
MKAIYHTLNLCNIDVTQKCLIAEVWCPVTD

SEQ ID NO: 26152 - DNA, 791 bp, Homo sapiens
tgattgtgtgtttgtgtgtttaatttttctttttgtcattttggatccctcagtctcagctgctagtctctcctctttatttttcccctcccattttattgaagagacaagatagctacagtaatttattttggggtcagtttctggacccttgttgtttccctctcttgttcaaaaataatgtgactttttccctgtcatggtagtgaagagacgcttcgggggaaccctgttctacagctgaacccagccctccctggagtgtttggtggaccatacccttttggcattgatccagtaagaggacttccttcctatatgctaacctcaaattttttaacactaaccctgaagcaagagaattaaaatgaagataaatagttatgtgggctttcactgggcatggtcgctcatgcctgtaatcccagcactttgggaggccgaggaggtgggatcacctgaggtcagcatggtgaaaccctatctctactaaaaataaaatattagccgggcgtggtggcgcatgcctgtagtcccagctacccgggagactgaggcaggagaatcgcttgaacctgggaggcagaggttgcagtgagcaagctgcactccagcctgtgtgacagagcaagactccgtcttaaaagaaaaaaaaaaaaaagaaatcattgttaatgcatttacgtgtgatgacaatattgtggtcatgttttaaaaataagtcctggccgggcgcggtggctcacgcctgtaatcccagcaatttgggaggccaaggcgggcggatcatg

SEQ ID NO: 26153 - protein, 41 aa, Homo sapiens
MKINSYVGFHWAWSLMPVIPALWEAEEVGSPEVSMVKPYLY

SEQ ID NO: 26154 - DNA, 2138 bp, Homo sapiens
ggggaggcggtggttggggtggaacagttgtttgattttacttagccgttcagtcagtgggttttgtttttgttgttagacatatgcttttctgaggtttgtgttactaaccatcgcccttcccacctcacagaatgtcatgttaaagcccaggcaaattctactctttctgttcatctgtgtagggaactctcaactttggtgggatcagggtgggcaacggaccgacagaggaggatgctgagattattcagcatgaccagctctccacccactcagaggacgcagacgagtttgactttggggacaccatggtccaccaggccatccacaccatcgagtactgcctgggctgcatctccaacactgcctcctacttgcggctctgggccctcagcctcgctcatgcgcagctgtctgaggtgctttggaccatggtgatccacatcggcctgagcgtgaagagcttggcgggaggtttggtgctgttcttcttcttcactgcctttgccaccctgaccgtggccatcctcctgatcatggagggcctctcggcctttctccacgcactgcgcttacactgggttgagttccagaataaattctacagcgggaccggtttcaagttcttacccttctccttcgagcatattcgggaagggaagtttgaagagtgagtccctgtgagggccgtgtgccccatgctaccctccccgcctccctccacagtgatcagctgtgcctctctgcctgttggttgtgatctgtgggcaccagctcattcgtgtcaccctgtctgtgagtcatttagatagaatagtcctccttgggtctcccaccacccctagctttgtgtgtagtgtagtgattttctggctgtcactcatactcactgggcaccagccttgccctcttagcctccatccatccagacagcccttcccacctcctggtggtgagccagtctgcattcccacgccatcccaaagccctttcatcttccccgtgcattgtagatggaaggagcacccatgccattcacatctagactttgagttccctgcatctgccaccgtagtttctagcaggagtagtggggggagtaatacagattcttccctagaaggggacactggtaacatgtcccactcttggattagcaggggtgggtccaggaagatgatatttgcgtcttttgcccacccccctggcattcagctggacccaactaggccatcatgagtggcttctccctgtcatccccaggggtcataggatatctacaccgcctttctgaccccaccctgcactcccatcctttcctctctccccgttcatgccctgcactacatagcacagccgggatgcttggaacagaggccttggctgctccgcagtgcacagggcttccctctctcggggttggcttcttcccaggccttgcatgggccctgcccacaagcacaccctcaggccgagggtgcagactgatgctcttccctgatggagaccctgagatcttccccacccccaatcatgatgtcttcagtgtgggactggggtcctcttggttctgcctgcagcctgcctggctccgcccctagtgccccctcctcaccacactggccccaggtctcaggaggggtgtcctgggcagggaaggtcagtgtcactgatggtttgctgtttggaagccattggcagggctgccgtgcatgtggctgtgagggctgcacagtcctgccaaggggcttcctccttgtcaccccgaaccttgtaatcgtgtgctggcgtggcagccctggctaagttaatccccaccgctttcagtggtagaaagaattccctgagtgggccaggctggtgccctcctcctaccctggcttttctgagtgagctgcctggagccctcatcccctctcccaggctgggctggccctgggcggggccactgtgtgctggcccactgtgacctgacccgaccttgtgcagcccccctgccctggtgtcctgggttttcgtgatgatctttgctctgtttccagtggggtttgaagcagagttcagggaaccctgcccaaggtcctcctgttcagacattcctatgttgaataaagtatgtttgacttccccggaga

SEQ ID NO: 26155 - protein, 121 aa, Homo sapiens [sequence omitted]

SEQ ID NO: 26156 - DNA, 845 bp, Homo sapiens
gaggacgaagtggtaagatgaaagctggcgttgccttcgtgtttatccgggcttctctcttcccatccttgtgatcactctgctgaccctgccacaccctggggccatacacatgactcctgtgcctctgcatctcactggccatttcaaaccagttcgtgagcctgtgttctaaaaagctcatctccattaactgcatctcatgtcggtcacctctgtctttgtttcattgactttgctgatttaacacctctgagaatggctttgaaaggagctacaagtaatgtcttcactggcattcttgaagtgactcctcttgggggttaagtcccattggcctctgccttcctctcctgtgatgttgtggttgatctactcccagccaccgggagtagccgtttcctccctgctcctcctagtgcttgtgagcaaaccttacccttcctccctgtctgagccagcctcttcctgctgccctcctcagcttgatgatgcttcaacttagaagtggtggacccttctcggggtcagctctacctccatgtgacccaggtgagagggagacagctttcaaaaggaggctttgccttccagatgcatcccaaaggaaataatccattaagtagaggcattttgtggaggagtgaaggtggaagccagggtgcagtagggtgaggactggctgggcagagaggaaactgaggcagaagatgtggacagggactctgcagcgattcatggttggtcatggccgattgatacgggcgtgtgctgagtggcagactcataagtgctgagctggatttctcacccagtccttgcttctcctgagaacacctgcagga

SEQ ID NO: 26157 - protein, 48 aa, Homo sapiens
MLWLIYSQPPGVAVSSLLLLVLVSKPYPSSLSEPASSCCPPQLDDAST

SEQ ID NO: 26158 - DNA, 1963 bp, Homo sapiens
ttgagggaatggctgcccaggagaactcagaactcttgaaatgtagttccaggctgccatcattgccctgatattcaggccgtcagacagatgtgtgttgtaggccctgaacggcacagagagtggcagaacaggctacataaacagctcagcccagaattgtctttccagactgcctgccctcagtcacaacccccaccagggaagggaagcggccccaagactccttcctccttcacccactcgaggaaacagagttcctgttacgtggcatgaatgatgtcttttggccccagttaatccctctgagtcaccaggtggcctttgccaagtgctggagctggaagagatgatagagacactcatctggcgtcctgaggctctcctcacagctgttgaattctagagggttgagttccagaataaattctacagcgggaccggtttcaagttcttacccttctccttcgagcatattcgggaagggaagtttgaagagtgagtccctgtgagggccgtgtgccccatgctaccctccccgcctccctccacagtgatcagctgtgcctctctgcctgttggttgtgatctgtgggcaccagctcattcgtgtcaccctgtctgtgagtcatttagatagaatagtcctccttgggtctcccaccacccctagctttgtgtgtagtgtagtgattttctggctgtcactcatactcactgggcaccagccttgccctcttagcctccatccatccagacagcccttcccacctcctggtggtgagccagtctgcattcccacgccatcccaaagccctttcatcttccccgtgcattgtagatggaaggagcacccatgccattcacatctagactttgagttccctgcatctgccaccgtagtttctagcaggagtagtggggggagtaatacagattcttccctagaaggggacactggtaacatgtcccactcttggattagcaggggtgggtccaggaagatgatatttgcgtcttttgcccacccccctggcattcagctggacccaactaggccatcatgagtggcttctccctgtcatccccaggggtcataggatatctacaccgcctttctgaccccaccctgcactcccatcctttcctctctccccgttcatgccctgcactacatagcacagccgggatgcttggaacagaggccttggctgctccgcagtgcacagggcttccctctctcggggttggcttcttcccaggccttgcatgggccctgcccacaagcacaccctcaggccgagggtgcagactgatgctcttccctgatggagaccctgagatcttccccacccccaatcatgatgtcttcagtgtgggactggggtcctcttggttctgcctgcagcctgcctggctccgcccctagtgccccctcctcaccacactggccccaggtctcaggaggggtgtcctgggcagggaaggtcagtgtcactgatggtttgctgtttggaagccattggcagggctgccgtgcatgtggctgtgagggctgcacagtcctgccaaggggcttcctccttgtcaccccgaaccttgtaatcgtgtgctggcgtggcagccctggctaagttaatccccaccgctttcagtggtagaaagaattccctgagtgggccaggctggtgccctcctcctaccctggcttttctgagtgagctgcctggagccctcatcccctctcccaggctgggctggccctgggcggggccactgtgtgctggcccactgtgacctgacccgaccttgtgcagcccccctgccctggtgtcctgggttttcgtgatgatctttgctctgtttccagtggggtttgaagcagagttcagggaaccctgcccaaggtcctcctgttcagacattcctatgttgaataaagtatgtttgacttccccggaga

SEQ ID NO: 26159 - protein, 121 aa, Homo sapiens [sequence omitted]

SEQ ID NO: 26160 - DNA, 219 bp, Homo sapiens
gtaggccctgaacggcacagagagtggcagaacaggctacataaacagctcagcccagaattgtctttccagactgcctgcccctggtgtcctgggttttcgtgatgatctttgctctgtttccagtggggtttgaagcagagttcagggaaccctgcccaaggtcctcctgttcagacattcctatgttgaataaagtatgtttgacttccccggaga

SEQ ID NO: 26161 - protein, 37 aa, Homo sapiens
MIFALFPVGFEAEFREPCPRSSCSDIPMLNKVCLTSP

SEQ ID NO: 26162 - DNA, 1882 bp, Homo sapiens
gtcttcctcccaccctccctgagagtgaaagggccccacagagaccatcaggcatggatgctgaactgctgggaagggagctcaggctttttctttttagtccccaagagaagaattctttctcagatgtttttgtggttggagaatatttttgccattgctttgagaagacttcccctcctaactccccctctttccttggaatttccttccttaaatggaaagccttcaacattcactccaagctcgcccttttgctcccccaaggaaaaataacaagcaaacagaggtgcttgcccagtgtctctggaggggcttcccttagagggttgagttccagaataaattctacagcgggaccggtttcaagttcttacccttctccttcgagcatattcgggaagggaagtttgaagagtgagtccctgtgagggccgtgtgccccatgctaccctccccgcctccctccacagtgatcagctgtgcctctctgcctgttggttgtgatctgtgggcaccagctcattcgtgtcaccctgtctgtgagtcatttagatagaatagtcctccttgggtctcccaccacccctagctttgtgtgtagtgtagtgattttctggctgtcactcatactcactgggcaccagccttgccctcttagcctccatccatccagacagcccttcccacctcctggtggtgagccagtctgcattcccacgccatcccaaagccctttcatcttccccgtgcattgtagatggaaggagcacccatgccattcacatctagactttgagttccctgcatctgccaccgtagtttctagcaggagtagtggggggagtaatacagattcttccctagaaggggacactggtaacatgtcccactcttggattagcaggggtgggtccaggaagatgatatttgcgtcttttgcccacccccctggcattcagctggacccaactaggccatcatgagtggcttctccctgtcatccccaggggtcataggatatctacaccgcctttctgaccccaccctgcactcccatcctttcctctctccccgttcatgccctgcactacatagcacagccgggatgcttggaacagaggccttggctgctccgcagtgcacagggcttccctctctcggggttggcttcttcccaggccttgcatgggccctgcccacaagcacaccctcaggccgagggtgcagactgatgctcttccctgatggagaccctgagatcttccccacccccaatcatgatgtcttcagtgtgggactggggtcctcttggttctgcctgcagcctgcctggctccgcccctagtgccccctcctcaccacactggccccaggtctcaggaggggtgtcctgggcagggaaggtcagtgtcactgatggtttgctgtttggaagccattggcagggctgccgtgcatgtggctgtgagggctgcacagtcctgccaaggggcttcctccttgtcaccccgaaccttgtaatcgtgtgctggcgtggcagccctggctaagttaatccccaccgctttcagtggtagaaagaattccctgagtgggccaggctggtgccctcctcctaccctggcttttctgagtgagctgcctggagccctcatcccctctcccaggctgggctggccctgggcggggccactgtgtgctggcccactgtgacctgacccgaccttgtgcagcccccctgccctggtgtcctgggttttcgtgatgatctttgctctgtttccagtggggtttgaagcagagttcagggaaccctgcccaaggtcctcctgttcagacattcctatgttgaataaagtatgtttgacttccccggaga

SEQ ID NO: 26163 - protein, 125 aa, Homo sapiens
MDAELLGRELRLFLFSPQEKNSFSDVFVVGEYFCHCFEKTSPPNSPSFLGISFLKWKAFNIHSKLALLLPQGKITSKQRCLPSVSGGASLRGLSSRINSTAGPVSSSYPSPSSIFGKGSLKSESL

SEQ ID NO: 26164 - DNA, 1796 bp, Homo sapiens
caggcatggatgctgaactgctgggaagggagctcaggctttttctttttagtccccaagagaagaattctttctcagatgtttttgtggttggagaatatttttgccattgctttgagaagacttcccctcctaactccccctctttccttggaatttccttccttaaatggaaagccttcaacattcactccaagctcgcccttttgctcccccaaggaaaaataacaagcaaacagagggttgagttccagaataaattctacagcgggaccggtttcaagttcttacccttctccttcgagcatattcgggaagggaagtttgaagagtgagtccctgtgagggccgtgtgccccatgctaccctccccgcctccctccacagtgatcagctgtgcctctctgcctgttggttgtgatctgtgggcaccagctcattcgtgtcaccctgtctgtgagtcatttagatagaatagtcctccttgggtctcccaccacccctagctttgtgtgtagtgtagtgattttctggctgtcactcatactcactgggcaccagccttgccctcttagcctccatccatccagacagcccttcccacctcctggtggtgagccagtctgcattcccacgccatcccaaagccctttcatcttccccgtgcattgtagatggaaggagcacccatgccattcacatctagactttgagttccctgcatctgccaccgtagtttctagcaggagtagtggggggagtaatacagattcttccctagaaggggacactggtaacatgtcccactcttggattagcaggggtgggtccaggaagatgatatttgcgtcttttgcccacccccctggcattcagctggacccaactaggccatcatgagtggcttctccctgtcatccccaggggtcataggatatctacaccgcctttctgaccccaccctgcactcccatcctttcctctctccccgttcatgccctgcactacatagcacagccgggatgcttggaacagaggccttggctgctccgcagtgcacagggcttccctctctcggggttggcttcttcccaggccttgcatgggccctgcccacaagcacaccctcaggccgagggtgcagactgatgctcttccctgatggagaccctgagatcttccccacccccaatcatgatgtcttcagtgtgggactggggtcctcttggttctgcctgcagcctgcctggctccgcccctagtgccccctcctcaccacactggccccaggtctcaggaggggtgtcctgggcagggaaggtcagtgtcactgatggtttgctgtttggaagccattggcagggctgccgtgcatgtggctgtgagggctgcacagtcctgccaaggggcttcctccttgtcaccccgaaccttgtaatcgtgtgctggcgtggcagccctggctaagttaatccccaccgctttcagtggtagaaagaattccctgagtgggccaggctggtgccctcctcctaccctggcttttctgagtgagctgcctggagccctcatcccctctcccaggctgggctggccctgggcggggccactgtgtgctggcccactgtgacctgacccgaccttgtgcagcccccctgccctggtgtcctgggttttcgtgatgatctttgctctgtttccagtggggtttgaagcagagttcagggaaccctgcccaaggtcctcctgttcagacattcctatgttgaataaagtatgtttgacttccccggaga

SEQ ID NO: 26165 - protein, 109 aa, Homo sapiens
MDAELLGRELRLFLFSPQEKNSFSDVFVVGEYFCHCFEKTSPPNSPSFLGISFLKWKAFNIHSKLALLLPQGKITSKQRVEFQNKFYSGTGFKFLPFSFEHIREGKFEE

SEQ ID NO: 26166 - DNA, 1092 bp, Homo sapiens
ttgagttccagaataaattctacagcgggaccggtttcaagttcttacccttctccttcgagcatattcgggaagggaagtttgaagagtgagtccctgtgagggccgtgtgccccatgctaccctccccgcctccctccacagtgatcagctgtgcctctctgcctgttggttgtgatctgtgggcaccagctcattcgtgtcaccctgtctgtgagtcatttagatagaatagtcctccttgggtctcccaccacccctagctttgtgtgtagtgtagtgattttctggctgtcactcatactcactgggcaccagccttgccctcttagcctccatccatccagacagcccttcccacctcctggtggtgagccagtctgcattcccacgccatcccaaagccctttcatcttccccgtgcattgtagatggaaggagcacccatgccattcacatctagactttgagttccctgcatctgccaccgtagtttctagcaggagtagtggggggagtaatacagattcttccctagaaggggacactggtaacatgtcccactcttggattagcaggggtgggtccaggaagatgatatttgcgtcttttgcccacccccctggcattcagctggacccaactaggccatcatgagtggcttctccctgtcatccccaggggtcataggatatctacaccgcctttctgaccccaccctgcactcccatcctttcctctctccccgttcatgccctgcactacatagcacagccgggatgcttggaacagaggccttggctgctccgcagtgcacagggcttccctctctcggggttggcttcttcccaggccttgcatgggccctgcccacaagcacaccctcaggccgagggtgcagactgatgctcttccctgatggagaccctgagatcttccccacccccaatcatgatgtcctggtgtcctgggttttcgtgatgatctttgctctgtttccagtggggtttgaagcagagttcagggaaccctgcccaaggtcctcctgttcagacattcctatgttgaataaagtatgtttgacttccccgg

SEQ ID NO: 26167 - protein, 145 aa, Homo sapiens
MSGFSLSSPGVIGYLHRLSDPTLHSHPFLSPRSCPALHSTAGMLGTEALAAPQCTGLPSLGVGFFPGLAWALPTSTPSGRGCRLMLFPDGDPEIFPTPNHDVLVSWVFVMIFALFPVGFEAEFREPCPRSSCSDIPMLNKVCLTS

SEQ ID NO: 26168 - DNA, 1079 bp, Homo sapiens
cagcccttcccacctcctggtggtgagccagtctgcattcccacgccatcccaaagccctttcatcttccccgtgcattgtagatggaaggagcacccatgccattcacatctagactttgagttccctgcatctgccaccgtagtttctagcaggagtagtggggggagtaatacagattcttccctagaaggggacactggtaacatgtcccactcttggattagcaggggtgggtccaggaagatgatatttgcgtcttttgcccacccccctggcattcagctggacccaactaggccatcatgagtggcttctccctgtcatccccaggggtcataggatatctacaccgcctttctgaccccaccctgcactcccatcctttcctctctccccgttcatgccctgcactacatagcacagccgggatgcttggaacagaggccttggctgctccgcagtgcacagggcttccctctctcggggttggcttcttcccaggctcttggttctgcctgcagcctgcctggctccgcccctagtgccccctcctcaccacactggccccaggtctcaggaggggtgtcctgggcagggaaggtcagtgtcactgatggtttgctgtttggaagccattggcagggctgccgtgcatgtggctgtgagggctgcacagtcctgccaaggggcttcctccttgtcaccccgaaccttgtaatcgtgtgctggcgtggcagccctggctaagttaatccccaccgctttcagtggtagaaagaattccctgagtgggccaggctggtgccctcctcctaccctggcttttctgagtgagctgcctggagccctcatcccctctcccaggctgggctggccctgggcggggccactgtgtgctggcccactgtgacctgacccgaccttgtgcagcccccctgccctggtgtcctgggttttcgtgatgatctttgctctgtttccagtggggtttgaagcagagttcagggaaccctgcccaaggtcctcctgttcagacattcctatgttgaataaagtatgtttgacttccccggaga

SEQ ID NO: 26169 - protein, 79 aa, Homo sapiens
MSGFSLSSPGVIGYLHRLSDPTLHSHPFLSPRSCPALHSTAGMLGTEALAAPQCTGLPSLGVGFFPGSWFCLQPAWLRP

SEQ ID NO: 26170 - DNA, 2785 bp, Homo sapiens
tcatcagtagggaagtagctatggcagtgcctgatacaaaataaactccaaatgtgtatttattagatggttggatggaagttatttgcgtgtgaaagcgcgttttacccgaaggcgctctgtgagggccagcgggtccccttcggccctggagccggggtcacacgctccccaccgcgtgcggtcacgagacgcccccaagggagtatcctggtacccggaagccgcgactcctggccctgagcccgggcttagccttcgggtccacgtggccggaggccggcagctgattggacgcgggccgccccaccccctggccgtcgcgggacccgcaggactgagaccatggaggcggtggcggtggccgcggcggtgggggtccttctcctggccggggccgggggcgcggcaggcgacgaggcccgggaggcggcggccgtgcgggcgctcgtggcccggctgctggggccaggccccgcggccgacttctccgtgtcggtggagcgcgctctggctgccaagccgggcttggacacctacagcctgggcggcggcggcgcggcgcgcgtgcgggtgcgcggctccacgggcgtggcggccgccgcggggctgcaccgctacctgcgcgacttctgtggctgccacgtggcctggtccggctctcagctgcgcctgccgcggccactgccagccgtgccgggggagctgaccgaggccacgcccaacaggtaccgctattaccagaatgtgtgcacgcaaagctactctttcgtgtggtgggactgggcccgctgggagcgagagatagactggatggcgctgaatggcatcaacctggcactggcctggagcggccaggaggccatctggcagcgggtgtacctggccttgggcctgacccaggcagagatcaatgagttctttactggtcctgccttcctggcctgggggcgaatgggcaacctgcacacctgggatggccccctgcccccctcctggcacatcaagcagctttacctgcagcaccgggtcctggaccagatgcgctccttcggcatgaccccagtgctgcctgcattcgcggggcatgttcccgaggctgtcaccagggtgttccctcaggtcaatgtcacgaagatgggcagttggggccactttaactgttcctactcctgctccttccttctggctccggaagaccccatattccccatcatcgggagcctcttcctgcgagagctgatcaaagagtttggcacagaccacatctatggggccgacactttcaatgagatgcagccaccttcctcagagccctcctaccttgccgcagccaccactgccgtctatgaggccatgactgcagtggatactgaggctgtgtggctgctccaaggctggctcttccagcaccagccgcagttctgggggcccgcccagatcagggctgtgctgggagctgtgccccgtggccgcctcctggttctggacctgtttgctgagagccagcctgtgtatacccgcactgcctccttccagggccagcccttcatctggtgcatgctgcacaactttgggggaaaccatggtctttttggagccctagaggctgtgaacggaggcccagaagctgcccgcctcttccccaactccaccatggtaggcacgggcatggcccccgagggcatcagccagaacgaagtggtctattccctcatggctgagctgggctggcgaaaggacccagtgccagatttggcagcctgggtgaccagctttgccgcccggcggtatggggtctcccacccggacgcaggggcagcgtggaggctactgctccggagtgtgtacaactgctccggggaggcctgcaggggccacaatcgtagcccgctggtcaggcggccgtccctacagatgaataccagcatctggtacaaccgatctgatgtgtttgaggcctggcggctgctgctcacatctgctccctccctggccaccagccccgccttccgctacgacctgctggacctcactcggcaggcagtgcaggagctggtcagcttgtactatgaggaggcaagaagcgcctacctgagcaaggagctggcctccctgttgagggctggaggcgtcctggcctatgagctgctgccggcactggacgaggtgctggctagtgacagccgcttcttgctgggcagctggctagagcaggcccgagcagcggcagtcagtgaggccgaggccgatttctacgagcagaacagccgctaccagctgaccttgtgggggccagaaggcaacatcctggactatgccaacaagcagctggcggggttggtggccaactactacacccctcgctggcggcttttcctggaggcgctggttgacagtgtggcccagggcatccctttccaacagcaccagtttgacaaaaatgtcttccaactggagcaggccttcgttctcagcaagcagaggtaccccagccagccgcgaggagacactgtggacctggccaagaagatcttcctcaaatattacccccgctgggtggccggctcttggtgatagattcgccaccactgggccttgttttccgctaattccagggcagattccagggcccagagctggacagacatcacaggataacccaggcctgggaggaggccccacggcctgctggtggggtctgacctggggggattggagggaaatgacctgccctccaccaccacccaaagtgtgggattaaagtactgttttctttccactt

SEQ ID NO: 26171 - protein, 743 aa, Homo sapiens; identical to SEQ ID NO: 3487

SEQ ID NO: 26172 - DNA, 1235 bp, Homo sapiens
tcatcagtagggaagtagctatggcagtgcctgatacaaaataaactccaaatgtgtatttattagatggttggatggaagttatttgcgtgtgaaagcgcgttttacccgaaggcgctctgtgagggccagcgggtccccttcggccctggagccggggtcacacgctccccaccgcgtgcggtcacgagacgcccccaagggagtatcctggtacccggaagccgcgactcctggccctgagcccgggcttagccttcgggtccacgtggccggaggccggcagctgattggacgcgggccgccccaccccctggccgtcgcgggacccgcaggactgagaccatggaggcggtggcggtggccgcggcggtgggggtccttctcctggccggggccgggggcgcggcaggcgacgaggcccgggaggcggcggccgtgcgggcgctcgtggcccggctgctggggccaggccccgcggccgacttctccgtgtcggtggagcgcgctctggctgccaagccgggcttggacacctacagcctgggcggcggcggcgcggcgcgcgtgcgggtgcgcggctccacgggcgtggcggccgccgcggggctgcaccgctacctgcgcgacttctgtggctgccacgtggcctggtccggctctcagctgcgcctgccgcggccactgccagccgtgccgggggagctgaccgaggccacgcccaacaggtaccgctattaccagaatgtgtgcacgcaaagctactctttcgtgtggtgggactgggcccgctgggagcgagagatagactggatggcgctgaatggcatcaacctggcactggcctggagcggccaggaggccatctggcagcgggtgtacctggccttgggcctgacccaggcagagatcaatgagttctttactggtcctgccttcctggcctgggggcgaatgggcaacctgcacacctgggatggccccctgcccccctcctggcacatcaagcagctttacctgcagcaccgggtcctggaccagatgcgctccttcggcatgaccccagtgctgcctgcattcgcggggcatgttcccgaggctgtcaccagggtgttccctcaggtcaatgccccacggcctgctggtggggtctgacctggggggattggagggaaatgacctgccctccaccaccacccaaagtgtgggattaaagtactgttttctttccactt

SEQ ID NO: 26173 - protein, 269 aa, Homo sapiens
MEAVAVAAAVGVLLLAGAGGAAGDEAREAAAVRALVARLLGPGPAADFSVSVERALAAKPGLDTYSLGGGGAARVRVRGSTGVAAAAGLHRYLRDFCGCHVAWSGSQLRLPRPLPAVPGELTEATPNRYRYYQNVCTQSYSFVWWDWARWEREIDWMALNGINLALAWSGQEAIWQRVYLALGLTQAEINEFFTGPAFLAWGRMGNLHTWDGPLPPSWHIKQLYLQHRVLDQMRSFGMTPVLPAFAGHVPEAVTRVFPQVNAPRPAGGV

SEQ ID NO: 26174 - DNA, 2992 bp, Homo sapiens
tcatcagtagggaagtagctatggcagtgcctgatacaaaataaactccaaatgtgtatttattagatggttggatggaagttatttgcgtgtgaaagcgcgttttacccgaaggcgctctgtgagggccagcgggtccccttcggccctggagccggggtcacacgctccccaccgcgtgcggtcacgagacgcccccaagggagtatcctggtacccggaagccgcgactcctggccctgagcccgggcttagccttcgggtccacgtggccggaggccggcagctgattggacgcgggccgccccaccccctggccgtcgcgggacccgcaggactgagaccatggaggcggtggcggtggccgcggcggtgggggtccttctcctggccggggccgggggcgcggcaggcgacgaggcccgggaggcggcggccgtgcgggcgctcgtggcccggctgctggggccaggccccgcggccgacttctccgtgtcggtggagcgcgctctggctgccaagccgggcttggacacctacagcctgggcggcggcggcgcggcgcgcgtgcgggtgcgcggctccacgggcgtggcggccgccgcggggctgcaccgctacctgcgcgacttctgtggctgccacgtggcctggtccggctctcagctgcgcctgccgcggccactgccagccgtgccgggggagctgaccgaggccacgcccaacaggtaccgctattaccagaatgtgtgcacgcaaagctactctttcgtgtggtgggactgggcccgctgggagcgagagatagactggatggcgctgaatggcatcaacctggcactggcctggagcggccaggaggccatctggcagcgggtgtacctggccttgggcctgacccaggcagagatcaatgagttctttactggtcctgccttcctggcctgggggcgaatgggcaacctgcacacctgggatggccccctgcccccctcctggcacatcaagcagctttacctgcagcaccgggtcctggaccagatgcgctccttcggcatgaccccagtgctgcctgcattcgcggggcatgttcccgaggctgtcaccagggtgttccctcaggtcaatgtcacgaagatgggcagttggggccactttaactgttcctactcctgctccttccttctggctccggaagaccccatattccccatcatcgggagcctcttcctgcgagagctgatcaaagagtttggcacagaccacatctatggggccgacactttcaatgagatgcagccaccttcctcagagccctcctaccttgccgcagccaccactgccgtctatgaggccatgactgcagtggatactgaggctgtgtggctgctccaaggctggctcttccagcaccagccgcagttctgggggcccgcccagatcagggctgtgctgggagctgtgccccgtggccgcctcctggttctggacctgtttgctgagagccagcctgtgtatacccgcactgcctccttccagggccagcccttcatctggtgcatgctgcacaactttgggggaaaccatggtctttttggagccctagaggctgtgaacggaggcccagaagctgcccgcctcttccccaactccaccatggtaggcacgggcatggcccccgagggcatcagccagaacgaagtggtctattccctcatggctgagctgggctggcgaaaggacccagtgccagatttggcagcctgggtgaccagctttgccgcccggcggtatggggtctcccacccggacgcaggggcagcgtggaggctactgctccggagtgtgtacaactgctccggggaggcctgcaggggccacaatcgtagcccgctggtcaggcggccgtccctacagatgaataccagcatctggtacaaccgatctgatgtgtttgaggcctggcggctgctgctcacatctgctccctccctggccaccagccccgccttccgctacgacctgctggacctcactcggcaggcagtgcaggagctggtcagcttgtactatgaggaggcaagaagcgcctacctgagcaaggagctggcctccctgttgagggctggaggcgtcctggcctatgagctgctgccggcactggacgaggtgctggctagtgacagccgcttcttgctgggcagctggctagagcaggcccgagcagcggcagtcagtgaggccgaggccgatttctacgagcagaacagccgctaccagctgaccttgtgggggccagaaggcaacatcctggactatgccaacaagcagctggcggggttggtggccaactactacacccctcgctggcggcttttcctggaggcgctggttgacagtgtggcccagggcatccctttccaacagcaccagtttgacaaaaatgtcttccaactggagcaggccttcgttctcagcaagcagaggtaccccagccagccgcgaggagacactgtggacctggccaagaagatcttcctcaaatattacccccgctgggtggccggctcttggtgatagattcgccaccactgggccttgttttccgctaattccagggcagattccagggcccagagctggacagacatcacaggataacccaggcctgggaggaggccccacggcctgctggtggggtctgacctggggggattggagggaaatgacctgccctccaccaccacccaaagtgtgggattaaagtactgttttctttccacttaaactgatgagtcccctgggtctgtcaaaatgagaaggtcactgctgccacgcttgggaggactcagggctatagcatggccctggggtgggacctgttctcccatcccttgcctcacgtccctgtttttgtttgtttgtttgtttgtgacggagccttggtctgttgcccaggcttgagtacaatggcacagtctcggctcactgc

SEQ ID NO: 26175 - protein, 743 aa, Homo sapiens; identical to SEQ ID NO: 3487

SEQ ID NO: 26176 - DNA, 329 bp, Homo sapiens
cgctgggggaggacgctgtggcctctgtactggatgtgaatgtagtaggtactgtgcgggtgctgcaggacttcctgccagacatgaagcggccgggttcgggacgcgtgttggtgactgggagcatgggaggattgatggggctgcctttcaatgacgtttattgcgccagcaagttcgcgctcgaaggcttatgcgagagtctggcggttctgctgctgccctttggggtccagtgagtcaacacccccgtctcctcaaccctcagatgggtttgggagggctgtcgagcaataacccgctattcaaatgttctggttatccccagc

SEQ ID NO: 26177 - protein, 51 aa, Homo sapiens
MKRPGSGRVLVTGSMGGLMGLPFNDVYCASKFALEGLCESLAVLLLPFGVQ

SEQ ID NO: 26178 - DNA, 415 bp, Homo sapiens
ggtgctgttctgggtcgtggccagggccggggtcggggccggtgctggggcaggagatgggacttggcgcctgggtcgcctccgtccctgcccacttgcggctctcgggccagcagcgtgagcctgatcgagtgcggccctgtggacaccgccttcatgcagaaggtgttgggcggtcccgaccaggtgatggaccgcacgaacacccggaccttccgcctcttgcactaatacctccaccacagcaaggagatctaccgcgaggaggcgcagcaccctgaggaggtggtgaaggtcttcctcaccgctatgcgcgccccgaagccgaccctgcgctacttcacaaccaggcgcttcctgcaccagctgctgatgcgcctggacgacccctttggcttcgactacgccgccgcca

SEQ ID NO: 26179 - protein, 74 aa, Homo sapiens
MGLGAWVASVPAHLRLSGQQREPDRVRPCGHRLHAEGVGRSRPGDGPHEHPDLPPLALIPPPQQGDLPRGGAAP

SEQ ID NO: 26180 - DNA, 4984 bp, Homo sapiens
agttaggtgggacttgggttggggtagagtcaggttgtgacctgcactccattagccatgagacctcaggcaagttccttgctttctctgagtgctttcctttcctttcccttttcttttcttttttgtttttcttttgttttgagacggagtttcactcttgttgcccagcctggagtgcaatagcgcggtctcagttcaccacaacctctgcctcccgggttcaagtgtagctaggattgcaggcatgtgccaccacgcccagctaattttgtatttttagtagagacgaggtttctccatgttggtcagactggtcttggactcccgacctcaggtgatccgcccgccctggcctctcagagtgctgggattacaggcatgacccaccccatccggccctctgagtctttcttatctgtaaaatgggtataataatacctatctaatcggttttagtaatggtggagataatgcctgaaagtgctagtatagaggtttaatacccagcaaggactgttattagaatgaatagtaatatgactactgtcacattttgcaaatgtgtaaagaagaaagagggctaagtgaatcaaagggagacagccccactcaccctgttctgccccagaggactgagcgatccccaccatctgggaagctgcctcaccaggaggtccagctggggctacaggactggctactttgctacaatggcccatctttcctgagcccagtggagggtcccaggggggcagaagtcattgataggggccagtagggttgtagagccactgtctgaacttctgtggaggtctggtgcaggggaggtgtgaacagataggaggctaggtgaggatgcagcagaggaagggggcaggagtgccccaggagggggcggtaccgaggcagggattcagctgggtctgagagggagggaaggctgagggggatggccctttggagtgggcagggacatgaccacagaaagcctgggaagtggaaacagacaggagcctgctggagctcttggagctttgtgtggggcactaggggaaggaggcaggcactccaccctgacctgcccctacctctggatgagggtcttctctgcctgttggatgatgtgctgcccctgctcttggaggaagaggcctcccagccaccccctcctgccagtcgccttgccctgctgacccagacagatctgctatccctacagcatccaggaaggccacagggagggggcccaggtggcatgggtttctgaggcctgggatctgctctcagtcccgctctcgccaaccccctttgcccctctgtgacagtgtgtgtacatatgcgtgcatgtgtgtacctgtgtggtgtggctcacaaggtcacccctgggggtgggataataagaggtaaagtgtgaccccctctcttccgtacattcattttttcaagcttgtgaatattcacattgttaatataatcttctgcagtcccatgacttcgaatagcacttagatgccgatgacccccccaccaaagaaaccccactgtctcccacagactccaggtctgtatctccaactgcctactcaatacaacacgtccacctgatacaatgaacttaatgtgtctaaaccccaattccacatttccagtcctcctaccggctcctcccccagtcttctctactttactatatgacaactccatttttcccaatactggttttaaaaaccctggagtagtccttgactccagtctctctcacctttcaaccaattcagcagcaaatactgacagctctacctttgctcatcaaagcatatccccaaatcaccctattccagactgcacactgtcatctctcccttcaattacagcagtagcctcctaactagttttcttgattccactcctgcccatcagcagtgaaattaccccagagcagttaaaatgatcttttaggatgggcacagtggctcacgcctgtaataccagcactttgggaggtggaggctggctgatccccttaggttgggagttcaagaccatcctcaccaacagggagaaaccccatctctactaaaaatacaaaaattagccggatgtggtgggacgtgtctgtaatcccaactacttgggaggctgagacaggagaactgcttgaacccgggaggtggaggttgcagtgagccagaatcgtgccacagcactccagcctgggcaagaagcgcgaaactccgtctcaaaataaaataatcttctaaaaatgacagggccaggtggggtggcacttttttataatccgagcactttgggaggctgaggtgggcagatcgcttgacatcaggggtttgagaccagcctggccaacatggtgaaactccgtctctactaaaaatactaaaaattagctgggcgtggtggcgggtgcctgtaatcccagctactcgggaggctgatgcaggagaatcgcctgaaccaggcagatgcaggatgcagtgagccaagattaagacactgcactccaacctaagcaatactttgtctcaaaaataaaaaaaagcctgggaaacaaagtgagaccccgtctctacaaaaaagtcaaaaaattagctgggtatggtggcagtgatggcacacacctgtagtcccggctacttgggaagctttttaatattttttgcagagaccgggtctcactctgttacctggcctggtcttgaactcctgggctccaacaatcccctttcctgggcctcccaaagtgctgggattacaggcatgagccaccgtgcccagcctcaaagcatattttaaaggatagaaataaacagccatatgaagagatacagacagggcggtctggaagggtccagagcaggagcttctatctccatagagttggggttacgtcaccctctgggcacattctgtcagcctccacacgttcagccctcagaagctcccgaaccctgtcctttgggccttttatggagaactccattggctgtccatgactgaagcatggacaactgtgataatgtgattgggcaaaaagggtctgatctaagcccagcaaggccagtccagattctttgggcctttgtgcagcattcctttctccagggtatggggcaaggacccactctggaatgaggatcctacaacccacaatcagattagagtcctgccttgggcagctgaaaagaggacaggagaaggtcagagagacgaaaggctgttttttgaggcctgaggcaccccaacatgacaacgtaagactgtaaccatggtcatgtgagttatgagctaggaaccctggacgaaaccagcacatatacaatcatctcccacctcccaacgcctttactttcacagcctctgcagcaaactgcggtcactataatcgctcctgtggcacagaggcatacccaggggaatctgcccagggggccactctgtgcccacgtgggaacccacacctgcttgtaaagcctcccctccctctgaccagcaaccaggacagtttgttgttccaagcagtgggctcatgtctgttttggctcagaacagggtggggagagcgggccagggacccgcaggaaggcttatccttgagattgcgtgggagacacaacaaggggtgggggcccgcaggcggggcggggcgaagcaggtgatatcaagcccagagccccagcctctccccacagtctcaccatggcccgcaccgtggtgctcatcaccggctgttcctcgggcatcggcctgcacttggccgtacgtctggcttcagatccatcccagagcttcaaagtgtatgccacgttgagggacctgaaaacacagggccggctgtgggaggcggcccgggccctggcatgccctccgggatccctggagacgttgcagctggacgtaagggactcaaaatccgtggccgctgcccgggaacgcgtgactgagggccgcgtggacgtgctggtgtgtaacgcaggcctgggcctgctggggccgctggaggcgctgggggaggacgccgtggcctctgtgctggacgtgaatgtagtagggactgtgcggatgctgcaggccttcctgccagacatgaagaggcgcggttcgggacgcgtgttggtgaccgggagcgtgggaggattgatggggctgcctttcaatgacgtttattgcgccagcaagttcgcgctcgaaggcttatgcgagagtctggcggttctgctgctgccctttggggtccacttgagcctgatcgagtgcggcccagtgcacaccgccttcatggagaaggtgttgggcagcccagaggaggtgctggaccgcacggacatccacaccttccaccgcttctaccaatacctcgcccacagcaagcaagtctttcgcgaggcggcgcagaaccctgaggaggtggcggaggtcttcctcaccgctttgcgcgccccgaagccgaccctgcgctacttcaccaccgagcgcttcctgcccctgctgcggatgcgcctggacgaccccagcggctccaactacgtcaccgccatgcaccgggaagtgttcggcgacgttccggcaaaggccgaggctggggccgaggctgggggcggggccgggcctggggcagaggacgaggccgggcgcggtgcggtgggggaccctgagctcggcgatcctccggccgccccgcagtaaaggcttcctcagccgctgtctcccgcgcccttctttgtcccctgggtctgtgtggtccctggggatggggcggcggtagcagctgtgggtggctaattaagatagatcgcgttagccagttttaccagcgcagctaggcgcgatggctgtcgcctgtaatgccagcgctttgggaggcggaggcaggaggatcgctcaagccccggagttggagaccagccagagcaacacagtgagacccccatctctacaaaaataaagaaaatttaaaaatcag

SEQ ID NO: 26181 - protein, 328 aa, Homo sapiens
MARTVVLITGCSSGIGLHLAVRLASDPSQSFKVYATLRDLKTQGRLWEAARALACPPGSLETLQLDVRDSKSVAAARERVTEGRVDVLVCNAGLGLLGPLEALGEDAVASVLDVNVVGTVRMLQAFLPDMKRRGSGRVLVTGSVGGLMGLPFNDVYCASKFALEGLCESLAVLLLPFGVHLSLIECGPVHTAFMEKVLGSPEEVLDRTDIHTFHRFYQYLAHSKQVFREAAQNPEEVAEVFLTALRAPKPTLRYFTTERFLPLLRMRLDDPSGSNYVTAMHREVFGDVPAKAEAGAEAGGGAGPGAEDEAGRGAVGDPELGDPPAAPQ

SEQ ID NO: 26182 - DNA, 1583 bp, Homo sapiens
aggacccactctggaatgaggatcctacaacccacaatcagattagagtcctgccttgggcagctgaaaagaggacaggagaaggtcagagagacgaaaggctgttttttgaggcctgaggcaccccaacatgacaacgtaagactgtaaccatggtcatgtgagttatgagctaggaaccctggacgaaaccagcacatatacaatcatctcccacctcccaacgcctttactttcacagcctctgcagcaaactgcggtcactataatcgctcctgtggcacagaggcatacccaggggaatctgcccagggggccactctgtgcccacgtgggaacccacacctgcttgtaaagcctcccctccctctgaccagcaaccaggacagtttgttgttccaagcagtgggctcatgtctgttttggctcagaacagggtggggagagcgggccagggacccgcaggaaggcttatccttgagattgcgtgggagacacaacaaggggtgggggcccgcaggcggggcggggcgaagcaggtgatatcaagcccagagccccagcctctccccacagtctcaccatggcccgcaccgtggtgctcatcaccggctgttcctcgggcatcggcctgcacttggccgtacgtctggcttcagatccatcccagagcttcaaagtgtatgccacgttgagggacctgaaaacacagggccggctgtgggaggcggcccgggccctggcatgccctccgggatccctggagacgttgcagctggacgtaagggactcaaaatccgtggccgctgcccgggaacgcgtgactgagggccgcgtggacgtgctggtgtgtaacgcaggcctgggcctgctggggccgctggaggcgctgggggaggacgccgtggcctctgtgctggacgtgaatgtagtagggactgtgcggatgctgcaggccttcctgccagacatgaagaggcgcggttcgggacgcgtgttggtgaccgggagcgtgggaggattgatggggctgcctttcaatgacgtttattgcgccagcaagttcgcgctcgaaggcttatgcgagagtctggcggttctgctgctgccctttggggtccacttgagcctgatcgagtgcggcccagtgcacaccgccttcatggagaaggtgttgggcagcccagaggaggtgctggaccgcacggacatccacaccttccaccgcttctaccaatacctcgcccacagcaagcaagtctttcgcgaggcggcgcagaaccctgaggaggtggcggaggtcttcctcaccgctttgcgcgccccgaagccgaccctgcgctacttcaccaccgagcgcttcctgcccctgctgcggatgcgcctggacgaccccagcggctccaactacgtcaccgccatgcaccgggaagtgttcggcgacgttccggcaaaggccgaggctggggccgaggctgggggcggggccgggcctggggcagaggacgaggccgggcgcggtgcggtgggggaccctgagctcggcgatcctccggccgccccgcagtaaaggcttcctcagc

SEQ ID NO: 26183 - protein, 328 aa, Homo sapiens; identical to SEQ ID NO: 26181

SEQ ID NO: 26184 - DNA, 1625 bp, Homo sapiens
gcctagctgcgctggtaaaactggctaacgcgatctatcttaattagccacccacagctgctaccgccgccccatccccagggaccacacagacccaggggacaaagaagggcgcgggagacagcggctgaggaagcctttactgcggggcggccggaggatcgccgagctcagggtcccccaccgcaccgcgcccggcctcgtcctctgccccaggcccggccccgcccccagcctcggccccagcctcggcctttgccggaacgtcgccgaacacttcccggtgcatggcggtgacgtagttggagccgctggggtcgtccaggcgcatccgcagcaggggcaggaagcgctcggtggtgaagtagcgcagggtcggcttcggggcgcgcaaagcggtgaggaagacctgcggcggcgggaggagagctgtggccaccgctgcgcgccggaggacgcaccgcccccactcctggagtccagcccggcgctcacctccgccacctcctcagggttctgcgccgcctgcgttacacactgcggagacaagaggcccgaccagcccgcctcagcatcaccctcagcacggcctgtcccctcgtgctccctgggcctgggaacatgttggtttcaacgcagggcggagaaggctcctaggagcccatatgcttccaggaggctcacccagcacgtccacgcggccctcagtcacgcgttcccgggcagcggccacggattttgagtcccttacgtccagctgcaacgtctccagggatcccggagggcatgccagggcccgggccgcctcccacagccggccctgtgttttcaggtccctcaacgtggcatacactggaggttttgggagaggaggaagatctgacttcccttctggcctccaagggctcctcccttctctccctccctgtccctgcctatctatacctttgaagctctgggatggatctgaagccagacgtacggccaagtgcaggccgatgcccgaggaacagccggtgatgagcaccacggtgcgggccatggtgagactgtggggagaggctggggctctgggcttgatatcacctgcttcgccccgccccgcctgcgggcccccaccccttgttgtgtctcccacgcaatctcaaggataagccttcctgcgggtccctggcccgctctccccaccctgttctgagccaaaacagacatgagcccactgcttggaacaacaaactgtcctggttgctggtcagagggaggggaggctttacaagcaggtgtgggttcccacgtgggcacagagtggccccctgggcagattcccctgggtatgcctctgtgccacaggagcgattatagtgaccgcagtttgctgcagaggctgtgaaagtaaaggcgttgggaggtgggagatgattgtatatgtgctggtttcgtccagggttcctagctcataactcacatgaccatggttacagtcttacgttgtcatgttggggtgcctcaggcctcaaaaaacagcctttcgtctctctgaccttctcctgtcctcttttcagctgcccaaggcaggactctaatctgattgtgggttgtaggatcctcattccagagtgggtcct

SEQ ID NO: 26185 - protein, 162 aa, Homo sapiens [sequence omitted]

SEQ ID NO: 26186 - DNA, 2624 bp, Homo sapiens
aggacccactctggaatgaggatcctacaacccacaatcagattagagtcctgccttgggcagctgaaaagaggacaggagaaggtcagagagacgaaaggctgttttttgaggcctgaggcaccccaacatgacaacgtaagactgtaaccatggtcatgtgagttatgagctaggaaccctggacgaaaccagcacatatacaatcatctcccacctcccaacgcctttactttcacagcctctgcagcaaactgcggtcactataatcgctcctgtggcacagaggcatacccaggggaatctgcccagggggccactctgtgcccacgtgggaacccacacctgcttgtaaagcctcccctccctctgaccagcaaccaggacagtttgttgttccaagcagtgggctcatgtctgttttggctcagaacagggtggggagagcgggccagggacccgcaggaaggcttatccttgagattgcgtgggagacacaacaaggggtgggggcccgcaggcggggcggggcgaagcaggtgatatcaagcccagagccccagcctctccccacagtctcaccatggcccgcaccgtggtgctcatcaccggctgttcctcgggcatcggcctgcacttggccgtacgtctggcttcagatccatcccagagcttcaaagtgtatgccacgttgagggacctgaaaacacagggccggctgtgggaggcggcccgggccctggcatgccctccgggatccctggagacgttgcagctggacgtaagggactcaaaatccgtggccgctgcccgggaacgcgtgactgagggccgcgtggacgtgctggtgtgtaacgcaggcctgggcctgctggggccgctggaggcgctgggggaggacgccgtggcctctgtgctggacgtgaatgtagtagggactgtgcggatgctgcaggccttcctgccagacatgaagaggcgcggttcgggacgcgtgttggtgaccgggagcgtgggaggattgatgggtgagtggtagggagtggcctcggcagctccagattctttgtgtgcggagctgagccttgaaggcaggttccgcggggggggtggagtggggtgccgtcagcttggaggggcaccgtctgcccggggatgaccccctggccgctgcgcctcaggaacctcgtctccccacctaagggctgcctttcaatgacgtttattgcgccagcaagttcgcgctcgaaggcttatgcgagagtctggcggttctgctgctgccctttggggtccagtgagtcaacacccccgttccccgaaccctcttaactctgacctagagacgccgagcaccctgtcctgcgggagccgctctggggcgatctccctggccctctctgcccggctcacattagctgtgtgccaggcacttgggctgggcgcatggcacgcattgtgccacctgctgacctagctgctgaagtgttggtattgttatggggaagctccagcccagagaggttaggtgactggcccaaggtcacacagcggccagggaccccgctagattcgaatcctgacaccagggctcccttgtagcctcagatggatttgggagggctgctccggcaggaacccgcgtttcaaatgttctggttatccccagcgccctttccgcctcacttcccagcgcagcggtgctgctcgcggtcgggggccgggacgtggttggggctgggactggggttggggctgggactggggcctggctggcgtccgccccctcccactcgttgctctccggccagcagcttgagcctgatcgagtgcggcccagtgcacaccgccttcatggagaaggtgttgggcagcccagaggaggtgctggaccgcacggacatccacaccttccaccgcttctaccaatacctcgcccacagcaagcaagtctttcgcgaggcggcgcagaaccctgaggaggtggcggaggtgagcgccgggctggactccaggagtgggggcggtgcgtcctccggcgcgcagcggtggccacagctctcctcccgccgccgcaggtcttcctcaccgctttgcgcgccccgaagccgaccctgcgctacttcaccaccgagcgcttcctgcccctgctgcggatgcgcctggacgaccccagcggctccaactacgtcaccgccatgcaccgggaagtgttcggcgacgttccggcaaaggccgaggctggggccgaggctgggggcggggccgggcctggggcagaggacgaggccgggcgcggtgcggtgggggaccctgagctcggcgatcctccggccgccccgcagtaaaggcttcctcagccgctgtctcccgcgcccttctttgtcccctgggtctgtgtggtccctggggatggggcggcggtagcagctgtgggtggctaattaagatagatcgcgttagccagttttaccagcgcagctaggcgcgatggctgtcgcctgtaatgccagcgctttgggaggcggaggcaggaggatcgctcaagccccggagttggagaccagccagagcaacacagtgagacccccatctctacaaaaataaagaaaatttaaaaatca

SEQ ID NO: 26187 - protein, 151 aa, Homo sapiens [sequence omitted]

SEQ ID NO: 26188 - DNA, 2889 bp, Homo sapiens
gtgaagccttgatgccgatcggacccccgctgggaccgggcggagaaaggcaagagatgggggtctcactgtgttgctctggctggtctccaactccggggcttgagcgatcctcctgcctccgcctcccaaagcgctggcattacaggcgacagccatcgcgcctagctgcgctggtaaaactggctaacgcgatctatcttaattagccacccacagctgctaccgccgccccatccccagggaccacacagacccaggggacaaagaagggcgcgggagacagcggctgaggaagcctttactgcggggcggccggaggatcgccgagctcagggtcccccaccgcaccgcgcccggcctcgtcctctgccccaggcccggccccgcccccagcctcggccccagcctcggcctttgccggaacgtcgccgaacacttcccggtgcatggcggtgacgtagttggagccgctggggtcgtccaggcgcatccgcagcaggggcaggaagcgctcggtggtgaagtagcgcagggtcggcttcggggcgcgcaaagcggtgaggaagacctgcggcggcgggaggagagctgtggccaccgctgcgcgccggaggacgcaccgcccccactcctggagtccagcccggcgctcacctccgccacctcctcagggttctgcgccgcctcgcgaaagacttgcttgctgtgggcgaggtattggtagaagcggtggaaggtgtggatgtccgtgcggtccagcacctcctctgggctgcccaacaccttctccatgaaggcggtgtgcactgggccgcactcgatcaggctcaagctgctggccggagagcaacgagtgggagggggcggacgccagccaggccccagtcccagccccaaccccagtcccagccccaaccacgtcccggcccccgaccgcgagcagcaccgctgcgctgggaagtgaggcggaaagggcgctggggataaccagaacatttgaaacgcgggttcctgccggagcagccctcccaaatccatctgaggctacaagggagccctggtgtcaggattcgaatctagcggggtccctggccgctgtgtgaccttgggccagtcacctaacctctctgggctggagcttccccataacaataccaacacttcagcagctaggtcagcaggtggcacaatgcgtgccatgcgcccagcccaagtgcctggcacacagctaatgtgagccgggcagagagggccagggagatcgccccagagcggctcccgcaggacagggtgctcggcgtctctaggtcagagttaagagggttcggggaacgggggtgttgactcactggaccccaaagggcagcagcagaaccgccagactctcgcataagccttcgagcgcgaacttgctggcgcaataaacgtcattgaaaggcagcccttaggtggggagacgaggttcctgaggcgcagcggccagggggtcatccccgggcagacggtgcccctccaagctgacggcaccccactccaccccccccgcggaacctgccttcaaggctcagctccgcacacaaagaatctggagctgccgaggccactccctaccactcacccatcaatcctcccacgctcccggtcaccaacacgcgtcccgaaccgcgcctcttcatgtctggcaggaaggcctgcagcatccgcacagtccctactacattcacgtccagcacagaggccacggcgtcctcccccagcgcctccagcggccccagcaggcccaggcctgcgttacacactgcggagacaagaggcccgaccagcccgcctcagcatcaccctcagcacggcctgtcccctcgtgctccctgggcctgggaacatgttggtttcaacgcagggcggagaaggctcctaggagcccatatgcttccaggaggctcacccagcacgtccacgcggccctcagtcacgcgttcccgggcagcggccacggattttgagtcccttacgtccagctgcaacgtctccagggatcccggagggcatgccagggcccgggccgcctcccacagccggccctgtgttttcaggtccctcaacgtggcatacactggaggttttgggagaggaggaagatctgacttcccttctggcctccaagggctcctcccttctctccctccctgtccctgcctatctatacctttgaagctctgggatggatctgaagccagacgtacggccaagtgcaggccgatgcccgaggaacagccggtgatgagcaccacggtgcgggccatggtgagactgtggggagaggctggggctctgggcttgatatcacctgcttcgccccgccccgcctgcgggcccccaccccttgttgtgtctcccacgcaatctcaaggataagccttcctgcgggtccctggcccgctctccccaccctgttctgagccaaaacagacatgagcccactgcttggaacaacaaactgtcctggttgctggtcagagggaggggaggctttacaagcaggtgtgggttcccacgtgggcacagagtggccccctgggcagattcccctgggtatgcctctgtgccacaggagcgattatagtgaccgcagtttgctgcagaggctgtgaaagtaaaggcgttgggaggtgggagatgattgtatatgtgctggtttcgtccagggttcctagctcataactcacatgaccatggttacagtcttacgttgtcatgttggggtgcctcaggcctcaaaaaacagcctttcgtctctctgaccttctcctgtcctcttttcagctgcccaaggcaggactctaatctgattgtgggttgtaggatcctcattccagagtgggtcct

SEQ ID NO: 26189 - protein, 65 aa, Homo sapiens
MPIGPPLGPGGERQEMGVSLCCSGWSPTPGLERSSCLRLPKRWHYRRQPSRLAALVKLANAIYLN

SEQ ID NO: 26190 - DNA, 1539 bp, Homo sapiens
gcctagctgcgctggtaaaactggctaacgcgatctatcttaattagccacccacagctgctaccgccgccccatccccagggaccacacagacccaggggacaaagaagggcgcgggagacagcggctgaggaagcctttactgcggggcggccggaggatcgccgagctcagggtcccccaccgcaccgcgcccggcctcgtcctctgccccaggcccggccccgcccccagcctcggccccagcctcggcctttgccggaacgtcgccgaacacttcccggtgcatggcggtgacgtagttggagccgctggggtcgtccaggcgcatccgcagcaggggcaggaagcgctcggtggtgaagtagcgcagggtcggcttcggggcgcgcaaagcggtgaggaagacctgcggcggcgggaggagagctgtggccaccgctgcgcgccggaggacgcaccgcccccactcctggagtccagcccggcgctcacctccgccacctcctcagggttctgcgccgcctgcgttacacactgcggagacaagaggcccgaccagcccgcctcagcatcaccctcagcacggcctgtcccctcgtgctccctgggcctgggaacatgttggtttcaacgcagggcggagaaggctcctaggagcccatatgcttccaggaggctcacccagcacgtccacgcggccctcagtcacgcgttcccgggcagcggccacggattttgagtcccttacgtccagctgcaacgtctccagggatcccggagggcatgccagggcccgggccgcctcccacagccggccctgtgttttcaggtccctcaacgtggcatacactggaggttttgggagaggaggaagatctgacttcccttctggcctccaagggctcctcccttctctccctccctgtccctgcctatctatacctttgaagctctgggatggatctgaagccagacgtacggccaagtgcaggccgatgcccgaggaacagccggtgatgagcaccacggtgcgggccatggtgagactgtggggagaggctggggctctgggcttgatatcacctgcttcgccccgccccgcctgcgggcccccaccccttgttgtgtctcccacgcaatctcaaggataagccttcctgcgggtccctggcccgctctccccaccctgttctgagccaaaacagacatgagcccactgcttggaacaacaaactgtcctggttgctggtcagagggaggggaggctttacaagcaggtgtgggttcccacgtgggcacagagtggccccctgggcagattcccctgggtatgcctctgtgccacaggagcgattatagtgaccgcagtttgctgcagaggctgtgaaagtaaaggcgttgggaggtgggagatgattgtatatgtgctggtttcgtccagggttcctagctcataactcacatgaccatggttacagtcttacgttgtcatgttggggtgcctcaggcctcaaaaaacagcctttcgtctctctg

SEQ ID NO: 26191 - protein, 162 aa, Homo sapiens [sequence omitted]

SEQ ID NO: 26192 - DNA, 2803 bp, Homo sapiens
gtgaagccttgatgccgatcggacccccgctgggaccgggcggagaaaggcaagagatgggggtctcactgtgttgctctggctggtctccaactccggggcttgagcgatcctcctgcctccgcctcccaaagcgctggcattacaggcgacagccatcgcgcctagctgcgctggtaaaactggctaacgcgatctatcttaattagccacccacagctgctaccgccgccccatccccagggaccacacagacccaggggacaaagaagggcgcgggagacagcggctgaggaagcctttactgcggggcggccggaggatcgccgagctcagggtcccccaccgcaccgcgcccggcctcgtcctctgccccaggcccggccccgcccccagcctcggccccagcctcggcctttgccggaacgtcgccgaacacttcccggtgcatggcggtgacgtagttggagccgctggggtcgtccaggcgcatccgcagcaggggcaggaagcgctcggtggtgaagtagcgcagggtcggcttcggggcgcgcaaagcggtgaggaagacctgcggcggcgggaggagagctgtggccaccgctgcgcgccggaggacgcaccgcccccactcctggagtccagcccggcgctcacctccgccacctcctcagggttctgcgccgcctcgcgaaagacttgcttgctgtgggcgaggtattggtagaagcggtggaaggtgtggatgtccgtgcggtccagcacctcctctgggctgcccaacaccttctccatgaaggcggtgtgcactgggccgcactcgatcaggctcaagctgctggccggagagcaacgagtgggagggggcggacgccagccaggccccagtcccagccccaaccccagtcccagccccaaccacgtcccggcccccgaccgcgagcagcaccgctgcgctgggaagtgaggcggaaagggcgctggggataaccagaacatttgaaacgcgggttcctgccggagcagccctcccaaatccatctgaggctacaagggagccctggtgtcaggattcgaatctagcggggtccctggccgctgtgtgaccttgggccagtcacctaacctctctgggctggagcttccccataacaataccaacacttcagcagctaggtcagcaggtggcacaatgcgtgccatgcgcccagcccaagtgcctggcacacagctaatgtgagccgggcagagagggccagggagatcgccccagagcggctcccgcaggacagggtgctcggcgtctctaggtcagagttaagagggttcggggaacgggggtgttgactcactggaccccaaagggcagcagcagaaccgccagactctcgcataagccttcgagcgcgaacttgctggcgcaataaacgtcattgaaaggcagcccttaggtggggagacgaggttcctgaggcgcagcggccagggggtcatccccgggcagacggtgcccctccaagctgacggcaccccactccaccccccccgcggaacctgccttcaaggctcagctccgcacacaaagaatctggagctgccgaggccactccctaccactcacccatcaatcctcccacgctcccggtcaccaacacgcgtcccgaaccgcgcctcttcatgtctggcaggaaggcctgcagcatccgcacagtccctactacattcacgtccagcacagaggccacggcgtcctcccccagcgcctccagcggccccagcaggcccaggcctgcgttacacactgcggagacaagaggcccgaccagcccgcctcagcatcaccctcagcacggcctgtcccctcgtgctccctgggcctgggaacatgttggtttcaacgcagggcggagaaggctcctaggagcccatatgcttccaggaggctcacccagcacgtccacgcggccctcagtcacgcgttcccgggcagcggccacggattttgagtcccttacgtccagctgcaacgtctccagggatcccggagggcatgccagggcccgggccgcctcccacagccggccctgtgttttcaggtccctcaacgtggcatacactggaggttttgggagaggaggaagatctgacttcccttctggcctccaagggctcctcccttctctccctccctgtccctgcctatctatacctttgaagctctgggatggatctgaagccagacgtacggccaagtgcaggccgatgcccgaggaacagccggtgatgagcaccacggtgcgggccatggtgagactgtggggagaggctggggctctgggcttgatatcacctgcttcgccccgccccgcctgcgggcccccaccccttgttgtgtctcccacgcaatctcaaggataagccttcctgcgggtccctggcccgctctccccaccctgttctgagccaaaacagacatgagcccactgcttggaacaacaaactgtcctggttgctggtcagagggaggggaggctttacaagcaggtgtgggttcccacgtgggcacagagtggccccctgggcagattcccctgggtatgcctctgtgccacaggagcgattatagtgaccgcagtttgctgcagaggctgtgaaagtaaaggcgttgggaggtgggagatgattgtatatgtgctggtttcgtccagggttcctagctcataactcacatgaccatggttacagtcttacgttgtcatgttggggtgcctcaggcctcaaaaaacagcctttcgtctctctg

SEQ ID NO: 26193 - protein, 65 aa, Homo sapiens; identical to SEQ ID NO: 26189

SEQ ID NO: 26194 - DNA, 612 bp, Homo sapiens
cacagtctcaccatggcccgcaccgtggtgctcatcaccggctgttcctcgggcatcggcctgcacttggccgtacgtctggcttcagatccatcccagagcttcaaaggtatagataggcagggacagggagggagagaagggaggagcccttggaggccagaagggaagtcagatcttcctcctctcccaaaacctccagtgtatgccacgttgagggacctgaaaacacagggccggctgtgggaggcggcccgggccctggcatgccctccgggatccctggagacgttgcagctggacgtaagggactcaaaatccgtggccgctgcccgggaacgcgtgactgagggccgcgtggacgtgctggtgtgtaacgcaggcctgggcctgctggggccgctggaggcgctgggggaggacgccgtggcctctgtgctggacgtgaatgtagtagggactgtgcggatgctgcaggccttcctgccagacatgaagaggcgcggttcgggacgcgtgttggtgaccgggagcgtgggaggattgatgggtgagtggtagggagtggcctcggcagctccagattctttgtgtgcggagctgagccttgaa

SEQ ID NO: 26195 - protein, 182 aa, Homo sapiens
MARTVVLITGCSSGIGLHLAVRLASDPSQSFKGIDRQGQGGREGRSPWRPEGKSDLPPLPKPPVYATLRDLKTQGRLWEAARALACPPGSLETLQLDVRDSKSVAAARERVTEGRVDVLVCNAGLGLLGPLEALGEDAVASVLDVNVVGTVRMLQAFLPDMKRRGSGRVLVTGSVGGLMGEW

SEQ ID NO: 26196 - DNA, 2151 bp, Homo sapiens
cgggcatcggcctgcacttggccgtacgtctggcttcagatccatcccagagcttcaaagtgtatgccacgttgagggacctgaaaacacagggccggctgtgggaggcggcccgggccctggcatgccctccgggatccctggagacgttgcagctggacgtaagggactcaaaatccgtggccgctgcccgggaacgcgtgactgagggccgcgtggacgtgctgggtgagcctcctggaagcatatgggctcctaggagccttctccgccctgcgttgaaaccaacatgttcccaggcccagggagcacgaggggacaggccgtgctgagggtgatgctgaggcgggctggtcgggcctcttgtctccgcagtgtgtaacgcaggcctgggcctgctggggccgctggaggcgctgggggaggacgccgtggcctctgtgctggacgtgaatgtagtagggactgtgcggatgctgcaggccttcctgccagacatgaagaggcgcggttcgggacgcgtgttggtgaccgggagcgtgggaggattgatgggtgagtggtagggagtggcctcggcagctccagattctttgtgtgcggagctgagccttgaaggcaggttccgcggggggggtggagtggggtgccgtcagcttggaggggcaccgtctgcccggggatgaccccctggccgctgcgcctcaggaacctcgtctccccacctaagggctgcctttcaatgacgtttattgcgccagcaagttcgcgctcgaaggcttatgcgagagtctggcggttctgctgctgccctttggggtccagtgagtcaacacccccgttccccgaaccctcttaactctgacctagagacgccgagcaccctgtcctgcgggagccgctctggggcgatctccctggccctctctgcccggctcacattagctgtgtgccaggcacttgggctgggcgcatggcacgcattgtgccacctgctgacctagctgctgaagtgttggtattgttatggggaagctccagcccagagaggttaggtgactggcccaaggtcacacagcggccagggaccccgctagattcgaatcctgacaccagggctcccttgtagcctcagatggatttgggagggctgctccggcaggaacccgcgtttcaaatgttctggttatccccagcgccctttccgcctcacttcccagcgcagcggtgctgctcgcggtcgggggccgggacgtggttggggctgggactggggttggggctgggactggggcctggctggcgtccgccccctcccactcgttgctctccggccagcagcttgagcctgatcgagtgcggcccagtgcacaccgccttcatggagaaggtgttgggcagcccagaggaggtgctggaccgcacggacatccacaccttccaccgcttctaccaatacctcgcccacagcaagcaagtctttcgcgaggcggcgcagaaccctgaggaggtggcggaggtgagcgccgggctggactccaggagtgggggcggtgcgtcctccggcgcgcagcggtggccacagctctcctcccgccgccgcaggtcttcctcaccgctttgcgcgccccgaagccgaccctgcgctacttcaccaccgagcgcttcctgcccctgctgcggatgcgcctggacgaccccagcggctccaactacgtcaccgccatgcaccgggaagtgttcggcgacgttccggcaaaggccgaggctggggccgaggctgggggcggggccgggcctggggcagaggacgaggccgggcgcggtgcggtgggggaccctgagctcggcgatcctccggccgccccgcagtaaaggcttcctcagccgctgtctcccgcgcccttctttgtcccctgggtctgtgtggtccctggggatggggcggcggtagcagctgtgggtggctaattaagatagatcgcgttagccagttttaccagcgcagctaggcgcgatggctgtcgcctgtaatgccagcgctttgggaggcggaggcaggaggatcgctcaagccccggagttggagaccagccagagcaacacagtgagacccccatctctacaaaaataaagaaaatttaaaaatca

SEQ ID NO: 26197 - protein, 272 aa, Homo sapiens
MDLGGLLRQEPAFQMFWLSPAPFPPHFPAQRCCSRSGAGTWLGLGLGLGLGLGPGWRPPPPTRCSPASSLSLIECGPVHTAFMEKVLGSPEEVLDRTDIHTFHRFYQYLAHSKQVFREAAQNPEEVAEVSAGLDSRSGGGASSGAQRWPQLSSRRRRSSSPLCAPRSRPCATSPPSASCPCCGCAWTTPAAPTTSPPCTGKCSATFRQRPRLGPRLGAGPGLGQRTRPGAVRWGTLSSAILRPPRSKGFLSRCLPRPSLSPGSVWSLGMGRR

SEQ ID NO: 26198 - DNA, 950 bp, Homo sapiens
gcggagctgagccttgaaggcaggttccgcggggggggtggagtggggtgccgtcagcttggaggggcaccgtctgcccggggatgaccccctggccgctgcgcctcaggaacctcgtctccccacctaagggctgcctttcaatgacgtttattgcgccagcaagttcgcgctcgaaggcttatgcgagagtctggcggttctgctgctgccctttggggtccacttgagcctgatcgagtgcggcccagtgcacaccgccttcatggagaaggtgttgggcagcccagaggaggtgctggaccgcacggacatccacaccttccaccgcttctaccaatacctcgcccacagcaagcaagtctttcgcgaggcggcgcagaaccctgaggaggtggcggaggtcttcctcaccgctttgcgcgccccgaagccgaccctgcgctacttcaccaccgagcgcttcctgcccctgctgcggatgcgcctggacgaccccagcggctccaactacgtcaccgccatgcaccgggaagtgttcggcgacgttccggcaaaggccgaggctggggccgaggctgggggcggggccgggcctggggcagaggacgaggccgggcgcggtgcggtgggggaccctgagctcggcgatcctccggccgccccgcagtaaaggcttcctcagccgctgtctcccgcgcccttctttgtcccctgggtctgtgtggtccctggggatggggcggcggtagcagctgtgggtggctaattaagatagatcgcgttagccagttttaccagcgcagctaggcgcgatggctgtcgcctgtaatgccagcgctttgggaggcggaggcaggaggatcgctcaagccccggagttggagaccagccagagcaacacagtgagacccccatctctacaaaaataaagaaaatttaaaaatcag

SEQ ID NO: 26199 - protein, 135 aa, Homo sapiens
MEKVLGSPEEVLDRTDIHTFHRFYQYLAHSKQVFREAAQNPEEVAEVFLTALRAPKPTLRYFTTERFLPLLRMRLDDPSGSNYVTAMHREVFGDVPAKAEAGAEAGGGAGPGAEDEAGRGAVGDPELGDPPAAPQ

SEQ ID NO: 26200 - DNA, 1211 bp, Homo sapiens
cttaactctgacctagagacgccgagcaccctgtcctgcgggagccgctctggggcgatctccctggccctctctgcccggctcacattagctgtgtgccaggcacttgggctgggcgcatggcacgcattgtgccacctgctgacctagctgctgaagtgttggtattgttatggggaagctccagcccagagaggttaggtgactggcccaaggtcacacagcggccagggaccccgctagattcgaatcctgacaccagggctcccttgtagcctcagatggatttgggagggctgctccggcaggaacccgcgtttcaaatgttctggttatccccagcgccctttccgcctcacttcccagcgcagcggtgctgctcgcggtcgggggccgggacgtggttggggctgggactggggttggggctgggactggggcctggctggcgtccgccccctcccactcgttgctctccggccagcagcttgagcctgatcgagtgcggcccagtgcacaccgccttcatggagaaggtgttgggcagcccagaggaggtgctggaccgcacggacatccacaccttccaccgcttctaccaatacctcgcccacagcaagcaagtctttcgcgaggcggcgcagaaccctgaggaggtggcggaggtcttcctcaccgctttgcgcgccccgaagccgaccctgcgctacttcaccaccgagcgcttcctgcccctgctgcggatgcgcctggacgaccccagcggctccaactacgtcaccgccatgcaccgggaagtgttcggcgacgttccggcaaaggccgaggctggggccgaggctgggggcggggccgggcctggggcagaggacgaggccgggcgcggtgcggtgggggaccctgagctcggcgatcctccggccgccccgcagtaaaggcttcctcagccgctgtctcccgcgcccttctttgtcccctgggtctgtgtggtccctggggatggggcggcggtagcagctgtgggtggctaattaagatagatcgcgttagccagttttaccagcgcagctaggcgcgatggctgtcgcctgtaatgccagcgctttgggaggcggaggcaggaggatcgctcaagccccggagttggagaccagccagagcaacacagtgagacccccatctctacaaaaataaagaaaatttaaaaatca

SEQ ID NO: 26201 - protein, 217 aa, Homo sapiens
MDLGGLLRQEPAFQMFWLSPAPFPPHFPAQRCCSRSGAGTWLGLGLGLGLGLGPGWRPPPPTRCSPASSLSLIECGPVHTAFMEKVLGSPEEVLDRTDIHTFHRFYQYLAHSKQVFREAAQNPEEVAEVFLTALRAPKPTLRYFTTERFLPLLRMRLDDPSGSNYVTAMHREVFGDVPAKAEAGAEAGGGAGPGAEDEAGRGAVGDPELGDPPAAPQ

SEQ ID NO: 26202 - DNA, 790 bp, Homo sapiens
ttgggctgggcgcatggcacgcattgtgccacctgctgacctagctgctgaagtgttggtattgttatggggaagctccagcccagagaggttaggtgactggcccaaggtcacacagcggccagggaccccgctagattcgaatcctgacaccagggctcccttgtagcctcagatggatttgggagggctgctccggcaggaacccgcgtttcaaatgttctggttatccccagcgccctttccgcctcacttcccagcgcagcggtgctgctcgcggtcgggggccgggacgtggttggggctgggactggggttggggctgggactggggcctggctggcgtccgccccctcccactcgttgctctccggccagcagcttgagcctgatcgagtgcggcccagtgcacaccgccttcatggagaaggtgttgggcagcccagaggaggtgctggaccgcacggacatccacaccttccaccgcttctaccaatacctcgccccgcagtaaaggcttcctcagccgctgtctcccgcgcccttctttgtcccctgggtctgtgtggtccctggggatggggcggcggtagcagctgtgggtggctaattaagatagatcgcgttagccagttttaccagcgcagctaggcgcgatggctgtcgcctgtaatgccagcgctttgggaggcggaggcaggaggatcgctcaagccccggagttggagaccagccagagcaacacagtgagacccccatctctacaaaaataaagaaaatttaaaaatca

SEQ ID NO: 26203 - protein, 112 aa, Homo sapiens
MDLGGLLRQEPAFQMFWLSPAPFPPHFPAQRCCSRSGAGTWLGLGLGLGLGLGPGWRPPPPTRCSPASSLSLIECGPVHTAFMEKVLGSPEEVLDRTDIHTFHRFYQYLAPQ

SEQ ID NO: 26204 - DNA, 879 bp, Homo sapiens
agttgcggtttctccgttagtgcttccgggttgcagccagggaagcctccgcggtggtgcaagtggaacccaagccttgaggtttcagtgagtagggggccgacgtgagctttagcgtccccctttagcctccctcttcgattccttgaagaccctggtgcagcttagcaagagggcccaggatttttggatccccagccctgtgacaagggttcctgtccagtttccccctcccaggatttcgactcagttcagcgaagtcaccgccccgtctgagaaatgaggacaccaaggcttagagcacagccccgaggcgccgtctaccaggccccgtcccctcccccggctcctgtcggtcagcactgaaaccccgtccctgctccaggcctccttctctggggtccaaggtcccatacaggcctctgcctcggccgcaggcccttcagtcaccgtcgcctcgtctccctgactgtccgcaggcctgggcagcatggccgtattccggtcgggtctcctggtgctgacgacgccgctggcctccctagcccctcgcctggcctccatcctgacctcggcggcccggctggtgaatcacacactctatgttcacctgcagccgggcatgagcctggagggcccggctcagccccagtccagccccgtgcaggccacgtttgaggttcttgatttcatcacgcacctctatgctggcgccgacgtccacaggcacttggacgtcagaatcctactgaccaatatccgaaccaagagcacctttctccctccccactcttgcccatgggtgactcttacccacagctgactagggccagcgcaaatactggaacctgtaacagaattaaaggtgaatgttctgag

SEQ ID NO: 26205 - protein, 110 aa, Homo sapiens
MAVFRSGLLVLTTPLASLAPRLASILTSAARLVNHTLYVHLQPGMSLEGPAQPQSSPVQATFEVLDFITHLYAGADVHRHLDVRILLTNIRTKSTFLPPHSCPWVTLTHS

SEQ ID NO: 26206 - DNA, 1100 bp, Homo sapiens
agttgcggtttctccgttagtgcttccgggttgcagccagggaagcctccgcggtggtgcaagtggaacccaagccttgaggtttcagtgagtagggggccgacgtgagctttagcgtccccctttagcctccctcttcgattccttgaagaccctggtgcagcttagcaagagggcccaggatttttggatccccagccctgtgacaagggttcctgtccagtttccccctcccaggatttcgactcagttcagcgaagtcaccgccccgtctgagaaatgaggacaccaaggcttagagcacagccccgaggcgccgtctaccaggccccgtcccctcccccggctcctgtcggtcagcactgaaaccccgtccctgctccaggcctccttctctggggtccaaggtcccatacaggcctctgcctcggccgcaggcccttcagtcaccgtcgcctcgtctccctgactgtccgcaggcctgggcagcatggccgtattccggtcgggtctcctggtgctgacgacgccgctggcctccctagcccctcgcctggcctccatcctgacctcggcggcccggctggtgaatcacacactctatgttcacctgcagccgggcatgagcctggagggcccggctcagccccagtccagccccgtgcaggccacgtttgaggttcttgatttcatcacgcacctctatgctggcgccgacgtccacaggcacttggacgtcagaatcctactgaccaatatccgaaccaagaactcatcaggccctcgactgaaaagttctcagtggggccagactggctcctggagctgacaagcgaccccgtggtgaggagaaatgggggccttgatgctcaccctggttcaggcccagaggtccaagctatactgtgcaggacatggccaggcctggtggacacaggaagcctacccaacacgctggtatttggccaacactgaggatgtggttcatgggggagcagtcccctccccactcttgcccatgggtgactcttacccacagctgactagggccagcgcaaatactggaacctgtaacagaattaaaggtgaatgttctgaga

SEQ ID NO: 26207 - protein, 112 aa, Homo sapiens
MAVFRSGLLVLTTPLASLAPRLASILTSAARLVNHTLYVHLQPGMSLEGPAQPQSSPVQATFEVLDFITHLYAGADVHRHLDVRILLTNIRTKNSSGPRLKSSQWGQTGSWS

SEQ ID NO: 26208 - DNA, 1315 bp, Homo sapiens
agttgcggtttctccgttagtgcttccgggttgcagccagggaagcctccgcggtggtgcaagtggaacccaagccttgaggtttcagtgagtagggggccgacgtgagctttagcgtccccctttagcctccctcttcgattccttgaagaccctggtgcagcttagcaagagggcccaggatttttggatccccagccctgtgacaagggttcctgtccagtttccccctcccaggatttcgactcagttcagcgaagtcaccgccccgtctgagaaatgaggacaccaaggcttagagcacagccccgaggcgccgtctaccaggccccgtcccctcccccggctcctgtcggtcagcactgaaaccccgtccctgctccaggcctccttctctggggtccaaggtcccatacaggcctctgcctcggccgcaggcccttcagtcaccgtcgcctcgtctccctgactgtccgcaggcctgggcagcatggccgtattccggtcgggtctcctggtgctgacgacgccgctggcctccctagcccctcgcctggcctccatcctgacctcggcggcccggctggtgaatcacacactctatgttcacctgcagccgggcatgagcctggagggcccggctcagccccagtccagccccgtgcaggccacgtttgaggttcttgatttcatcacgcacctctatgctggcgccgacgtccacaggcacttggacgtcagaatcctactgaccaatatccgaaccaagagcacctttctccctcccctgcccacctcagtccagaatctcgcccacccgccagaagtcgtgttgacagatttccagaccctggatggaagccagtacaacccggtcaaacagcagctagtgcgttacgccaccagctgttacagctgttgtccgcgactggcctcggtgctgctatactccgattatgggataggagaaaagcgcattcccaagactcatcaggccctcgactgaaaagttctcagtggggccagactggctcctggagctgacaagcgaccccgtggtgaggagaaatgggggccttgatgctcaccctggttcaggcccagaggtccaagctatactgtgcaggacatggccaggcctggtggacacaggaagcctacccaacacgctggtatttggccaacactgaggatgtggttcatgggggagcagtcccctccccactcttgcccatgggtgactcttacccacagctgactagggccagcgcaaatactggaacctgtaacagaattaaaggtgaatgttctgaga

SEQ ID NO: 26209 - protein, 171 aa, Homo sapiens
MAVFRSGLLVLTTPLASLAPRLASILTSAARLVNHTLYVHLQPGMSLEGPAQPQSSPVQATFEVLDFITHLYAGADVHRHLDVRILLTNIRTKSTFLPPLPTSVQNLAHPPEVVLTDFQTLDGSQYNPVKQQLVRYATSCYSCCPRLASVLLYSDYGIGEKRIPKTHQALD

SEQ ID NO: 26210 - DNA, 2495 bp, Homo sapiens
agttgcggtttctccgttagtgcttccgggttgcagccagggaagcctccgcggtggtgcaagtggaacccaagccttgaggtttcagtgagtagggggccgacgtgagctttagcgtccccctttagcctccctcttcgattccttgaagaccctggtgcagcttagcaagagggcccaggatttttggatccccagccctgtgacaagggttcctgtccagtttccccctcccaggatttcgactcagttcagcgaagtcaccgccccgtctgagaaatgaggacaccaaggcttagagcacagccccgaggcgccgtctaccaggccccgtcccctcccccggctcctgtcggtcagcactgaaaccccgtccctgctccaggcctccttctctggggtccaaggtcccatacaggcctctgcctcggccgcaggcccttcagtcaccgtcgcctcgtctccctgactgtccgcaggcctgggcagcatggccgtattccggtcgggtctcctggtgctgacgacgccgctggcctccctagcccctcgcctggcctccatcctgacctcggcggcccggctggtgaatcacacactctatgttcacctgcagccgggcatgagcctggagggcccggctcagccccagtccagccccgtgcaggccacgtttgaggttcttgatttcatcacgcacctctatgctggcgccgacgtccacaggcacttggacgtcagaatcctactgaccaatatccgaaccaagagcacctttctccctcccctgcccacctcagtccagaatctcgcccacccgccagaagtcgtgttgacagatttccagaccctggatggaagccagtacaacccggtcaaacagcagctagtgcgttacgccaccagctgttacagctgttgtccgcgactggcctcggtgctgctatactccgattatgggataggagaagtgcccgtggagcccctggatgtccccttaccctccacgatcaggccagcttcccccgtggccgggtctccaaagcagccggtgcgtggctactaccgtggcgctgtcggtggcacgtttgaccgcctgcacaacgcccacaaggtgttgctcagtgtcgcgtgcatcctggcccaggagcagcttgtggtgggagtagcagacaaagatctgttgaagagcaagttgctccctgagctgctccaaccttatacagaacgtgtggaacatctgagtgaattcctggtggacatcaagccctccttgacttttgatgtcatccccctgctggacccctatgggcccgctggctctgacccctccctggagttcctggtggtcagcgaggagacctatcgtggggggatggccatcaaccgcttccgccttgagaatgacctggaggaacttgctttgtaccagatccagctgctgaaggacctcagacatacagagaatgaagaggacaaagtcagctcctccagcttccgccagcgaatgttggggaacctgcttcggcctccatatgaaaggccagagctccccacatgtctctatgtaattgggctgactggcatcagtggctctgggaagagctcaatagctcagcgactgaagggcctgggggcgtttgtcattgacagtgaccacctgggtcatcgggcctatgccccaggtggccctgcctaccagcctgtggtggaggcctttggaacagatattctccataaagatggcatcatcaacaggaaggtcctaggcagccgggtgtttgggaataagaagcagctgaagatactcacggacattatgtggccaattatcgcaaagctggcccgagaggagatggatcgggctgtggctgagggaaagcgtgtgtgtgtgattgatgccgctgtgttgcttgaagccggctggcagaacctggtccatgaggtgtggactgctgtcatcccagagactgaggctgtaagacgcattgtggagagggatggcctcagtgaagccgcggctcaaagccggctgcagagccagatgagcgggcagcagcttgtggaacagagccacgtggtgctcagcaccttgtgggagccgcatatcacccaacgccaggtggagaaagcctgggccctcttgcagaagcgcattcccaagactcatcaggccctcgactgaaaagttctcagtggggccagactggctcctggagctgacaagcgaccccgtggtgaggagaaatgggggccttgatgctcaccctggttcaggcccagaggtccaagctatactgtgcaggacatggccaggcctggtggacacaggaagcctacccaacacgctggtatttggccaacactgaggatgtggttcatgggggagcagtcccctccccactcttgcccatgggtgactcttacccacagctgactagggccagcgcaaatactggaacctgtaacagaattaaaggtgaatgttctgagat

SEQ ID NO: 26211 - protein, 564 aa, Homo sapiens
MAVFRSGLLVLTTPLASLAPRLASILTSAARLVNHTLYVHLQPGMSLEGPAQPQSSPVQATFEVLDFITHLYAGADVHRHLDVRILLTNIRTKSTFLPPLPTSVQNLAHPPEVVLTDFQTLDGSQYNPVKQQLVRYATSCYSCCPRLASVLLYSDYGIGEVPVEPLDVPLPSTIRPASPVAGSPKQPVRGYYRGAVGGTFDRLHNAHKVLLSVACILAQEQLVVGVADKDLLKSKLLPELLQPYTERVEHLSEFLVDIKPSLTFDVIPLLDPYGPAGSDPSLEFLVVSEETYRGGMAINRFRLENDLEELALYQIQLLKDLRHTENEEDKVSSSSFRQRMLGNLLRPPYERPELPTCLYVIGLTGISGSGKSSIAQRLKGLGAFVIDSDHLGHRAYAPGGPAYQPVVEAFGTDILHKDGIINRKVLGSRVFGNKKQLKILTDIMWPIIAKLAREEMDRAVAEGKRVCVIDAAVLLEAGWQNLVHEVWTAVIPETEAVRRIVERDGLSEAAAQSRLQSQMSGQQLVEQSHVVLSTLWEPHITQRQVEKAWALLQKRIPKTHQALD

SEQ ID NO: 26212 - DNA, 2105 bp, Homo sapiens
gttgcggtttctccgttagtgcttccgggttgcagccagggaagcctccgcggtggtgcaagtggaacccaagccttgaggtttcagcctgggcagcatggccgtattccggtcgggtctcctggtgctgacgacgccgctggcctccctagcccctcgcctggcctccatcctgacctcggcggcccggctggtgaatcacacactctatgttcacctgcagccgggcatgagcctggagggcccggctcagccccagtccagccccgtgcaggccacgtttgaggttcttgatttcatcacgcacctctatgctggcgccgacgtccacaggcacttggacgtcagaatcctactgaccaatatccgaaccaagagcacctttctccctcccctgcccacctcagtccagaatctcgcccacccgccagaagtcgtgttgacagatttccagaccctggatggaagccagtacaacccggtcaaacagcagctagtgcgttacgccaccagctgttacagctgttgtccgcgactggcctcggtgctgctatactccgattatgggataggagaagtgcccgtggagcccctggatgtccccttaccctccacgatcaggccagcttcccccgtggccgggtctccaaagcagccggtgcgtggctactaccgtggcgctgtcggtggcacgtttgaccgcctgcacaacgcccacaaggtgttgctcagtgtcgcgtgcatcctggcccaggagcagcttgtggtgggagtagcagacaaagatctgttgaagagcaagttgctccctgagctgctccaaccttatacagaacgtgtggaacatctgagtgaattcctggtggacatcaagccctccttgacttttgatgtcatccccctgctggacccctatgggcccgctggctctgacccctccctggagttcctggtggtcagcgaggagacctatcgtggggggatggccatcaaccgcttccgccttgagaatgacctggaggaacttgctttgtaccagatccagctgctgaaggacctcagacatacagagaatgaagaggacaaagtcagctcctccagcttccgccagcgaatgttggggaacctgcttcggcctccatatgaaaggccagagctccccacatgtctctatgtaattgggctgactggcatcagtggctctgggaagagctcaatagctcagcgactgaagggcctgggggcgtttgtcattgacagtgaccacctgggtcatcgggcctatgccccaggtggccctgcctaccagcctgtggtggaggcctttggaacagatattctccataaagatggcatcatcaacaggaaggtcctaggcagccgggtgtttgggaataagaagcagctgaagatactcacggacattatgtggccaattatcgcaaagctggcccgagaggagatggatcgggctgtggctgagggaaagcgtgtgtgtgtgattgatgccgctgtgttgcttgaagccggctggcagaacctggtccatgaggtgtggactgctgtcatcccagagactgaggctgtaagacgcattgtggagagggatggcctcagtgaagccgcggctcaaagccggctgcagagccagatgagcgggcagcagcttgtggaacagagccacgtggtgctcagcaccttgtgggagccgcatatcacccaacgccaggtggagaaagcctgggccctcttgcagaagcgcattcccaagactcatcaggccctcgactgaaaagttctcagtggggccagactggctcctggagctgacaagcgaccccgtggtgaggagaaatgggggccttgatgctcaccctggttcaggcccagaggtccaagctatactgtgcaggacatggccaggcctggtggacacaggaagcctacccaacacgctggtatttggccaacactgaggatgtggttcatgggggagcagtcccctccccactcttgcccatgggtgactcttacccacagctgactagggccagcgcaaatactggaacctgtaacagaattaaaggtgaatgttctgagatgtt

SEQ ID NO: 26213 - protein, 564 aa, Homo sapiens; identical to SEQ ID NO: 26211

SEQ ID NO: 26214 - DNA, 1059 bp, Homo sapiens
agtgcttccgggttgcagccagggaagcctccgcggtggtgcaagtggaacccaagccttgaggtttcatttccccctcccaggatttcgactcagttcagcgaagtcaccgccccgtctgagaaatgaggacaccaaggcttagagcacagccccgaggcgccgtctaccaggccccgtcccctcccccggctcctgtcggtcagcactgaaaccccgtccctgctccaggcctccttctctggggtccaaggtcccatacaggcctctgcctcggccgcaggcccttcagtcaccgtcgcctcgtctccctgactgtccgcaggcctgggcagcatggccgtattccggtcgggtctcctggtgctgacgacgccgctggcctccctagcccctcgcctggcctccatcctgacctcggcggcccggctggtgaatcacacactctatgttcacctgcagccgggcatgagcctggagggcccggctcagccccagtccagccccgtgcaggccacgtttgaggttcttgatttcatcacgcacctctatgctggcgccgacgtccacaggcacttggacgtcagaatcctactgaccaatatccgaaccaagagcacctttctccctcccctgcccacctcagtccagaatctcgcccacccgccagaagtcgtgttgacagatttccagaccctggatggaagccagtacaacccggtcaaacagcagctagtgcgttacgccaccagctgttacagctgttgtccgcgactggcctcggtgctgctatactccgattatgggataggagaagtgcccgtggagcccctggatgtccccttaccctccacgatcaggccagcttcccccgtggccgggtctccaaagcagccggtgcgtggctactaccgtggcgctgtcggtggcacgtttgaccgcctgcacaacgcccacaaggtgttgctcagtgtcgcgtgcatcctggcccaggagcagcttgtggtgggagtagcagacaaagatctgttgaagagtgagtaagagggaccctggact

SEQ ID NO: 26215 - protein, 235 aa, Homo sapiens [sequence omitted]

SEQ ID NO: 26216 - DNA, 490 bp, Homo sapiens
agtgcttccgggttgcagccagggaagcctccgcggtggtgcaagtggaacccaagccttgaggtttcagtgagtagggggccgacgtgagctttagcgtccccctttagcctccctcttcgattccttgaagaccctcttgcagaagcgcattcccaagactcatcaggccctcgactgaaaagttctcagtggggccagactggctcctggagctgacaagcgaccccgtggtgaggagaaatgggggccttgatgctcaccctggttcaggcccagaggtccaagctatactgtgcaggacatggccaggcctggtggacacaggaagcctacccaacacgctggtatttggccaacactgaggatgtggttcatgggggagcagtcccctccccactcttgcccatgggtgactcttacccacagctgactagggccagcgcaaatactggaacctgtaacagaattaaaggtgaatgttctgaga

SEQ ID NO: 26217 - protein, 81 aa, Homo sapiens
MGALMLTLVQAQRSKLYCAGHGQAWWTQEAYPTRWYLANTEDVVHGGAVPSPLLPMGDSYPQLTRASANTGTCNRIKGECS

SEQ ID NO: 26218 - DNA, 3130 bp, Homo sapiens
tgagaaatgaggacaccaaggcttagagcacagccccgaggcgccgtctaccaggccccgtcccctcccccggctcctgtcggtcagcactgaaaccccgtccctgctccaggcctccttctctggggtccaaggtcccatacaggcctctgcctcggccgcaggcccttcagtcaccgtcgcctcgtctccctgactgtccgcaggcctgggcagcatggccgtattccggtcgggtctcctggtgctgacgacgccgctggcctccctagcccctcgcctggcctccatcctgacctcggcggcccggctggtgaatcacacactctatgttcacctgcagccgggcatgagcctggagggcccggctcagccccagtccagccccgtgcaggccacgtttgaggttcttgatttcatcacgcacctctatgctggcgccgacgtccacaggcacttggacgtcagaatcctactgaccaatatccgaaccaagagcacctttctccctcccctgcccacctcagtccagaatctcgcccacccgccagaagtcgtgttgacagatttccagaccctggatggaagccagtacaacccggtcaaacagcagctagtgcgttacgccaccagctgttacagctgttgtccgcgactggcctcggtgctgctatactccgattatgggataggagaagtgcccgtggagcccctggatgtccccttaccctccacgatcaggccagcttcccccgtggccgggtctccaaagcagccggtgcgtggctactaccgtggcgctgtcggtggcacgtttgaccgcctgcacaacgcccacaaggtgttgctcagtgtcgcgtgcatcctggcccaggagcagcttgtggtgggagtagcagacaaagatctgttgaagagtgagtaagagggaccctggactagggtggaggatccccaaatctccccacccccgacccttatgccgagatcaaggaagggtagggccattcattacttcccacccttcccaaatgtcacagtggttgacactcaattggtgctaaggccattttgtcaaatgaacagctttctcagcatgtggtccagtcaccactcaatcagaataccccaaatgtgaagcaaagggatctgcattttagcaagttttccaggtgatacaccctaatgagacactgggaatgaatgggtgagtgagctgcaggtagcagtgccacagacaggaggaggaaactcaagcatggcatgggtcttggaattttccatctgcctctgatgccctctggcactgctcgttctctggagtggtttcctggtggcttattctctggacacatgccagcccttggagtgactattgtgcttgcctgtttcttcaccttcatgctcccctcaccatcaccataggccttaccagttgaaccctttctgccaccccctctggggatactgtacttagggacactttttcccaaactggcccatactctcctccccaataaaaagatctcactgttcttctgggctccttccccaggcaagttgctccctgagctgctccaaccttatacagaacgtgtggaacatctgagtgaattcctggtggacatcaagccctccttgacttttgatgtcatccccctgctggacccctatgggcccgctggctctgacccctccctggagttcctggtggtcagcgaggagacctatcgtggggggatggccatcaaccgcttccgccttgagaatgtaacccctgagggagactggcagagggagtggatgggggacggggaaggccattttgagggggctgttggaagtaccatggccccagaggagagaagtgggggctcagggtggtgggaagaagcaaggaggaactggttctcagtttgcccgctgagtcggaggaggaggagcctgggtaggaaggggaggatgggggggcaggttggatgtcagggtcttcctctcactccctccttccctctttttaccctttcctctttaccccaggacctggaggaacttgctttgtaccagatccagctgctgaaggacctcagacatacagagaatgaagaggacaaagtcagctcctccagcttccgccagcgaatgttggggaacctgcttcggcctccatatgaaaggccagagctccccacatgtctctatgtaattgggctgactggcatcagtggctctgggaagagctcaatagctcagcgactgaagggcctgggggcgtttgtcattgacagtgaccacctgggtcatcgggcctatgccccaggtggccctgcctaccagcctgtggtggaggcctttggaacagatattctccataaagatggcatcatcaacaggaaggtcctaggcagccgggtgtttgggaataagaagcagctgaagatactcacggacattatgtggccaattatcgcaaagctggcccgagaggagatggatcgggctgtggctgagggaaagcgtgtgtgtgtgattgatgccgctgtgttgcttgaagccggctggcagaacctggtccatgaggtgtggactgctgtcatcccagagactgaggctgtaagacgcattgtggagagggatggcctcagtgaagccgcggctcaaagccggctgcagagccagatgagcgggcagcagcttgtggaacagagccacgtggtgctcagcaccttgtgggagccgcatatcacccaacgccaggtggagaaagcctgggccctcttgcagaagcgcattcccaagactcatcaggccctcgactgaaaagttctcagtggggccagactggctcctggagctgacaagcgaccccgtggtgaggagaaatgggggccttgatgctcaccctggttcaggcccagaggtccaagctatactgtgcaggacatggccaggcctggtggacacaggaagcctacccaacacgctggtatttggccaacactgaggatgtggttcatgggggagcagtcccctccccactcttgcccatgggtgactcttacccacagctgactagggccagcgcaaatactggaacctgtaacagaattaaaggtgaatgttctgagat

SEQ ID NO: 26219 - protein, 359 aa, Homo sapiens
MAINRFRLENVTPEGDWQREWMGDGEGHFEGAVGSTMAPEERSGGSGWWEEARRNWFSVCPLSRRRRSLGRKGRMGGQVGCQGLPLTPSFPLFTLSSLPQDLEELALYQIQLLKDLRHTENEEDKVSSSSFRQRMLGNLLRPPYERPELPTCLYVIGLTGISGSGKSSIAQRLKGLGAFVIDSDHLGHRAYAPGGPAYQPVVEAFGTDILHKDGIINRKVLGSRVFGNKKQLKILTDIMWPIIAKLAREEMDRAVAEGKRVCVIDAAVLLEAGWQNLVHEVWTAVIPETEAVRRIVERDGLSEAAAQSRLQSQMSGQQLVEQSHVVLSTLWEPHITQRQVEKAWALLQKRIPKTHQALD

SEQ ID NO: 26220 - DNA, 918 bp, Homo sapiens
cttgagaatgtaacccctgagggagactggcagagggagtggatgggggacggggaaggccattttgagggggctgttggaagtaccatggccccagaggagagaagtgggggctcagggtggtgggaagaagcaaggaggaactggttctcagtttgcccgctgagtcggaggaggaggagcctgggtaggaaggggaggatgggggggcaggttggatgtcagggtcttcctctcactccctccttccctctttttaccctttcctctttaccccaggacctggaggaacttgctttgtaccagatccagctgctgaaggacctcagacatacagagaatgaagaggacaaagtcagctcctccagcttccgccagcgaatgttggggaacctgcttcggcctccatatgtaagctcctctccctccttccctcctgcttggtgtcctggcaatgctggagagtagaagctgaggggctcagccccaggcatgaggctgagggccccagtaactgtgggttccctttcacctatccccaggaaaggccagagctccccacatgtctctatgtaattgggctgactggcatcagtggctctgggaagagctcaatagctcagcgactgaagggcctgggggcgtttgtcattgacagtgaccacctgggtcatcgggcctatgccccaggtggccctgcctaccagcctgtggtggaggcctttggaacaggtaataactggggaaggctgaaagtggcctggagtgaggagctagccaggcctctgtgctcagttgtctgtctgtgttgtccagatattctccccactcttgcccatgggtgactcttacccacagctgactagggccagcgcaaatactggaacctgtaacagaattaaaggtgaatgttctgag

SEQ ID NO: 26221 - protein, 141 aa, Homo sapiens
MGDGEGHFEGAVGSTMAPEERSGGSGWWEEARRNWFSVCPLSRRRRSLGRKGRMGGQVGCQGLPLTPSFPLFTLSSLPQDLEELALYQIQLLKDLRHTENEEDKVSSSSFRQRMLGNLLRPPYVSSSPSFPPAWCPGNAGE

SEQ ID NO: 26222 - DNA, 716 bp, Homo sapiens
tccccacaggaaagcgtgtgtgtgtgattgatgccgctgtgttgcttgaagccggctggcagaacctggtccatgaggtgtggactgctgtcatcccagagactgaggtatctcgccccaccccccacaccatccctactgcagatcctatcctgtgagctggaattcttcctgacaaatgtctcgtctgtgctcaggctgtaagacgcattgtggagagggatggcctcagtgaagccgcggctcaaagccggctgcagagccagatgagcgggcagcagcttgtggaacagagccacgtggtgctcagcaccttgtgggagccgcatatcacccaacgccaggtggagaaagcctgggccctcttgcagaagcgcattcccaagactcatcaggccctcgactgaaaagttctcagtggggccagactggctcctggagctgacaagcgaccccgtggtgaggagaaatgggggccttgatgctcaccctggttcaggcccagaggtccaagctatactgtgcaggacatggccaggcctggtggacacaggaagcctacccaacacgctggtatttggccaacactgaggatgtggttcatgggggagcagtcccctccccactcttgcccatgggtgactcttacccacagctgactagggccagcgcaaatactggaacctgtaacagaattaaaggtgaatgttctgaga

SEQ ID NO: 26223 - protein, 46 aa, Homo sapiens [sequence omitted]

SEQ ID NO: 26224 - DNA, 1031 bp, Homo sapiens
cgccacccgcttcctcgccgcagggggcccgcccgctggcccgtttccggtccggtgggtacaagatgacggagccgggcgcctctcccgaggacccttgggtcaaggtggagtatgcctacagcgacaacagcctggaccccgggctttttgtagaaagcacccgcaaggggagtgtagtgtccagagctaatagcatcggttccaccagtgcctcttctgtccccaacacagatgatgaggacagtgattaccaccaggaggcctacaaggagtcctacaaagaccggcggcggcgcgcacacactcaggctgagcagaagaggagggacgccatcaagagaggctatgatgaccttcagaccatcgtccccacttgccagcagcaggacttctccattggctcccaaaagctcagcaaagccatcgttctacaaaagaccattgactacattcagtttttgcacaaggagaagaaaaagcaggaggaggaggtgtccacgttacgcaaggatgtcaccgccctaaagatcatgaaagtgaactatgagcagattgtgaaggcacaccaggacaacccccatgaaggggaggaccaggtctctgaccaggtcaagttcaacgtgtttcaaggcatcatggattccctgttccagtccttcaatgcctccatctcagtggccagcttccaggagctgtcagcgtgtgtcttcagctggatcgaggagcactgtaagcctcagaccctgcgggagattgtgattggcgtcctgcaccaattgaaaaaccagctttactgaccggttcttggaaacctggagaacagccaacaagaggcccttgaatctctacgtggccactgaactgctgggcccgggagactggactacaacacctcacactggtcagctggtttctacttggtgtttggtttttcccagccccattttatcttcagcggagccgcggtgtttgttttgtgaaagcttctgattaatttattatattgacgataaaactcaaacctaccc

SEQ ID NO: 26225 - protein, 244 aa, Homo sapiens; identical to SEQ ID NO: 3493

SEQ ID NO: 26226 - DNA, 1164 bp, Homo sapiens
cgccacccgcttcctcgccgcagggggcccgcccgctggcccgtttccggtccggtgggtacaagatgacggagccgggcgcctctcccgaggacccttgggtcaaggtggagtatgcctacagcgacaacagcctggaccccgggctttttgtagaaagcacccgcaaggggagtgtagtgtccagagctaatagcatcggttccaccagtgcctcttctgtccccaacacagatgatgaggacagtgattaccaccaggaggcctacaaggagtcctacaaagaccggcggcggcgcgcacacactcaggctgagcagaagaggagggacgccatcaagagaggctatgatgaccttcagaccatcgtccccacttgccagcagcaggacttctccattggctcccaaaagctcagcaaagccatcgttctacaaaagaccattgactacattcagtttttgcacaaggagaagaaaaagcaggaggaggaggtgtccacgttacgcaaggatgtcaccgccctaaagatcatgaaagtgaactatgagcagattgtgaaggcacaccaggacaacccccatgaaggggaggaccaggtctctgaccaggtcaagttcaacgtgtttcaaggcatcatggattccctgttccagtccttcaatgcctccatctcagtggccagcttccaggagctgtcagcgtgtgtcttcagctggatcgaggagcactgtaagcctcagaccctgcgggagattgtgattggcgtcctgcaccaattgaaaaaccagctttactgaccggttcttggaaacctggagaacagccaacaagaggcccttgaatctctacgtggccactgaactgctgggcccgggagactggactacaacacctcacactggtcagctggtttctacttggtgtttggtttttcccagccccattttatcttcagcggagccgcggtgtttgttttgtgaaagcttctgattaatttattatattgacgataaaactcaaacctacccagccttccccccactccatggaagtccttgggatgggcgtctgctctggacaccccaaagagctcctgccctctcagccctttattcaagcctcagatttctgctcatgatctacatagatttggaaactgtt

SEQ ID NO: 26227 - protein, 244 aa, Homo sapiens; identical to SEQ ID NO: 3493

SEQ ID NO: 26228 - DNA, 1909 bp, Homo sapiens
cgccacccgcttcctcgccgcagggggcccgcccgctggcccgtttccggtccggtgggtacaagatgacggagccgggcgcctctcccgaggacccttgggtcaaggtggagtatgcctacagcgacaacagcctggaccccgggctttttgtagaaagcacccgcaaggggagtgtagtgtccagagctaatagcatcggttccaccagtgcctcttctgtccccaacacagatgatgaggacagtgattaccaccaggaggcctacaaggagtcctacaaagaccggcggcggcgcgcacacactcaggctgagcagaagaggagggacgccatcaagagaggctatgatgaccttcagaccatcgtccccacttgccagcagcaggacttctccattggctcccaaaagctcagcaaagccatcgttctacaaaagaccattgactacattcagtttttgcacaaggagaagaaaaagcaggaggaggaggtgtccacgttacgcaaggatgtcaccgccctaaagatcatgaaagtgaactatgagcagattgtgaaggcacaccaggacaacccccatgaaggggaggaccaggtctctgaccaggtcaagttcaacgtgtttcaaggcatcatggattccctgttccagtccttcaatgcctccatctcagtggccagcttccaggagctgtcagcgtgtgtcttcagctggatcgaggagcactgtaagcctcagaccctgcgggagattgtgattggcgtcctgcaccaattgaaaaaccagctttactgaccggttcttggaaacctggagaacagccaacaagaggcccttgaatctctacgtggccactgaactgctgggcccgggagactggactacaacacctcacactggtcagctggtttctacttggtgtttggtttttcccagccccattttatcttcagcggagccgcggtgtttgttttgtgaaagcttctgattaatttattatattgacgataaaactcaaacctacccagccttccccccactccatggaagtccttgggatgggcgtctgctctggacaccccaaagagctcctgccctctcagccctttattcaagcctcagatttctgctcatgatctacatagatttggaaactgttttcctctgttttggtctcttgggcaacatttttggcccaagtttgggcaacatttggcccaagtttgggcattttggcagtagctgtatgggagaaaaagagtaagaggaaatattcccacagccatgaagggtgaaagggcaccttgtgcctagactagggctgcctggtcagtcccaggtgaggccaagggctttctggccatctcagggaggggccaccaggttcctcccctcaccccatattccatcaccttcctcctctgctctgggtggtaagggaagccctcccggttcccacaggctatgatgctgcatggcagaggcaggtataacacagcactacatattggaaattttttatttttctaaataccaatgcagttttgctacggttacaattttgaaatattaactgagcctcaaaatcaccctttctgtcaagcatatcttggcctctcccatgtctcagtgttgcctgcatttctcccaggacttgggggtggggtgaaaagcgtacaaaagatacttaaaagggctcctggggtacacaagcccagcaggtcctgagtgaagccgtgggccctccaaatgctcgttttatagcaacctctctctaccctagttctccaaattcacttctgccttcctcaggtttgatatctggcaggtttgactatccagaggaaattaaatatttttatataaaattaaattataataaatattgccaaatgctttccttt

SEQ ID NO: 26229 - protein, 244 aa, Homo sapiens; identical to SEQ ID NO: 3493

SEQ ID NO: 26230 - DNA, 2309 bp, Homo sapiens
cgccacccgcttcctcgccgcagggggcccgcccgctggcccgtttccggtccggtgggtacaagatgacggagccgggcgcctctcccgaggacccttgggtcaaggtggagtatgcctacagcgacaacagcctggaccccgatgatgaggacagtgattaccaccaggaggcctacaaggagtcctacaaagaccggcggcggcgcgcacacactcaggctgagcagaagaggagggacgccatcaagagaggctatgatgaccttcagaccatcgtccccacttgccagcagcaggacttctccattggctcccaaaagctcagcaaagccatcgttctacaaaagaccattgactacattcagtttttgcacaaggagaagaaaaagcaggaggaggaggtgtccacgttacgcaaggatgtcaccgccctaaagatcatgaaagtgaactatgagcagattgtgaaggcacaccaggacaacccccatgaaggggaggaccaggtctctgaccaggtcaagttcaacgtgtttcaaggcatcatggattccctgttccagtccttcaatgcctccatctcagtggccagcttccaggagctgtcagcgtgtgtcttcagctggatcgaggagcactgtaagcctcagaccctgcgggagattgtgattggcgtcctgcaccaattgaaaaaccagctttactgaccggttcttggaaacctggagaacagccaacaagaggcccttgaatctctacgtggccactgaactgctgggcccgggagactggactacaacacctcacactggtcagctggtttctacttggtgtttggtttttcccagccccattttatcttcagcggagccgcggtgtttgttttgtgaaagcttctgattaatttattatattgacgataaaactcaaacctacccagccttccccccactccatggaagtccttgggatgggcgtctgctctggacaccccaaagagctcctgccctctcagccctttattcaagcctcagatttctgctcatgatctacatagatttggaaactgttttcctctgttttggtctcttgggcaacatttttggcccaagtttgggcaacatttggcccaagtttgggcattttggcagtagctgtatgggagaaaaagagtaagaggaaatattcccacagccatgaagggtgaaagggcaccttgtgcctagactagggctgcctggtcagtcccaggtgaggccaagggctttctggccatctcagggaggggccaccaggttcctcccctcaccccatattccatcaccttcctcctctgctctgggtggtaagggaagccctcccggttcccacaggctatgatgctgcatggcagaggcaggtataacacagcactacatattggaaattttttatttttctaaataccaatgcagttttgctacggttacaattttgaaatattaactgagcctcaaaatcaccctttctgtcaagcatatcttggcctctcccatgtctcagtgttgcctgcatttctcccaggacttgggggtggggtgaaaagcgtacaaaagatacttaaaagggctcctggggtacacaagcccagcaggtcctgagtgaagccgtgggccctccaaatgctcgttttatagcaacctctctctaccctagttctccaaattcacttctgccttcctcaggtttgatatctggcaggtttgactatccagaggaaattaaatatttttatataaaattaaattataataaatattgccaaatgctttcctttagcattgttccaagtctaaatgttaacctcaagctactgcaatttagacaatgaaatgggctgggtctacccccagccaccagccctcatcctctctacccagtgctctggtttatgcttgtctcctgactgctctgcttaaaggtgaaagtagcaggaacaacaacaaaagccaaccaaaaacaaggtagccagtgcaagacatctcactcttctgacatcctgcagtccccaccagtcctgaccgtgggcccctcaggggtctgggagtgtgacgttgtaatcttcatccgtctctatcccaacttcctcctgtgagacagggagacaagtgaatgagatgtcaccaggataagaccacagggaagcaaagaaggaagagagctccacttacaaagaactgcttcttgctcttggggtatccttcaagtattgcatcagacagctctgtagcctgacaagaaataaaaccacccgttttcagatgggc

SEQ ID NO: 26231 - protein, 214 aa, Homo sapiens; identical to SEQ ID NO: 3495

SEQ ID NO: 26232 - DNA, 2399 bp, Homo sapiens
cgccacccgcttcctcgccgcagggggcccgcccgctggcccgtttccggtccggtgggtacaagatgacggagccgggcgcctctcccgaggacccttgggtcaaggtggagtatgcctacagcgacaacagcctggaccccgggctttttgtagaaagcacccgcaaggggagtgtagtgtccagagctaatagcatcggttccaccagtgcctcttctgtccccaacacagatgatgaggacagtgattaccaccaggaggcctacaaggagtcctacaaagaccggcggcggcgcgcacacactcaggctgagcagaagaggagggacgccatcaagagaggctatgatgaccttcagaccatcgtccccacttgccagcagcaggacttctccattggctcccaaaagctcagcaaagccatcgttctacaaaagaccattgactacattcagtttttgcacaaggagaagaaaaagcaggaggaggaggtgtccacgttacgcaaggatgtcaccgccctaaagatcatgaaagtgaactatgagcagattgtgaaggcacaccaggacaacccccatgaaggggaggaccaggtctctgaccaggtcaagttcaacgtgtttcaaggcatcatggattccctgttccagtccttcaatgcctccatctcagtggccagcttccaggagctgtcagcgtgtgtcttcagctggatcgaggagcactgtaagcctcagaccctgcgggagattgtgattggcgtcctgcaccaattgaaaaaccagctttactgaccggttcttggaaacctggagaacagccaacaagaggcccttgaatctctacgtggccactgaactgctgggcccgggagactggactacaacacctcacactggtcagctggtttctacttggtgtttggtttttcccagccccattttatcttcagcggagccgcggtgtttgttttgtgaaagcttctgattaatttattatattgacgataaaactcaaacctacccagccttccccccactccatggaagtccttgggatgggcgtctgctctggacaccccaaagagctcctgccctctcagccctttattcaagcctcagatttctgctcatgatctacatagatttggaaactgttttcctctgttttggtctcttgggcaacatttttggcccaagtttgggcaacatttggcccaagtttgggcattttggcagtagctgtatgggagaaaaagagtaagaggaaatattcccacagccatgaagggtgaaagggcaccttgtgcctagactagggctgcctggtcagtcccaggtgaggccaagggctttctggccatctcagggaggggccaccaggttcctcccctcaccccatattccatcaccttcctcctctgctctgggtggtaagggaagccctcccggttcccacaggctatgatgctgcatggcagaggcaggtataacacagcactacatattggaaattttttatttttctaaataccaatgcagttttgctacggttacaattttgaaatattaactgagcctcaaaatcaccctttctgtcaagcatatcttggcctctcccatgtctcagtgttgcctgcatttctcccaggacttgggggtggggtgaaaagcgtacaaaagatacttaaaagggctcctggggtacacaagcccagcaggtcctgagtgaagccgtgggccctccaaatgctcgttttatagcaacctctctctaccctagttctccaaattcacttctgccttcctcaggtttgatatctggcaggtttgactatccagaggaaattaaatatttttatataaaattaaattataataaatattgccaaatgctttcctttagcattgttccaagtctaaatgttaacctcaagctactgcaatttagacaatgaaatgggctgggtctacccccagccaccagccctcatcctctctacccagtgctctggtttatgcttgtctcctgactgctctgcttaaaggtgaaagtagcaggaacaacaacaaaagccaaccaaaaacaaggtagccagtgcaagacatctcactcttctgacatcctgcagtccccaccagtcctgaccgtgggcccctcaggggtctgggagtgtgacgttgtaatcttcatccgtctctatcccaacttcctcctgtgagacagggagacaagtgaatgagatgtcaccaggataagaccacagggaagcaaagaaggaagagagctccacttacaaagaactgcttcttgctcttggggtatccttcaagtattgcatcagacagctctgtagcctgacaagaaataaaaccacccgttttcagatgggc

SEQ ID NO: 26233 - protein, 244 aa, Homo sapiens; identical to SEQ ID NO: 3493

SEQ ID NO: 26234 - DNA, 2561 bp, Homo sapiens
cgccacccgcttcctcgccgcagggggcccgcccgctggcccgtttccggtccggtgggtacaagatgacggagccgggcgcctctcccgaggacccttgggtcaaggcaagccccgtgggcgcgcacgccggcgaggggagggcgggtcgggctcgtgcacgtaggggggccggaagacgaggggcttccctcctgtccccaaagtcccccacgctctccgtgccccggggctgcagagaagacagctctcaccccgcgtgtgccaaggtggagtatgcctacagcgacaacagcctggaccccgggctttttgtagaaagcacccgcaaggggagtgtagtgtccagagctaatagcatcggttccaccagtgcctcttctgtccccaacacagatgatgaggacagtgattaccaccaggaggcctacaaggagtcctacaaagaccggcggcggcgcgcacacactcaggctgagcagaagaggagggacgccatcaagagaggctatgatgaccttcagaccatcgtccccacttgccagcagcaggacttctccattggctcccaaaagctcagcaaagccatcgttctacaaaagaccattgactacattcagtttttgcacaaggagaagaaaaagcaggaggaggaggtgtccacgttacgcaaggatgtcaccgccctaaagatcatgaaagtgaactatgagcagattgtgaaggcacaccaggacaacccccatgaaggggaggaccaggtctctgaccaggtcaagttcaacgtgtttcaaggcatcatggattccctgttccagtccttcaatgcctccatctcagtggccagcttccaggagctgtcagcgtgtgtcttcagctggatcgaggagcactgtaagcctcagaccctgcgggagattgtgattggcgtcctgcaccaattgaaaaaccagctttactgaccggttcttggaaacctggagaacagccaacaagaggcccttgaatctctacgtggccactgaactgctgggcccgggagactggactacaacacctcacactggtcagctggtttctacttggtgtttggtttttcccagccccattttatcttcagcggagccgcggtgtttgttttgtgaaagcttctgattaatttattatattgacgataaaactcaaacctacccagccttccccccactccatggaagtccttgggatgggcgtctgctctggacaccccaaagagctcctgccctctcagccctttattcaagcctcagatttctgctcatgatctacatagatttggaaactgttttcctctgttttggtctcttgggcaacatttttggcccaagtttgggcaacatttggcccaagtttgggcattttggcagtagctgtatgggagaaaaagagtaagaggaaatattcccacagccatgaagggtgaaagggcaccttgtgcctagactagggctgcctggtcagtcccaggtgaggccaagggctttctggccatctcagggaggggccaccaggttcctcccctcaccccatattccatcaccttcctcctctgctctgggtggtaagggaagccctcccggttcccacaggctatgatgctgcatggcagaggcaggtataacacagcactacatattggaaattttttatttttctaaataccaatgcagttttgctacggttacaattttgaaatattaactgagcctcaaaatcaccctttctgtcaagcatatcttggcctctcccatgtctcagtgttgcctgcatttctcccaggacttgggggtggggtgaaaagcgtacaaaagatacttaaaagggctcctggggtacacaagcccagcaggtcctgagtgaagccgtgggccctccaaatgctcgttttatagcaacctctctctaccctagttctccaaattcacttctgccttcctcaggtttgatatctggcaggtttgactatccagaggaaattaaatatttttatataaaattaaattataataaatattgccaaatgctttcctttagcattgttccaagtctaaatgttaacctcaagctactgcaatttagacaatgaaatgggctgggtctacccccagccaccagccctcatcctctctacccagtgctctggtttatgcttgtctcctgactgctctgcttaaaggtgaaagtagcaggaacaacaacaaaagccaaccaaaaacaaggtagccagtgcaagacatctcactcttctgacatcctgcagtccccaccagtcctgaccgtgggcccctcaggggtctgggagtgtgacgttgtaatcttcatccgtctctatcccaacttcctcctgtgagacagggagacaagtgaatgagatgtcaccaggataagaccacagggaagcaaagaaggaagagagctccacttacaaagaactgcttcttgctcttggggtatccttcaagtattgcatcagacagctctgtagcctgacaagaaataaaaccacccgttttcagatgggc

SEQ ID NO: 26235 - protein, 298 aa, Homo sapiens; identical to SEQ ID NO: 3491

SEQ ID NO: 26236 - DNA, 3133 bp, Homo sapiens
cgccacccgcttcctcgccgcagggggcccgcccgctggcccgtttccggtccggtgggtacaagatgacggagccgggcgcctctcccgaggacccttgggtcaaggtggagtatgcctacagcgacaacagcctggaccccgggctttttgtagaaagcacccgcaaggggagtgtagtgtccagagctaatagcatcggttccaccagtgcctcttctgtccccaacacagatgatgaggacagtgattaccaccaggaggcctacaaggagtcctacaaagaccggcggcggcgcgcacacactcaggctgagcagaagaggagggacgccatcaagagaggctatgatgaccttcagaccatcgtccccacttgccagcagcaggacttctccattggctcccaaaagctcagcaaagccatcgttctacaaaagaccattgactacattcagtttttgcacaaggagaagaaaaagcaggaggaggaggtgtccacgttacgcaaggatgtcaccgccctaaagatcatgaaagtgaactatgagcagattgtgaaggcacaccaggacaacccccatgaaggggaggaccaggtctctgaccaggtcaagttcaacgtgtttcaaggcatcatggattccctgttccagtccttcaatgcctccatctcagtggccagcttccaggagctgtcagcgtgtgtcttcagctggatcgaggagcactgtaagcctcagaccctgcgggagattgtgattggcgtcctgcaccaattgaaaaaccagctttactgaccggttcttggaaacctggagaacagccaacaagaggcccttgaatctctacgtggccactgaactgctgggcccgggagactggactacaacacctcacactggtcagctggtttctacttggtgtttggtttttcccagccccattttatcttcagcggagccgcggtgtttgttttgtgaaagcttctgattaatttattatattgacgataaaactcaaacctacccagccttccccccactccatggaagtccttgggatgggcgtctgctctggacaccccaaagagctcctgccctctcagccctttattcaagcctcagatttctgctcatgatctacatagatttggaaactgttttcctctgttttggtctcttgggcaacatttttggcccaagtttgggcaacatttggcccaagtttgggcattttggcagtagctgtatgggagaaaaagagtaagaggaaatattcccacagccatgaagggtgaaagggcaccttgtgcctagactagggctgcctggtcagtcccaggtgaggccaagggctttctggccatctcagggaggggccaccaggttcctcccctcaccccatattccatcaccttcctcctctgctctgggtggtaagggaagccctcccggttcccacaggctatgatgctgcatggcagaggcaggtataacacagcactacatattggaaattttttatttttctaaataccaatgcagttttgctacggttacaattttgaaatattaactgagcctcaaaatcaccctttctgtcaagcatatcttggcctctcccatgtctcagtgttgcctgcatttctcccaggacttgggggtggggtgaaaagcgtacaaaagatacttaaaagggctcctggggtacacaagcccagcaggtcctgagtgaagccgtgggccctccaaatgctcgttttatagcaacctctctctaccctagttctccaaattcacttctgccttcctcaggtttgatatctggcaggtttgactatccagaggaaattaaatatttttatataaaattaaattataataaatattgccaaatgctttcctttagcattgttccaagtctaaatgttaacctcaagctactgcaatttagacaatgaaatgggctgggtctacccccagccaccagccctcatcctctctacccagtgctctggtttatgcttgtctcctgactgctctgcttaaaggtgaaagtagcaggaacaacaacaaaagccaaccaaaaacaaggtagccagtgcaagacatctcactcttctgacatcctgcagtccccaccagtcctgaccgtgggcccctcaggggtctgggagtgtgacgttgtaatcttcatccgtctctatcccaacttcctcctgtgagacagggagacaagtgaatgagatgtcaccaggataagaccacagggaagcaaagaaggaagagagctccacttacaaagaactgcttcttgctcttggggtatccttcaagtattgcatcagacagctctgtagcctgacaagaaataaaaccacccgttttcagatgggcagcactgggcactgcctgtcagtttatgatattgtgtagcggctgatctggtgcctgccattttcaaaggcacctccagggcctgtctcggagctcccacacacttaccatcctcttcctcttcctccactccttacagtacttctgcctctctctgtacacctagaaggaaaaagcaagttcctctaactcctcagaaccacagcagccctctggggctcagccctgatgttcactctggacctgcacagcggtcctacagccttccagctcacctgctctttctcttctggagtcacatgattggtagctgctttaatgttcttcaatctctctctgtagccagcgcattccttctttaactcctggatttctttctgcatctctggtgtggtcagggcactagataattccttgagctctgaaaccacatccgcctggggtcacttgctacccctgaggaaggagttctgtctttcccagtgggtgctccctgaggtgttccaccttgctctggatctatcatctcacatggaaactaagccatacaggattatttattcttctaattttctttcctcctccatctacaagtggcgtgggtgtgaggttgaacacttacttaggcgtagccagttaaagaagcaggaataaagggaaacgtggggacagtgtactgataatcgtggcagggagaacaaatgcgtatcttgtccatttgttggtacacaaaa

SEQ ID NO: 26237 - protein, 244 aa, Homo sapiens; identical to SEQ ID NO: 3493

SEQ ID NO: 26238 - DNA, 582 bp, Homo sapiens
cctcgccgcagggggcccgcccgctggcccgtttccggtccggtgggtacaagatgacggagccgggcgcctctcccgaggacccttgggtcaaggtggagtatgcctacagcgacaacagcctggaccccgggctttttgtagaaagcacccgcaaggggagtgtagtgtccagagctaatagcatcggttccaccagtgcctcttctgtccccaacacagatgatgaggacagtgattaccaccaggaggcctacaaggagtcctacaaagaccggcggcggcgcgcacacactcaggctgagcagaagaggagggacgccatcaagagaggctatgatgaccttcagaccatcgtccccacttgccagcagcaggacttctccattggctcccaaaagctcagcaaagccatcgttctacaaaagagtatggctagggaaagcactggaggggatggagccaagcggggctgtgaagaggccagtgcctcctacccacccatggctcggccttggtgtggtgattgccatgggatagttggggtctggggtaaggggaacaaagtcagccttatcttct

SEQ ID NO: 26239 - protein, 175 aa, Homo sapiens
MTEPGASPEDPWVKVEYAYSDNSLDPGLFVESTRKGSVVSRANSIGSTSASSVPNTDDEDSDYHQEAYKESYKDRRRRAHTQAEQKRRDAIKRGYDDLQTIVPTCQQQDFSIGSQKLSKAIVLQKSMARESTGGDGAKRGCEEASASYPPMARPWCGDCHGIVGVWGKGNKVSLI

SEQ ID NO: 26240 - DNA, 1024 bp, Homo sapiens
cctcgccgcagggggcccgcccgctggcccgtttccggtccggtgggtacaagatgacggagccgggcgcctctcccgaggacccttgggtcaaggtggagtatgcctacagcgacaacagcctggaccccgggctttttgtagaaagcacccgcaaggggagtgtagtgtccagagctaatagcatcggttccaccagtgcctcttctgtccccaacacagatgatgaggacagtgattaccaccaggaggcctacaaggagtcctacaaagaccggcggcggcgcgcacacactcaggctgagcagaagaggagggacgccatcaagagaggctatgatgaccttcagaccatcgtccccacttgccagcagcaggaagctcctgccctctcagccctttattcaagcctcagatttctgctcatgatctacatagatttggaaactgttttcctctgttttggtctcttgggcaacatttttggcccaagtttgggcaacatttggcccaagtttgggcattttggcagtagctgtatgggagaaaaagagtaagggaagccctcccggttcccacaggctatgatgctgcatggcagaggcaggtataacacagcactacatattggaaattttttatttttctaaataccaatgcagttttgctacggttacaattttgaaatattaactgagcctcaaaatcaccctttctgtcaagcatatcttggcctctcccatgtctcagtgttgcctgcatttctcccaggacttgggggtggggtgaaaagcgtacaaaagatacttaaaagggctcctggggtacacaagcccagcaggtcctgagtgaagccgtgggccctccaaatgctcgttttatagcaacctctctctaccctagttctccaaattcacttctgccttcctcaggtttgatatctggcaggtttgactatccagaggaaattaaatatttttatataaaattaaattataataaatattgccaaatgctttccttt

SEQ ID NO: 26241 - protein, 167 aa, Homo sapiens
MTEPGASPEDPWVKVEYAYSDNSLDPGLFVESTRKGSVVSRANSIGSTSASSVPNTDDEDSDYHQEAYKESYKDRRRRAHTQAEQKRRDAIKRGYDDLQTIVPTCQQQEAPALSALYSSLRFLLMIYIDLETVFLCFGLLGNIFGPSLGNIWPKFGHFGSSCMGEKE

SEQ ID NO: 26242 - DNA, 1514 bp, Homo sapiens
cctcgccgcagggggcccgcccgctggcccgtttccggtccggtgggtacaagatgacggagccgggcgcctctcccgaggacccttgggtcaaggtggagtatgcctacagcgacaacagcctggaccccgggctttttgtagaaagcacccgcaaggggagtgtagtgtccagagctaatagcatcggttccaccagtgcctcttctgtccccaacacagatgatgaggacagtgattaccaccaggaggcctacaaggagtcctacaaagaccggcggcggcgcgcacacactcaggctgagcagaagaggagggacgccatcaagagaggctatgatgaccttcagaccatcgtccccacttgccagcagcaggaagctcctgccctctcagccctttattcaagcctcagatttctgctcatgatctacatagatttggaaactgttttcctctgttttggtctcttgggcaacatttttggcccaagtttgggcaacatttggcccaagtttgggcattttggcagtagctgtatgggagaaaaagagtaagggaagccctcccggttcccacaggctatgatgctgcatggcagaggcaggtataacacagcactacatattggaaattttttatttttctaaataccaatgcagttttgctacggttacaattttgaaatattaactgagcctcaaaatcaccctttctgtcaagcatatcttggcctctcccatgtctcagtgttgcctgcatttctcccaggacttgggggtggggtgaaaagcgtacaaaagatacttaaaagggctcctggggtacacaagcccagcaggtcctgagtgaagccgtgggccctccaaatgctcgttttatagcaacctctctctaccctagttctccaaattcacttctgccttcctcaggtttgatatctggcaggtttgactatccagaggaaattaaatatttttatataaaattaaattataataaatattgccaaatgctttcctttagcattgttccaagtctaaatgttaacctcaagctactgcaatttagacaatgaaatgggctgggtctacccccagccaccagccctcatcctctctacccagtgctctggtttatgcttgtctcctgactgctctgcttaaaggtgaaagtagcaggaacaacaacaaaagccaaccaaaaacaaggtagccagtgcaagacatctcactcttctgacatcctgcagtccccaccagtcctgaccgtgggcccctcaggggtctgggagtgtgacgttgtaatcttcatccgtctctatcccaacttcctcctgtgagacagggagacaagtgaatgagatgtcaccaggataagaccacagggaagcaaagaaggaagagagctccacttacaaagaactgcttcttgctcttggggtatccttcaagtattgcatcagacagctctgtagcctgacaagaaataaaaccacccgttttcagatgggc

SEQ ID NO: 26243 - protein, 167 aa, Homo sapiens; identical to SEQ ID NO: 26241

SEQ ID NO: 26244 - DNA, 3031 bp, Homo sapiens
cctcgccgcagggggcccgcccgctggcccgtttccggtccggtgggtacaagatgacggagccgggcgcctctcccgaggacccttgggtcaaggtggagtatgcctacagcgacaacagcctggaccccgatgatgaggacagtgattaccaccaggaggcctacaaggagtcctacaaagaccggcggcggcgcgcacacactcaggctgagcagaagaggagggacgccatcaagagaggctatgatgaccttcagaccatcgtccccacttgccagcagcaggacttctccattggctcccaaaagctcagcaaagccatcgttctacaaaagaccattgactacattcagtttttgcacaaggagaagaaaaagcaggaggaggaggtgtccacgttacgcaaggatgtcaccgccctaaagatcatgaaagtgaactatgagcagattgtgaaggcacaccaggacaacccccatgaaggggaggaccaggtctctgaccaggtcaagttcaacgtgtttcaaggcatcatggattccctgttccagtccttcaatgcctccatctcagtggccagcttccaggagctgtcagcgtgtgtcttcagctggatcgaggagcactgtaagcctcagaccctgcgggagattgtgattggcgtcctgcaccaattgaaaaaccagctttactgaccggttcttggaaacctggagaacagccaacaagaggcccttgaatctctacgtggccactgaactgctgggcccgggagactggactacaacacctcacactggtcagctggtttctacttggtgtttggtttttcccagccccattttatcttcagcggagccgcggtgtttgttttgtgaaagcttctgattaatttattatattgacgataaaactcaaacctacccagccttccccccactccatggaagtccttgggatgggcgtctgctctggacaccccaaagagctcctgccctctcagccctttattcaagcctcagatttctgctcatgatctacatagatttggaaactgttttcctctgttttggtctcttgggcaacatttttggcccaagtttgggcaacatttggcccaagtttgggcattttggcagtagctgtatgggagaaaaagagtaagaggaaatattcccacagccatgaagggtgaaagggcaccttgtgcctagactagggctgcctggtcagtcccaggtgaggccaagggctttctggccatctcagggaggggccaccaggttcctcccctcaccccatattccatcaccttcctcctctgctctgggtggtaagggaagccctcccggttcccacaggctatgatgctgcatggcagaggcaggtataacacagcactacatattggaaattttttatttttctaaataccaatgcagttttgctacggttacaattttgaaatattaactgagcctcaaaatcaccctttctgtcaagcatatcttggcctctcccatgtctcagtgttgcctgcatttctcccaggacttgggggtggggtgaaaagcgtacaaaagatacttaaaagggctcctggggtacacaagcccagcaggtcctgagtgaagccgtgggccctccaaatgctcgttttatagcaacctctctctaccctagttctccaaattcacttctgccttcctcaggtttgatatctggcaggtttgactatccagaggaaattaaatatttttatataaaattaaattataataaatattgccaaatgctttcctttagcattgttccaagtctaaatgttaacctcaagctactgcaatttagacaatgaaatgggctgggtctacccccagccaccagccctcatcctctctacccagtgctctggtttatgcttgtctcctgactgctctgcttaaaggtgaaagtagcaggaacaacaacaaaagccaaccaaaaacaaggtagccagtgcaagacatctcactcttctgacatcctgcagtccccaccagtcctgaccgtgggcccctcaggggtctgggagtgtgacgttgtaatcttcatccgtctctatcccaacttcctcctgtgagacagggagacaagtgaatgagatgtcaccaggataagaccacagggaagcaaagaaggaagagagctccacttacaaagaactgcttcttgctcttggggtatccttcaagtattgcatcagacagctctgtagcctgacaagaaataaaaccacccgttttcagatgggcagcactgggcactgcctgtcagtttatgatattgtgtagcggctgatctggtgcctgccattttcaaaggcacctccagggcctgtctcggagctcccacacacttaccatcctcttcctcttcctccactccttacagtacttctgcctctctctgtacacctagaaggaaaaagcaagttcctctaactcctcagaaccacagcagccctctggggctcagccctgatgttcactctggacctgcacagcggtcctacagccttccagctcacctgctctttctcttctggagtcacatgattggtagctgctttaatgttcttcaatctctctctgtagccagcgcattccttctttaactcctggatttctttctgcatctctggtgtggtcagggcactagataattccttgagctctgaaaccacatccgcctggggtcacttgctacccctgaggaaggagttctgtctttcccagtgggtgctccctgaggtgttccaccttgctctggatctatcatctcacatggaaactaagccatacaggattatttattcttctaattttctttcctcctccatctacaagtggcgtgggtgtgaggttgaacacttacttaggcgtagccagttaaagaagcaggaataaagggaaacgtggggacagtgtactgataatcgtggcagggagaacaaatgcgtatcttgtccatttgttggtacacaaaa

SEQ ID NO: 26245 - protein, 214 aa, Homo sapiens; identical to SEQ ID NO: 3495

SEQ ID NO: 26246 - DNA, 2248 bp, Homo sapiens
cctcgccgcagggggcccgcccgctggcccgtttccggtccggtgggtacaagatgacggagccgggcgcctctcccgaggacccttgggtcaaggtggagtatgcctacagcgacaacagcctggaccccgggctttttgtagaaagcacccgcaaggggagtgtagtgtccagagctaatagcatcggttccaccagtgcctcttctgtccccaacacagatgatgaggacagtgattaccaccaggaggcctacaaggagtcctacaaagaccggcggcggcgcgcacacactcaggctgagcagaagaggagggacgccatcaagagaggctatgatgaccttcagaccatcgtccccacttgccagcagcaggaagctcctgccctctcagccctttattcaagcctcagatttctgctcatgatctacatagatttggaaactgttttcctctgttttggtctcttgggcaacatttttggcccaagtttgggcaacatttggcccaagtttgggcattttggcagtagctgtatgggagaaaaagagtaagggaagccctcccggttcccacaggctatgatgctgcatggcagaggcaggtataacacagcactacatattggaaattttttatttttctaaataccaatgcagttttgctacggttacaattttgaaatattaactgagcctcaaaatcaccctttctgtcaagcatatcttggcctctcccatgtctcagtgttgcctgcatttctcccaggacttgggggtggggtgaaaagcgtacaaaagatacttaaaagggctcctggggtacacaagcccagcaggtcctgagtgaagccgtgggccctccaaatgctcgttttatagcaacctctctctaccctagttctccaaattcacttctgccttcctcaggtttgatatctggcaggtttgactatccagaggaaattaaatatttttatataaaattaaattataataaatattgccaaatgctttcctttagcattgttccaagtctaaatgttaacctcaagctactgcaatttagacaatgaaatgggctgggtctacccccagccaccagccctcatcctctctacccagtgctctggtttatgcttgtctcctgactgctctgcttaaaggtgaaagtagcaggaacaacaacaaaagccaaccaaaaacaaggtagccagtgcaagacatctcactcttctgacatcctgcagtccccaccagtcctgaccgtgggcccctcaggggtctgggagtgtgacgttgtaatcttcatccgtctctatcccaacttcctcctgtgagacagggagacaagtgaatgagatgtcaccaggataagaccacagggaagcaaagaaggaagagagctccacttacaaagaactgcttcttgctcttggggtatccttcaagtattgcatcagacagctctgtagcctgacaagaaataaaaccacccgttttcagatgggcagcactgggcactgcctgtcagtttatgatattgtgtagcggctgatctggtgcctgccattttcaaaggcacctccagggcctgtctcggagctcccacacacttaccatcctcttcctcttcctccactccttacagtacttctgcctctctctgtacacctagaaggaaaaagcaagttcctctaactcctcagaaccacagcagccctctggggctcagccctgatgttcactctggacctgcacagcggtcctacagccttccagctcacctgctctttctcttctggagtcacatgattggtagctgctttaatgttcttcaatctctctctgtagccagcgcattccttctttaactcctggatttctttctgcatctctggtgtggtcagggcactagataattccttgagctctgaaaccacatccgcctggggtcacttgctacccctgaggaaggagttctgtctttcccagtgggtgctccctgaggtgttccaccttgctctggatctatcatctcacatggaaactaagccatacaggattatttattcttctaattttctttcctcctccatctacaagtggcgtgggtgtgaggttgaacacttacttaggcgtagccagttaaagaagcaggaataaagggaaacgtggggacagtgtactgataatcgtggcagggagaacaaatgcgtatcttgtccatttgttggtacacaaaa

SEQ ID NO: 26247 - protein, 167 aa, Homo sapiens; identical to SEQ ID NO: 26241

SEQ ID NO: 26248 - DNA, 3283 bp, Homo sapiens
cctcgccgcagggggcccgcccgctggcccgtttccggtccggtgggtacaagatgacggagccgggcgcctctcccgaggacccttgggtcaaggcaagccccgtgggcgcgcacgccggcgaggggagggcgggtcgggctcgtgcacgtaggggggccggaagacgaggggcttccctcctgtccccaaagtcccccacgctctccgtgccccggggctgcagagaagacagctctcaccccgcgtgtgccaaggtggagtatgcctacagcgacaacagcctggaccccgggctttttgtagaaagcacccgcaaggggagtgtagtgtccagagctaatagcatcggttccaccagtgcctcttctgtccccaacacagatgatgaggacagtgattaccaccaggaggcctacaaggagtcctacaaagaccggcggcggcgcgcacacactcaggctgagcagaagaggagggacgccatcaagagaggctatgatgaccttcagaccatcgtccccacttgccagcagcaggacttctccattggctcccaaaagctcagcaaagccatcgttctacaaaagaccattgactacattcagtttttgcacaaggagaagaaaaagcaggaggaggaggtgtccacgttacgcaaggatgtcaccgccctaaagatcatgaaagtgaactatgagcagattgtgaaggcacaccaggacaacccccatgaaggggaggaccaggtctctgaccaggtcaagttcaacgtgtttcaaggcatcatggattccctgttccagtccttcaatgcctccatctcagtggccagcttccaggagctgtcagcgtgtgtcttcagctggatcgaggagcactgtaagcctcagaccctgcgggagattgtgattggcgtcctgcaccaattgaaaaaccagctttactgaccggttcttggaaacctggagaacagccaacaagaggcccttgaatctctacgtggccactgaactgctgggcccgggagactggactacaacacctcacactggtcagctggtttctacttggtgtttggtttttcccagccccattttatcttcagcggagccgcggtgtttgttttgtgaaagcttctgattaatttattatattgacgataaaactcaaacctacccagccttccccccactccatggaagtccttgggatgggcgtctgctctggacaccccaaagagctcctgccctctcagccctttattcaagcctcagatttctgctcatgatctacatagatttggaaactgttttcctctgttttggtctcttgggcaacatttttggcccaagtttgggcaacatttggcccaagtttgggcattttggcagtagctgtatgggagaaaaagagtaagaggaaatattcccacagccatgaagggtgaaagggcaccttgtgcctagactagggctgcctggtcagtcccaggtgaggccaagggctttctggccatctcagggaggggccaccaggttcctcccctcaccccatattccatcaccttcctcctctgctctgggtggtaagggaagccctcccggttcccacaggctatgatgctgcatggcagaggcaggtataacacagcactacatattggaaattttttatttttctaaataccaatgcagttttgctacggttacaattttgaaatattaactgagcctcaaaatcaccctttctgtcaagcatatcttggcctctcccatgtctcagtgttgcctgcatttctcccaggacttgggggtggggtgaaaagcgtacaaaagatacttaaaagggctcctggggtacacaagcccagcaggtcctgagtgaagccgtgggccctccaaatgctcgttttatagcaacctctctctaccctagttctccaaattcacttctgccttcctcaggtttgatatctggcaggtttgactatccagaggaaattaaatatttttatataaaattaaattataataaatattgccaaatgctttcctttagcattgttccaagtctaaatgttaacctcaagctactgcaatttagacaatgaaatgggctgggtctacccccagccaccagccctcatcctctctacccagtgctctggtttatgcttgtctcctgactgctctgcttaaaggtgaaagtagcaggaacaacaacaaaagccaaccaaaaacaaggtagccagtgcaagacatctcactcttctgacatcctgcagtccccaccagtcctgaccgtgggcccctcaggggtctgggagtgtgacgttgtaatcttcatccgtctctatcccaacttcctcctgtgagacagggagacaagtgaatgagatgtcaccaggataagaccacagggaagcaaagaaggaagagagctccacttacaaagaactgcttcttgctcttggggtatccttcaagtattgcatcagacagctctgtagcctgacaagaaataaaaccacccgttttcagatgggcagcactgggcactgcctgtcagtttatgatattgtgtagcggctgatctggtgcctgccattttcaaaggcacctccagggcctgtctcggagctcccacacacttaccatcctcttcctcttcctccactccttacagtacttctgcctctctctgtacacctagaaggaaaaagcaagttcctctaactcctcagaaccacagcagccctctggggctcagccctgatgttcactctggacctgcacagcggtcctacagccttccagctcacctgctctttctcttctggagtcacatgattggtagctgctttaatgttcttcaatctctctctgtagccagcgcattccttctttaactcctggatttctttctgcatctctggtgtggtcagggcactagataattccttgagctctgaaaccacatccgcctggggtcacttgctacccctgaggaaggagttctgtctttcccagtgggtgctccctgaggtgttccaccttgctctggatctatcatctcacatggaaactaagccatacaggattatttattcttctaattttctttcctcctccatctacaagtggcgtgggtgtgaggttgaacacttacttaggcgtagccagttaaagaagcaggaataaagggaaacgtggggacagtgtactgataatcgtggcagggagaacaaatgcgtatcttgtccatttgttggtacacaaaa

SEQ ID NO: 26249 - protein, 298 aa, Homo sapiens; identical to SEQ ID NO: 3491

SEQ ID NO: 26250 - DNA, 1089 bp, Homo sapiens
tcgccgcagggggcccgcccgctggcccgtttccggtccggtgggtacaagatgacggagccgggcgcctctcccgaggacccttgggtcaaggcaagccccgtgggcgcgcacgccggcgaggggagggcgggtcgggctcgtgcacgtaggggggccggaagacgaggggcttccctcctgtccccaaagtcccccacgctctccgtgccccggggctgcagagaagacagctctcaccccgcgtgtgccaaggtggagtatgcctacagcgacaacagcctggaccccgatgatgaggacagtgattaccaccaggaggcctacaaggagtcctacaaagaccggcggcggcgcgcacacactcaggctgagcagaagaggagggacgccatcaagagaggctatgatgaccttcagaccatcgtccccacttgccagcagcaggacttctccattggctcccaaaagctcagcaaagccatcgttctacaaaagaccattgactacattcagtttttgcacaaggagaagaaaaagcaggaggaggaggtgtccacgttacgcaaggatgtcaccgccctaaagatcatgaaagtgaactatgagcagattgtgaaggcacaccaggacaacccccatgaaggggaggaccaggtctctgaccaggtcaagttcaacgtgtttcaaggcatcatggattccctgttccagtccttcaatgcctccatctcagtggccagcttccaggagctgtcagcgtgtgtcttcagctggatcgaggagcactgtaagcctcagaccctgcgggagattgtgattggcgtcctgcaccaattgaaaaaccagctttactgaccggttcttggaaacctggagaacagccaacaagaggcccttgaatctctacgtggccactgaactgctgggcccgggagactggactacaacacctcacactggtcagctggtttctacttggtgtttggtttttcccagccccattttatcttcagcggagccgcggtgtttgttttgtgaaagcttctgattaatttattatattgacgataaaactcaaacctaccc

SEQ ID NO: 26251 - protein, 268 aa, Homo sapiens
MTEPGASPEDPWVKASPVGAHAGEGRAGRARARRGAGRRGASLLSPKSPTLSVPRGCREDSSHPACAKVEYAYSDNSLDPDDEDSDYHQEAYKESYKDRRRRAHTQAEQKRRDAIKRGYDDLQTIVPTCQQQDFSIGSQKLSKAIVLQKTIDYIQFLHKEKKKQEEEVSTLRKDVTALKIMKVNYEQIVKAHQDNPHEGEDQVSDQVKFNVFQGIMDSLFQSFNASISVASFQELSACVFSWIEEHCKPQTLREIVIGVLHQLKNQLY

SEQ ID NO: 26252 - DNA, 1222 bp, Homo sapiens
tcgccgcagggggcccgcccgctggcccgtttccggtccggtgggtacaagatgacggagccgggcgcctctcccgaggacccttgggtcaaggcaagccccgtgggcgcgcacgccggcgaggggagggcgggtcgggctcgtgcacgtaggggggccggaagacgaggggcttccctcctgtccccaaagtcccccacgctctccgtgccccggggctgcagagaagacagctctcaccccgcgtgtgccaaggtggagtatgcctacagcgacaacagcctggaccccgatgatgaggacagtgattaccaccaggaggcctacaaggagtcctacaaagaccggcggcggcgcgcacacactcaggctgagcagaagaggagggacgccatcaagagaggctatgatgaccttcagaccatcgtccccacttgccagcagcaggacttctccattggctcccaaaagctcagcaaagccatcgttctacaaaagaccattgactacattcagtttttgcacaaggagaagaaaaagcaggaggaggaggtgtccacgttacgcaaggatgtcaccgccctaaagatcatgaaagtgaactatgagcagattgtgaaggcacaccaggacaacccccatgaaggggaggaccaggtctctgaccaggtcaagttcaacgtgtttcaaggcatcatggattccctgttccagtccttcaatgcctccatctcagtggccagcttccaggagctgtcagcgtgtgtcttcagctggatcgaggagcactgtaagcctcagaccctgcgggagattgtgattggcgtcctgcaccaattgaaaaaccagctttactgaccggttcttggaaacctggagaacagccaacaagaggcccttgaatctctacgtggccactgaactgctgggcccgggagactggactacaacacctcacactggtcagctggtttctacttggtgtttggtttttcccagccccattttatcttcagcggagccgcggtgtttgttttgtgaaagcttctgattaatttattatattgacgataaaactcaaacctacccagccttccccccactccatggaagtccttgggatgggcgtctgctctggacaccccaaagagctcctgccctctcagccctttattcaagcctcagatttctgctcatgatctacatagatttggaaactgtt

SEQ ID NO: 26253 - protein, 268 aa, Homo sapiens; identical to SEQ ID NO: 26251

SEQ ID NO: 26254 - DNA, 1967 bp, Homo sapiens
tcgccgcagggggcccgcccgctggcccgtttccggtccggtgggtacaagatgacggagccgggcgcctctcccgaggacccttgggtcaaggcaagccccgtgggcgcgcacgccggcgaggggagggcgggtcgggctcgtgcacgtaggggggccggaagacgaggggcttccctcctgtccccaaagtcccccacgctctccgtgccccggggctgcagagaagacagctctcaccccgcgtgtgccaaggtggagtatgcctacagcgacaacagcctggaccccgatgatgaggacagtgattaccaccaggaggcctacaaggagtcctacaaagaccggcggcggcgcgcacacactcaggctgagcagaagaggagggacgccatcaagagaggctatgatgaccttcagaccatcgtccccacttgccagcagcaggacttctccattggctcccaaaagctcagcaaagccatcgttctacaaaagaccattgactacattcagtttttgcacaaggagaagaaaaagcaggaggaggaggtgtccacgttacgcaaggatgtcaccgccctaaagatcatgaaagtgaactatgagcagattgtgaaggcacaccaggacaacccccatgaaggggaggaccaggtctctgaccaggtcaagttcaacgtgtttcaaggcatcatggattccctgttccagtccttcaatgcctccatctcagtggccagcttccaggagctgtcagcgtgtgtcttcagctggatcgaggagcactgtaagcctcagaccctgcgggagattgtgattggcgtcctgcaccaattgaaaaaccagctttactgaccggttcttggaaacctggagaacagccaacaagaggcccttgaatctctacgtggccactgaactgctgggcccgggagactggactacaacacctcacactggtcagctggtttctacttggtgtttggtttttcccagccccattttatcttcagcggagccgcggtgtttgttttgtgaaagcttctgattaatttattatattgacgataaaactcaaacctacccagccttccccccactccatggaagtccttgggatgggcgtctgctctggacaccccaaagagctcctgccctctcagccctttattcaagcctcagatttctgctcatgatctacatagatttggaaactgttttcctctgttttggtctcttgggcaacatttttggcccaagtttgggcaacatttggcccaagtttgggcattttggcagtagctgtatgggagaaaaagagtaagaggaaatattcccacagccatgaagggtgaaagggcaccttgtgcctagactagggctgcctggtcagtcccaggtgaggccaagggctttctggccatctcagggaggggccaccaggttcctcccctcaccccatattccatcaccttcctcctctgctctgggtggtaagggaagccctcccggttcccacaggctatgatgctgcatggcagaggcaggtataacacagcactacatattggaaattttttatttttctaaataccaatgcagttttgctacggttacaattttgaaatattaactgagcctcaaaatcaccctttctgtcaagcatatcttggcctctcccatgtctcagtgttgcctgcatttctcccaggacttgggggtggggtgaaaagcgtacaaaagatacttaaaagggctcctggggtacacaagcccagcaggtcctgagtgaagccgtgggccctccaaatgctcgttttatagcaacctctctctaccctagttctccaaattcacttctgccttcctcaggtttgatatctggcaggtttgactatccagaggaaattaaatatttttatataaaattaaattataataaatattgccaaatgctttccttt

SEQ ID NO: 26255 - protein, 268 aa, Homo sapiens; identical to SEQ ID NO: 26251

SEQ ID NO: 26256 - DNA, 2457 bp, Homo sapiens
tcgccgcagggggcccgcccgctggcccgtttccggtccggtgggtacaagatgacggagccgggcgcctctcccgaggacccttgggtcaaggcaagccccgtgggcgcgcacgccggcgaggggagggcgggtcgggctcgtgcacgtaggggggccggaagacgaggggcttccctcctgtccccaaagtcccccacgctctccgtgccccggggctgcagagaagacagctctcaccccgcgtgtgccaaggtggagtatgcctacagcgacaacagcctggaccccgatgatgaggacagtgattaccaccaggaggcctacaaggagtcctacaaagaccggcggcggcgcgcacacactcaggctgagcagaagaggagggacgccatcaagagaggctatgatgaccttcagaccatcgtccccacttgccagcagcaggacttctccattggctcccaaaagctcagcaaagccatcgttctacaaaagaccattgactacattcagtttttgcacaaggagaagaaaaagcaggaggaggaggtgtccacgttacgcaaggatgtcaccgccctaaagatcatgaaagtgaactatgagcagattgtgaaggcacaccaggacaacccccatgaaggggaggaccaggtctctgaccaggtcaagttcaacgtgtttcaaggcatcatggattccctgttccagtccttcaatgcctccatctcagtggccagcttccaggagctgtcagcgtgtgtcttcagctggatcgaggagcactgtaagcctcagaccctgcgggagattgtgattggcgtcctgcaccaattgaaaaaccagctttactgaccggttcttggaaacctggagaacagccaacaagaggcccttgaatctctacgtggccactgaactgctgggcccgggagactggactacaacacctcacactggtcagctggtttctacttggtgtttggtttttcccagccccattttatcttcagcggagccgcggtgtttgttttgtgaaagcttctgattaatttattatattgacgataaaactcaaacctacccagccttccccccactccatggaagtccttgggatgggcgtctgctctggacaccccaaagagctcctgccctctcagccctttattcaagcctcagatttctgctcatgatctacatagatttggaaactgttttcctctgttttggtctcttgggcaacatttttggcccaagtttgggcaacatttggcccaagtttgggcattttggcagtagctgtatgggagaaaaagagtaagaggaaatattcccacagccatgaagggtgaaagggcaccttgtgcctagactagggctgcctggtcagtcccaggtgaggccaagggctttctggccatctcagggaggggccaccaggttcctcccctcaccccatattccatcaccttcctcctctgctctgggtggtaagggaagccctcccggttcccacaggctatgatgctgcatggcagaggcaggtataacacagcactacatattggaaattttttatttttctaaataccaatgcagttttgctacggttacaattttgaaatattaactgagcctcaaaatcaccctttctgtcaagcatatcttggcctctcccatgtctcagtgttgcctgcatttctcccaggacttgggggtggggtgaaaagcgtacaaaagatacttaaaagggctcctggggtacacaagcccagcaggtcctgagtgaagccgtgggccctccaaatgctcgttttatagcaacctctctctaccctagttctccaaattcacttctgccttcctcaggtttgatatctggcaggtttgactatccagaggaaattaaatatttttatataaaattaaattataataaatattgccaaatgctttcctttagcattgttccaagtctaaatgttaacctcaagctactgcaatttagacaatgaaatgggctgggtctacccccagccaccagccctcatcctctctacccagtgctctggtttatgcttgtctcctgactgctctgcttaaaggtgaaagtagcaggaacaacaacaaaagccaaccaaaaacaaggtagccagtgcaagacatctcactcttctgacatcctgcagtccccaccagtcctgaccgtgggcccctcaggggtctgggagtgtgacgttgtaatcttcatccgtctctatcccaacttcctcctgtgagacagggagacaagtgaatgagatgtcaccaggataagaccacagggaagcaaagaaggaagagagctccacttacaaagaactgcttcttgctcttggggtatccttcaagtattgcatcagacagctctgtagcctgacaagaaataaaaccacccgttttcagatgggc

SEQ ID NO: 26257 - protein, 268 aa, Homo sapiens; identical to SEQ ID NO: 26251

SEQ ID NO: 26258 - DNA, 3191 bp, Homo sapiens
tcgccgcagggggcccgcccgctggcccgtttccggtccggtgggtacaagatgacggagccgggcgcctctcccgaggacccttgggtcaaggcaagccccgtgggcgcgcacgccggcgaggggagggcgggtcgggctcgtgcacgtaggggggccggaagacgaggggcttccctcctgtccccaaagtcccccacgctctccgtgccccggggctgcagagaagacagctctcaccccgcgtgtgccaaggtggagtatgcctacagcgacaacagcctggaccccgatgatgaggacagtgattaccaccaggaggcctacaaggagtcctacaaagaccggcggcggcgcgcacacactcaggctgagcagaagaggagggacgccatcaagagaggctatgatgaccttcagaccatcgtccccacttgccagcagcaggacttctccattggctcccaaaagctcagcaaagccatcgttctacaaaagaccattgactacattcagtttttgcacaaggagaagaaaaagcaggaggaggaggtgtccacgttacgcaaggatgtcaccgccctaaagatcatgaaagtgaactatgagcagattgtgaaggcacaccaggacaacccccatgaaggggaggaccaggtctctgaccaggtcaagttcaacgtgtttcaaggcatcatggattccctgttccagtccttcaatgcctccatctcagtggccagcttccaggagctgtcagcgtgtgtcttcagctggatcgaggagcactgtaagcctcagaccctgcgggagattgtgattggcgtcctgcaccaattgaaaaaccagctttactgaccggttcttggaaacctggagaacagccaacaagaggcccttgaatctctacgtggccactgaactgctgggcccgggagactggactacaacacctcacactggtcagctggtttctacttggtgtttggtttttcccagccccattttatcttcagcggagccgcggtgtttgttttgtgaaagcttctgattaatttattatattgacgataaaactcaaacctacccagccttccccccactccatggaagtccttgggatgggcgtctgctctggacaccccaaagagctcctgccctctcagccctttattcaagcctcagatttctgctcatgatctacatagatttggaaactgttttcctctgttttggtctcttgggcaacatttttggcccaagtttgggcaacatttggcccaagtttgggcattttggcagtagctgtatgggagaaaaagagtaagaggaaatattcccacagccatgaagggtgaaagggcaccttgtgcctagactagggctgcctggtcagtcccaggtgaggccaagggctttctggccatctcagggaggggccaccaggttcctcccctcaccccatattccatcaccttcctcctctgctctgggtggtaagggaagccctcccggttcccacaggctatgatgctgcatggcagaggcaggtataacacagcactacatattggaaattttttatttttctaaataccaatgcagttttgctacggttacaattttgaaatattaactgagcctcaaaatcaccctttctgtcaagcatatcttggcctctcccatgtctcagtgttgcctgcatttctcccaggacttgggggtggggtgaaaagcgtacaaaagatacttaaaagggctcctggggtacacaagcccagcaggtcctgagtgaagccgtgggccctccaaatgctcgttttatagcaacctctctctaccctagttctccaaattcacttctgccttcctcaggtttgatatctggcaggtttgactatccagaggaaattaaatatttttatataaaattaaattataataaatattgccaaatgctttcctttagcattgttccaagtctaaatgttaacctcaagctactgcaatttagacaatgaaatgggctgggtctacccccagccaccagccctcatcctctctacccagtgctctggtttatgcttgtctcctgactgctctgcttaaaggtgaaagtagcaggaacaacaacaaaagccaaccaaaaacaaggtagccagtgcaagacatctcactcttctgacatcctgcagtccccaccagtcctgaccgtgggcccctcaggggtctgggagtgtgacgttgtaatcttcatccgtctctatcccaacttcctcctgtgagacagggagacaagtgaatgagatgtcaccaggataagaccacagggaagcaaagaaggaagagagctccacttacaaagaactgcttcttgctcttggggtatccttcaagtattgcatcagacagctctgtagcctgacaagaaataaaaccacccgttttcagatgggcagcactgggcactgcctgtcagtttatgatattgtgtagcggctgatctggtgcctgccattttcaaaggcacctccagggcctgtctcggagctcccacacacttaccatcctcttcctcttcctccactccttacagtacttctgcctctctctgtacacctagaaggaaaaagcaagttcctctaactcctcagaaccacagcagccctctggggctcagccctgatgttcactctggacctgcacagcggtcctacagccttccagctcacctgctctttctcttctggagtcacatgattggtagctgctttaatgttcttcaatctctctctgtagccagcgcattccttctttaactcctggatttctttctgcatctctggtgtggtcagggcactagataattccttgagctctgaaaccacatccgcctggggtcacttgctacccctgaggaaggagttctgtctttcccagtgggtgctccctgaggtgttccaccttgctctggatctatcatctcacatggaaactaagccatacaggattatttattcttctaattttctttcctcctccatctacaagtggcgtgggtgtgaggttgaacacttacttaggcgtagccagttaaagaagcaggaataaagggaaacgtggggacagtgtactgataatcgtggcagggagaacaaatgcgtatcttgtccatttgttggtacacaaaa

SEQ ID NO: 26259 - protein, 268 aa, Homo sapiens; identical to SEQ ID NO: 26251

SEQ ID NO: 26260 - DNA, 911 bp, Homo sapiens
gcccgctggcccgtttccggtccggtgggtacaagatgacggagccgggcgcctctcccgaggacccttgggtcaaggtggagtatgcctacagcgacaacagcctggaccccgatgatgaggacagtgattaccaccaggaggcctacaaggagtcctacaaagaccggcggcggcgcgcacacactcaggctgagcagaagaggagggacgccatcaagagaggctatgatgaccttcagaccatcgtccccacttgccagcagcaggacttctccattggctcccaaaagctcagcaaagccatcgttctacaaaagaccattgactacattcagtttttgcacaaggagaagaaaaagcaggaggaggaggtgtccacgttacgcaaggatgtcaccgccctaaagatcatgaaagtgaactatgagcagattgtgaaggcacaccaggacaacccccatgaaggggaggaccaggtctctgaccaggtcaagttcaacgtgtttcaaggcatcatggattccctgttccagtccttcaatgcctccatctcagtggccagcttccaggagctgtcagcgtgtgtcttcagctggatcgaggagcactgtaagcctcagaccctgcgggagattgtgattggcgtcctgcaccaattgaaaaaccagctttactgaccggttcttggaaacctggagaacagccaacaagaggcccttgaatctctacgtggccactgaactgctgggcccgggagactggactacaacacctcacactggtcagctggtttctacttggtgtttggtttttcccagccccattttatcttcagcggagccgcggtgtttgttttgtgaaagcttctgattaatttattatattgacgataaaactcaaacctaccc

SEQ ID NO: 26261 - protein, 214 aa, Homo sapiens; identical to SEQ ID NO: 3495

SEQ ID NO: 26262 - DNA, 1044 bp, Homo sapiens
gcccgctggcccgtttccggtccggtgggtacaagatgacggagccgggcgcctctcccgaggacccttgggtcaaggtggagtatgcctacagcgacaacagcctggaccccgatgatgaggacagtgattaccaccaggaggcctacaaggagtcctacaaagaccggcggcggcgcgcacacactcaggctgagcagaagaggagggacgccatcaagagaggctatgatgaccttcagaccatcgtccccacttgccagcagcaggacttctccattggctcccaaaagctcagcaaagccatcgttctacaaaagaccattgactacattcagtttttgcacaaggagaagaaaaagcaggaggaggaggtgtccacgttacgcaaggatgtcaccgccctaaagatcatgaaagtgaactatgagcagattgtgaaggcacaccaggacaacccccatgaaggggaggaccaggtctctgaccaggtcaagttcaacgtgtttcaaggcatcatggattccctgttccagtccttcaatgcctccatctcagtggccagcttccaggagctgtcagcgtgtgtcttcagctggatcgaggagcactgtaagcctcagaccctgcgggagattgtgattggcgtcctgcaccaattgaaaaaccagctttactgaccggttcttggaaacctggagaacagccaacaagaggcccttgaatctctacgtggccactgaactgctgggcccgggagactggactacaacacctcacactggtcagctggtttctacttggtgtttggtttttcccagccccattttatcttcagcggagccgcggtgtttgttttgtgaaagcttctgattaatttattatattgacgataaaactcaaacctacccagccttccccccactccatggaagtccttgggatgggcgtctgctctggacaccccaaagagctcctgccctctcagccctttattcaagcctcagatttctgctcatgatctacatagatttggaaactgtt

SEQ ID NO: 26263 - protein, 214 aa, Homo sapiens; identical to SEQ ID NO: 3495

SEQ ID NO: 26264 - DNA, 1789 bp, Homo sapiens
gcccgctggcccgtttccggtccggtgggtacaagatgacggagccgggcgcctctcccgaggacccttgggtcaaggtggagtatgcctacagcgacaacagcctggaccccgatgatgaggacagtgattaccaccaggaggcctacaaggagtcctacaaagaccggcggcggcgcgcacacactcaggctgagcagaagaggagggacgccatcaagagaggctatgatgaccttcagaccatcgtccccacttgccagcagcaggacttctccattggctcccaaaagctcagcaaagccatcgttctacaaaagaccattgactacattcagtttttgcacaaggagaagaaaaagcaggaggaggaggtgtccacgttacgcaaggatgtcaccgccctaaagatcatgaaagtgaactatgagcagattgtgaaggcacaccaggacaacccccatgaaggggaggaccaggtctctgaccaggtcaagttcaacgtgtttcaaggcatcatggattccctgttccagtccttcaatgcctccatctcagtggccagcttccaggagctgtcagcgtgtgtcttcagctggatcgaggagcactgtaagcctcagaccctgcgggagattgtgattggcgtcctgcaccaattgaaaaaccagctttactgaccggttcttggaaacctggagaacagccaacaagaggcccttgaatctctacgtggccactgaactgctgggcccgggagactggactacaacacctcacactggtcagctggtttctacttggtgtttggtttttcccagccccattttatcttcagcggagccgcggtgtttgttttgtgaaagcttctgattaatttattatattgacgataaaactcaaacctacccagccttccccccactccatggaagtccttgggatgggcgtctgctctggacaccccaaagagctcctgccctctcagccctttattcaagcctcagatttctgctcatgatctacatagatttggaaactgttttcctctgttttggtctcttgggcaacatttttggcccaagtttgggcaacatttggcccaagtttgggcattttggcagtagctgtatgggagaaaaagagtaagaggaaatattcccacagccatgaagggtgaaagggcaccttgtgcctagactagggctgcctggtcagtcccaggtgaggccaagggctttctggccatctcagggaggggccaccaggttcctcccctcaccccatattccatcaccttcctcctctgctctgggtggtaagggaagccctcccggttcccacaggctatgatgctgcatggcagaggcaggtataacacagcactacatattggaaattttttatttttctaaataccaatgcagttttgctacggttacaattttgaaatattaactgagcctcaaaatcaccctttctgtcaagcatatcttggcctctcccatgtctcagtgttgcctgcatttctcccaggacttgggggtggggtgaaaagcgtacaaaagatacttaaaagggctcctggggtacacaagcccagcaggtcctgagtgaagccgtgggccctccaaatgctcgttttatagcaacctctctctaccctagttctccaaattcacttctgccttcctcaggtttgatatctggcaggtttgactatccagaggaaattaaatatttttatataaaattaaattataataaatattgccaaatgctttccttt

SEQ ID NO: 26265 - protein, 214 aa, Homo sapiens; identical to SEQ ID NO: 3495

SEQ ID NO: 26266 - DNA, 643 bp, Homo sapiens
gtttccggtccggtgggtacaagatgacggagccgggcgcctctcccgaggacccttgggtcaaggtggagtatgcctacagcgacaacagcctggaccccggtgagtagctgccccatcttaagctctagagggacactcccgcccaggctctctagattcttgtggcgttgccaaccacgcctgagcacagtccactctccctgagcagagttcctggcttgagacagcaggagctgaaggacaagggcagaaaacaactgagggtgacacctagttccctctgctctggaacagggaagtggtggaactgatcactcaccactcagtggagcagctgatcactcacaccctcatcacgtccacatgcccgtttgtgagccaggggggtatcatgcaggcctatggagcagtgtagacactagggagcagagcactgcagcgtggtctggcaggaagtggggggcccagtatggttggctttgggttgaagggaagaggtcagcatttaagaaagccattgtgtggccgggcgcggtggctcacccctgtaatcccagcactttgggaggccgaggcaggcggatcacgaggtcaggagaccgagaccatcctggctaacacggtgaaaccccgtctccac

SEQ ID NO: 26267 - protein, 84 aa, Homo sapiens
MPVCEPGGYHAGLWSSVDTREQSTAAWSGRKWGAQYGWLWVEGKRSAFKKAIVWPGAVAHPCNPSTLGGRGRRITRSGDRDHPG

SEQ ID NO: 26268 - DNA, 844 bp, Homo sapiens
ggtacaagatgacggagccgggcgcctctcccgaggacccttgggtcaaggtggagtatgcctacagcgacaacagcctggaccccgggctttttgtagaaagcacccgcaaggggagtgtagtgtccagagctaatagcatcggttccaccagtgcctcttctgtccccaacacaggtaggcagtaacatcccccccgacctcggggggctcagatatgtcataattgtagtacctttcctagacagggaagccccagccatccacacaggggtgctggagccaaagtatcagacacaaggtctcaccatctttcacctcatctggaacattaggtggttctgtccatctgccttctctggacaccaggttcttcccagctggggaaaggtgggctagctggaccccactgggccccaagatgacctttccctgcccccatctctgagcgtagatgatgaggacagtgattaccaccaggaggcctacaaggagtcctacaaagaccggcggcggcgcgcacacactcaggctgagcagaagaggagggacgccatcaagagaggctatgatgaccttcagaccatcgtccccacttgccagcagcaggacttctccattggctcccaaaagctcagcaaagccatcgttctacaaaagagtatggctagggaaagcactggaggggatggagccaagcggggctgtgaagaggccagtgcctcctacccacccatggctcggccttggtgtggtgattgccatgggatagttggggtctggggtaaggggaacaaagtcagccttatcttcttggttgagaatacttctgtacctgtccttt

SEQ ID NO: 26269 - protein, 105 aa, Homo sapiens
MMRTVITTRRPTRSPTKTGGGAHTLRLSRRGGTPSREAMMTFRPSSPLASSRTSPLAPKSSAKPSFYKRVWLGKALEGMEPSGAVKRPVPPTHPWLGLGVVIAMG

SEQ ID NO: 26270 - DNA, 511 bp, Homo sapiens
gtgccccggggctgcagagaagacagctctcaccccgcgtgtgccaaggtggagtatgcctacagcgacaacagcctggaccccgggctttttgtagaaagcacccgcaaggggagtgtagtgtccagagctaatagcatcggttccaccagtgcctcttctgtccccaacacaggtaggcagtaacatcccccccgacctcggggggctcagatatgtcataattgtagtacctttcctagacagggaagccccagccatccacacaggggtgctggagccaaagtatcagacacaaggtctcaccatctttcacctcatctggaacattaggtggttctgtccatctgccttctctggacaccaggttcttcccagctggggaaaggtgggctagctggaccccactgggccccaagatgacctttccctgcccccatctctgagcgtagatgatgaggacagtgattaccaccaggaggcctacaaggagtcctacaaagaccggcgg

SEQ ID NO: 26271 - protein, 61 aa, Homo sapiens
VPRGCREDSSHPACAKVEYAYSDNSLDPGLFVESTRKGSVVSRANSIGSTSASSVPNTGRQ

SEQ ID NO: 26272 - DNA, 842 bp, Homo sapiens
cggttccaccagtgcctcttctgtccccaacacaggtaggcagtaacatcccccccgacctcggggggctcagatatgtcataattgtagtacctttcctagacagggaagccccagccatccacacaggggtgctggagccaaagtatcagacacaaggtctcaccatctctgagcgtagatgatgaggacagtgattaccaccaggaggcctacaaggagtcctacaaagaccggcggcggcgcgcacacactcaggctgagcagaagaggagggacgccatcaagagaggctatgatgaccttcagaccatcgtccccacttgccagcagcaggacttctccattggctcccaaaagctcagcaaagccatcgttctacaaaagaccattgactacattcagtttttgcacaaggagaagaaaaagcaggaggaggaggtgtccacgttacgcaaggatgtcaccgccctaaagatcatgaaagtgtaagaggggtgctgaatggggggaaccagaacttctgaggcaacttcattgcacaccctcccttgttcaaaggccacatcagttactgctgtacagataatactcttagttcctgagctagccagtaggactgtgtatccccaactgtccttacacatggcagacactcaggaaatgcctgttggattaatgtaaggaaggttggagagagagggccacctttcctgacctggaagcagtatctccctgatactgaaccccacccagaagctctctggggctgccattcctgggagtacacaggatagtcccgtcattcttcttgggtgggcggagctgctgcagcacctcag

SEQ ID NO: 26273 - protein, 97 aa, Homo sapiens
MMRTVITTRRPTRSPTKTGGGAHTLRLSRRGGTPSREAMMTFRPSSPLASSRTSPLAPKSSAKPSFYKRPLTTFSFCTRRRKSRRRRCPRYARMSPP

SEQ ID NO: 26274 - DNA, 646 bp, Homo sapiens
tcttcttggttgagaatacttctgtacctgtcctttttttcttgcccccaccctagccattgactacattcagtttttgcacaaggagaagaaaaagcaggaggaggaggtgtccacgttacgcaaggatgtcaccgccctaaagatcatgaaagtgaactatgagcagattgtgaaggcacaccaggacaacccccatgaaggggaggaccaggtctctgaccaggtcaagttcaacgtgtttcaaggcatcatggattccctgttccagtccttcaatgcctccatctcagtggccagcttccaggagctgtcagcgtgtgtcttcagctggatcgaggagcactgtaagcctcagaccctgcgggagattgtgattggcgtcctgcaccaattgaaaaaccagctttactgaccggttcttggaaacctggagaacagccaacaagaggcccttgaatctctacgtggccactgaactgctgggcccgggagactggactacaacacctcacactggtcagctggtttctacttggtgtttggtttttcccagccccattttatcttcagcggagccgcggtgtttgttttgtgaaagcttctgattaatttattatattgacgataaaactcaaacctaccc

SEQ ID NO: 26275 - protein, 88 aa, Homo sapiens [sequence omitted]

SEQ ID NO: 26276 - DNA, 1565 bp, Homo sapiens
cagaccctgcgggagattgtgattggcgtcctgcaccaattgaaaaaccagctttactgaccggttcttggaaacctggagaacagccaacaagaggcccttgaatctctacgtggccactgaactgctgggcccgggagactggactacaacacctcacactggtcagctggtttctacttggtgtttggtttttcccagccccattttatcttcagcggagccgcggtgtttgttttgtgaaagcttctgattaatttattatattgacgtatccagaggaaattaaatatttttatataaaattaaattataataaatattgccaaatgctttcctttagcattgttccaagtctaaatgttaacctcaagctactgcaatttagacaatgaaatgggctgggtctacccccagccaccagccctcatcctctctacccagtgctctggtttatgcttgtctcctgactgctctgcttaaaggtgaaagtagcaggaacaacaacaaaagccaaccaaaaacaaggtagccagtgcaagacatctcactcttctgacatcctgcagtccccaccagtcctgaccgtgggcccctcaggggtctgggagtgtgacgttgtaatcttcatccgtctctatcccaacttcctcctgtgagacagggagacaagtgaatgagatgtcaccaggataagaccacagggaagcaaagaaggaagagagctccacttacaaagaactgcttcttgctcttggggtatccttcaagtattgcatcagacagctctgtagcctgacaagaaataaaaccacccgttttcagatgggcagcactgggcactgcctgtcagtttatgatattgtgtagcggctgatctggtgcctgccattttcaaaggcacctccagggcctgtctcggagctcccacacacttaccatcctcttcctcttcctccactccttacagtacttctgcctctctctgtacacctagaaggaaaaagcaagttcctctaactcctcagaaccacagcagccctctggggctcagccctgatgttcactctggacctgcacagcggtcctacagccttccagctcacctgctctttctcttctggagtcacatgattggtagctgctttaatgttcttcaatctctctctgtagccagcgcattccttctttaactcctggatttctttctgcatctctggtgtggtcagggcactagataattccttgagctctgaaaccacatccgcctggggtcacttgctacccctgaggaaggagttctgtctttcccagtgggtgctccctgaggtgttccaccttgctctggatctatcatctcacatggaaactaagccatacaggattatttattcttctaattttctttcctcctccatctacaagtggcgtgggtgtgaggttgaacacttacttaggcgtagccagttaaagaagcaggaataaagggaaacgtggggacagtgtactgataatcgtggcagggagaacaaatgcgtatcttgtccatttgttggtacacaaaa

SEQ ID NO: 26277 - protein, 46 aa, Homo sapiens
MKWAGSTPSHQPSSSLPSALVYACLLTALLKGESSRNNNKSQPKTR

SEQ ID NO: 26278 - DNA, 3199 bp, Homo sapiens
ttgttgcagtatcctcctaacagatcttggctcttcaaacatatcttaaactcttaaacattgcagtcagaatgatctgtctaaatagatctggtcatgcaccttccctatttaaaactcttcaatggctctctagtgctgcaaaaaacatgtaaaaggcaccggaagacgccccagccagcctctggcctcaccaatcctcattatttttctatccacgaacactagataattctggtgtgttttactgctctgtcctttgcatgttgtcttccctcactctggcctgggtgacagagaaagaaagagaggaaaagagggaagggagggagaaagagagagaaagagagagggaaagggagggggaaggagggagggagggaggaaaaaggaaggaaggaaggagggagagaggaaggtggaaagaaggatgggaagaaaggacaggaaggaagaagaaaagaagtccatccatcccatccatcatgcttcttcacctgtccagtttctatctattatggaaacccatgatctaggtttccccaccgtgggaacaatgttacttaactgcttcagcccaggtagtggttttatcactaaatgggaagatttctgtcctaatcagtatcctgtcaacctagtagcttaaggacaagcattagatttcagcttttctttcctacctttttagtggggccgctccttaactgaaaacaatttctcaaaagtactctcccactatttctgcagaccctctggagactttggggtgtggctggttcctgagcatatccaaatggtgccttcccaggtgtgtgttcccatctttgtgcctcacaacagttcacttgtattttccctctttgtctggcaggaccagtttgacatggtgagtgatgctgaccttcaagtcctagatggcaaaatcgtggccctcactgctaaggtgcagagcttgcagcagagctgccgctacatggaggctggtaggactgggtagcccctccaaagtgcccataggcttaggttcattctagaggtcaggaattactaaatgaatggttcaatgactgcagcatcttgttgcagctaagacccctttgctgggctcccttaggcataaaaagaaatgtaggataactaacggcttttgtgtaccaacaaatggacaagatacgcatttgttctccctgccacgattatcagtacactgtccccacgtttccctttattcctgcttctttaactggctacgcctaagtaagtgttcaacctcacacccacgccacttgtagatggaggaggaaagaaaattagaagaataaataatcctgtatggcttagtttccatgtgagatgatagatccagagcaaggtggaacacctcagggagcacccactgggaaagacagaactccttcctcaggggtagcaagtgaccccaggcggatgtggtttcagagctcaaggaattatctagtgccctgaccacaccagagatgcagaaagaaatccaggagttaaagaaggaatgcgctggctacagagagagattgaagaacattaaagcagctaccaatcatgtgactccagaagagaaagagcaggtgtacagagagaggcagaagtactgtaaggagtggaggaagaggaagaggatggctacagagctgtctgatgcaatacttgaaggataccccaagagcaagaagcagttctttgaggaagttgggatagagacggatgaagattacaacgtcacactcccagacccctgaggggcccacggtcaggactggtggggactgcaggatgtcagaagagtgagatgtcttgcactggctaccttgtttttggttggcttttgttgttgttcctgctactttcacctttaagcagagcagtcaggagacaagcataaaccagagcactgggtagagaggatgagggctggtggctgggggtagacccagcccatttcattgtctaaattgcagtagcttgaggttaacatttagacttggaacaatgctaaaggaaagcatttggcaatatttattataatttaattttatataaaaatatttaatttcctctggatagtcaaacctgccagatatcaaacctgaggaaggcagaagtgaatttggagaactagggtagagagaggttgctataaaacgagcatttggagggcccacggcttcactcaggacctgctgggcttgtgtaccccaggagcccttttaagtatcttttgtacgcttttcaccccacccccaagtcctgggagaaatgcaggcaacactgagacatgggagaggccaagatatgcttgacagaaagggtgattttgaggctcagttaatatttcaaaattgtaaccgtagcaaaactgcattggtatttagaaaaataaaaaatttccaatatgtagtgctgtgttatacctgcctctgccatgcagcatcatagcctgtgggaaccgggagggcttcccttaccacccagagcagaggaggaaggtgatggaatatggggtgaggggaggaacctggtggcccctccctgagatggccagaaagcccttggcctcacctgggactgaccaggcagccctagtctaggcacaaggtgccctttcacccttcatggctgtgggaatatttcctcttactctttttctcccatacagctactgccaaaatgcccaaacttgggccaaatgttgcccaaacttgggccaaaaatgttgcccaagagaccaaaacagaggaaaacagtttccaaatctatgtagatcatgagcagaaatctgaggcttgaataaagggctgagagggcaggagctctttggggtgtccagagcagacgcccatcccaaggacttccatggagtggggggaaggctgggtaggtttgagttttatcgtcaatataataaattaatcagaagctttcacaaaacaaacaccgcggctccgctgaagataaaatggggctgggaaaaaccaaacaccaagtagaaaccagctgaccagtgtgaggtgttgtagtccagtctcccgggcccagcagttcagtggccacgtagagattcaagggcctcttgttggctgttctccaggtttccaagaaccggtcagtaaagctggtttttcaattggtgcaggacgccaatcacaatctcccgcagggt

SEQ ID NO: 26279 - protein, 92 aa, Homo sapiens
MQKEIQELKKECAGYRERLKNIKAATNHVTPEEKEQVYRERQKYCKEWRKRKRMATELSDAILEGYPKSKKQFFEEVGIETDEDYNVTLPDP

SEQ ID NO: 26280 - DNA, 2090 bp, Homo sapiens
gtaaaggccgggcagaagctgcggcgggagccgccgggatcctcctgaggtacctgcaggagcagaaccggccctacagctcccaggatgtgttcgggaacctacagcgggaacacggactgggcaaggcggtggtggtgaagacgctggagcagctggcgcaacaaggcaagatcaaagagaagatgtacggcaagcagaagatctattttgcggatcagaccctctggagactttggggaccagtttgacatggtgagtgatgctgaccttcaagtcctagatggcaaaatcgtggccctcactgctaaggtgcagagcttgcagcagagctgccgctacatggaggctgagctcaaggaattatctagtgccctgaccacaccagagatgcagaaagaaatccaggagttaaagaaggaatgcgctggctacagagagagattgaagaacattaaagcagctaccaatcatgtgactccagaagagaaagagcaggtgtacagagagaggcagaagtactgtaaggagtggaggaagaggaagaggatggctacagagctgtctgatgcaatacttgaaggataccccaagagcaagaagcagttctttgaggaagttgggatagagacggatgaagattacaacgtcacactcccagacccctgaggggcccacggtcaggactggtggggactgcaggatgtcagaagagtgagatgtcttgcactggctaccttgtttttggttggcttttgttgttgttcctgctactttcacctttaagcagagcagtcaggagacaagcataaaccagagcactgggtagagaggatgagggctggtggctgggggtagacccagcccatttcattgtctaaattgcagtagcttgaggttaacatttagacttggaacaatgctaaaggaaagcatttggcaatatttattataatttaattttatataaaaatatttaatttcctctggatagtcaaacctgccagatatcaaacctgaggaaggcagaagtgaatttggagaactagggtagagagaggttgctataaaacgagcatttggagggcccacggcttcactcaggacctgctgggcttgtgtaccccaggagcccttttaagtatcttttgtacgcttttcaccccacccccaagtcctgggagaaatgcaggcaacactgagacatgggagaggccaagatatgcttgacagaaagggtgattttgaggctcagttaatatttcaaaattgtaaccgtagcaaaactgcattggtatttagaaaaataaaaaatttccaatatgtagtgctgtgttatacctgcctctgccatgcagcatcatagcctgtgggaaccgggagggcttcccttaccacccagagcagaggaggaaggtgatggaatatggggtgaggggaggaacctggtggcccctccctgagatggccagaaagcccttggcctcacctgggactgaccaggcagccctagtctaggcacaaggtgccctttcacccttcatggctgtgggaatatttcctcttactctttttctcccatacagctactgccaaaatgcccaaacttgggccaaatgttgcccaaacttgggccaaaaatgttgcccaagagaccaaaacagaggaaaacagtttccaaatctatgtagatcatgagcagaaatctgaggcttgaataaagggctgagagggcaggagctctttggggtgtccagagcagacgcccatcccaaggacttccatggagtggggggaaggctgggtaggtttgagttttatcgtcaatataataaattaatcagaagctttcacaaaacaaacaccgcggctccgctgaagataaaatggggctgggaaaaaccaaacaccaagtagaaaccagctgaccagtgtgaggtgttgtagtccagtctcccgggcccagcagttcagtggccacgtagagattcaagggcctcttgttggctgttctccaggtttccaagaaccggtcagtaaagctggtttttcaattggtgcaggacgccaatcacaatctcccgcagggt

SEQ ID NO: 26281 - protein, 138 aa, Homo sapiens
MVSDADLQVLDGKIVALTAKVQSLQQSCRYMEAELKELSSALTTPEMQKEIQELKKECAGYRERLKNIKAATNHVTPEEKEQVYRERQKYCKEWRKRKRMATELSDAILEGYPKSKKQFFEEVGIETDEDYNVTLPDP

SEQ ID NO: 26282 - DNA, 2179 bp, Homo sapiens
ggcgggaaaggcgatgagtaaaggccgggcagaagctgcggcgggaggtaacggcgccgtgggcgcggggaagacccgggagggcagtgggtgaggaggtcggttgagtggccccctcccctgcctttctctccgtagccgccgggatcctcctgaggtacctgcaggagcagaaccggccctacagctcccaggatgtgttcgggaacctacagcgggaacacggactgggcaaggcggtggtggtgaagacgctggagcagctggcgcaacaaggcaagatcaaagagaagatgtacggcaagcagaagatctattttgcggatcaggaccagtttgacatggtgagtgatgctgaccttcaagtcctagatggcaaaatcgtggccctcactgctaaggtgcagagcttgcagcagagctgccgctacatggaggctgagctcaaggaattatctagtgccctgaccacaccagagatgcagaaagaaatccaggagttaaagaaggaatgcgctggctacagagagagattgaagaacattaaagcagctaccaatcatgtgactccagaagagaaagagcaggtgtacagagagaggcagaagtactgtaaggagtggaggaagaggaagaggatggctacagagctgtctgatgcaatacttgaaggataccccaagagcaagaagcagttctttgaggaagttgggatagagacggatgaagattacaacgtcacactcccagacccctgaggggcccacggtcaggactggtggggactgcaggatgtcagaagagtgagatgtcttgcactggctaccttgtttttggttggcttttgttgttgttcctgctactttcacctttaagcagagcagtcaggagacaagcataaaccagagcactgggtagagaggatgagggctggtggctgggggtagacccagcccatttcattgtctaaattgcagtagcttgaggttaacatttagacttggaacaatgctaaaggaaagcatttggcaatatttattataatttaattttatataaaaatatttaatttcctctggatagtcaaacctgccagatatcaaacctgaggaaggcagaagtgaatttggagaactagggtagagagaggttgctataaaacgagcatttggagggcccacggcttcactcaggacctgctgggcttgtgtaccccaggagcccttttaagtatcttttgtacgcttttcaccccacccccaagtcctgggagaaatgcaggcaacactgagacatgggagaggccaagatatgcttgacagaaagggtgattttgaggctcagttaatatttcaaaattgtaaccgtagcaaaactgcattggtatttagaaaaataaaaaatttccaatatgtagtgctgtgttatacctgcctctgccatgcagcatcatagcctgtgggaaccgggagggcttcccttaccacccagagcagaggaggaaggtgatggaatatggggtgaggggaggaacctggtggcccctccctgagatggccagaaagcccttggcctcacctgggactgaccaggcagccctagtctaggcacaaggtgccctttcacccttcatggctgtgggaatatttcctcttactctttttctcccatacagctactgccaaaatgcccaaacttgggccaaatgttgcccaaacttgggccaaaaatgttgcccaagagaccaaaacagaggaaaacagtttccaaatctatgtagatcatgagcagaaatctgaggcttgaataaagggctgagagggcaggagctctttggggtgtccagagcagacgcccatcccaaggacttccatggagtggggggaaggctgggtaggtttgagttttatcgtcaatataataaattaatcagaagctttcacaaaacaaacaccgcggctccgctgaagataaaatggggctgggaaaaaccaaacaccaagtagaaaccagctgaccagtgtgaggtgttgtagtccagtctcccgggcccagcagttcagtggccacgtagagattcaagggcctcttgttggctgttctccaggtttccaagaaccggtcagtaaagctggtttttcaattggtgcaggacgccaatcacaatctcccgcagggt

SEQ ID NO: 26283 - protein, 154 aa, Homo sapiens
MYGKQKIYFADQDQFDMVSDADLQVLDGKIVALTAKVQSLQQSCRYMEAELKELSSALTTPEMQKEIQELKKECAGYRERLKNIKAATNHVTPEEKEQVYRERQKYCKEWRKRKRMATELSDAILEGYPKSKKQFFEEVGIETDEDYNVTLPDP

SEQ ID NO: 26284 - DNA, 2093 bp, Homo sapiens
ctgagttgggtggcgggaaaggcgatgagtaaaggccgggcagaagctgcggcgggaggtaacggcgccgtgggcgcggggaagacccgggagggcagtgggtgaggaggtcggttgagtggccccctcccctgcctttctctccgtagccgccgggatcctcctgaggtacctgcaggagcagaaccggccctacagctcccaggatgtgttcgggaacctacagcgggaacacggactgggcaaggcggtggtggtgaagacgctggagcagctggcgcaacaaggcaagatcaaagagaagatgtacggcaagcagaagatctattttgcggatcaggaccagtttgacatgagctcaaggaattatctagtgccctgaccacaccagagatgcagaaagaaatccaggagttaaagaaggaatgcgctggctacagagagagattgaagaacattaaagcagctaccaatcatgtgactccagaagagaaagagcaggtgtacagagagaggcagaagtactgtaaggagtggaggaagaggaagaggatggctacagagctgtctgatgcaatacttgaaggataccccaagagcaagaagcagttctttgaggaagttgggatagagacggatgaagattacaacgtcacactcccagacccctgaggggcccacggtcaggactggtggggactgcaggatgtcagaagagtgagatgtcttgcactggctaccttgtttttggttggcttttgttgttgttcctgctactttcacctttaagcagagcagtcaggagacaagcataaaccagagcactgggtagagaggatgagggctggtggctgggggtagacccagcccatttcattgtctaaattgcagtagcttgaggttaacatttagacttggaacaatgctaaaggaaagcatttggcaatatttattataatttaattttatataaaaatatttaatttcctctggatagtcaaacctgccagatatcaaacctgaggaaggcagaagtgaatttggagaactagggtagagagaggttgctataaaacgagcatttggagggcccacggcttcactcaggacctgctgggcttgtgtaccccaggagcccttttaagtatcttttgtacgcttttcaccccacccccaagtcctgggagaaatgcaggcaacactgagacatgggagaggccaagatatgcttgacagaaagggtgattttgaggctcagttaatatttcaaaattgtaaccgtagcaaaactgcattggtatttagaaaaataaaaaatttccaatatgtagtgctgtgttatacctgcctctgccatgcagcatcatagcctgtgggaaccgggagggcttcccttaccacccagagcagaggaggaaggtgatggaatatggggtgaggggaggaacctggtggcccctccctgagatggccagaaagcccttggcctcacctgggactgaccaggcagccctagtctaggcacaaggtgccctttcacccttcatggctgtgggaatatttcctcttactctttttctcccatacagctactgccaaaatgcccaaacttgggccaaatgttgcccaaacttgggccaaaaatgttgcccaagagaccaaaacagaggaaaacagtttccaaatctatgtagatcatgagcagaaatctgaggcttgaataaagggctgagagggcaggagctctttggggtgtccagagcagacgcccatcccaaggacttccatggagtggggggaaggctgggtaggtttgagttttatcgtcaatataataaattaatcagaagctttcacaaaacaaacaccgcggctccgctgaagataaaatggggctgggaaaaaccaaacaccaagtagaaaccagctgaccagtgtgaggtgttgtagtccagtctcccgggcccagcagttcagtggccacgtagagattcaagggcctcttgttggctgttctccaggtttccaagaaccggtcagtaaagctggtttttcaattggtgcaggacgccaatcacaatctcccgcagggt

SEQ ID NO: 26285 - protein, 92 aa, Homo sapiens; identical to SEQ ID NO: 26279

SEQ ID NO: 26286 - DNA, 2127 bp, Homo sapiens
gccccgagcaactacaacgtccggctttctgagttgggtggcgggaaaggcgatgagtaaaggccgggcagaagctgcggcgggagccgccgggatcctcctgaggtacctgcaggagcagaaccggccctacagctcccaggatgtgttcgggaacctacagcgggaacacggactgggcaaggcggtggtggtgaagacgctggagcagctggcgcaacaaggcaagatcaaagagaagatgtacggcaagcagaagatctattttgcggatcaggaccagtttgacatggtgagtgatgctgaccttcaagtcctagatggcaaaatcgtggccctcactgctaaggtgcagagcttgcagcagagctgccgctacatggaggctgagctcaaggaattatctagtgccctgaccacaccagagatgcagaaagaaatccaggagttaaagaaggaatgcgctggctacagagagagattgaagaacattaaagcagctaccaatcatgtgactccagaagagaaagagcaggtgtacagagagaggcagaagtactgtaaggagtggaggaagaggaagaggatggctacagagctgtctgatgcaatacttgaaggataccccaagagcaagaagcagttctttgaggaagttgggatagagacggatgaagattacaacgtcacactcccagacccctgaggggcccacggtcaggactggtggggactgcaggatgtcagaagagtgagatgtcttgcactggctaccttgtttttggttggcttttgttgttgttcctgctactttcacctttaagcagagcagtcaggagacaagcataaaccagagcactgggtagagaggatgagggctggtggctgggggtagacccagcccatttcattgtctaaattgcagtagcttgaggttaacatttagacttggaacaatgctaaaggaaagcatttggcaatatttattataatttaattttatataaaaatatttaatttcctctggatagtcaaacctgccagatatcaaacctgaggaaggcagaagtgaatttggagaactagggtagagagaggttgctataaaacgagcatttggagggcccacggcttcactcaggacctgctgggcttgtgtaccccaggagcccttttaagtatcttttgtacgcttttcaccccacccccaagtcctgggagaaatgcaggcaacactgagacatgggagaggccaagatatgcttgacagaaagggtgattttgaggctcagttaatatttcaaaattgtaaccgtagcaaaactgcattggtatttagaaaaataaaaaatttccaatatgtagtgctgtgttatacctgcctctgccatgcagcatcatagcctgtgggaaccgggagggcttcccttaccacccagagcagaggaggaaggtgatggaatatggggtgaggggaggaacctggtggcccctccctgagatggccagaaagcccttggcctcacctgggactgaccaggcagccctagtctaggcacaaggtgccctttcacccttcatggctgtgggaatatttcctcttactctttttctcccatacagctactgccaaaatgcccaaacttgggccaaatgttgcccaaacttgggccaaaaatgttgcccaagagaccaaaacagaggaaaacagtttccaaatctatgtagatcatgagcagaaatctgaggcttgaataaagggctgagagggcaggagctctttggggtgtccagagcagacgcccatcccaaggacttccatggagtggggggaaggctgggtaggtttgagttttatcgtcaatataataaattaatcagaagctttcacaaaacaaacaccgcggctccgctgaagataaaatggggctgggaaaaaccaaacaccaagtagaaaccagctgaccagtgtgaggtgttgtagtccagtctcccgggcccagcagttcagtggccacgtagagattcaagggcctcttgttggctgttctccaggtttccaagaaccggtcagtaaagctggtttttcaattggtgcaggacgccaatcacaatctcccgcagggt

SEQ ID NO: 26287 - protein, 217 aa, Homo sapiens; identical to SEQ ID NO: 3499

SEQ ID NO: 26288 - DNA, 2435 bp, Homo sapiens
ttgttgcagtatcctcctaacagatcttggctcttcaaacatatcttaaactcttaaacattgcagtcagaatgatctgtctaaatagatctggtcatgcaccttccctatttaaaactcttcaatggctctctagtgctgcaaaaaacatgtaaaaggcaccggaagacgccccagccagcctctggcctcaccaatcctcattatttttctatccacgaacactagataattctggtgtgttttactgctctgtcctttgcatgttgtcttccctcactctggcctgggtgacagagaaagaaagagaggaaaagagggaagggagggagaaagagagagaaagagagagggaaagggagggggaaggagggagggagggaggaaaaaggaaggaaggaaggagggagagaggaaggtggaaagaaggatgggaagaaaggacaggaaggaagaagaaaagaagtccatccatcccatccatcatgcttcttcacctgtccagtttctatctattatggaaacccatgatctaggtttccccaccgtgggaacaatgttacttaactgcttcagcccaggtagtggttttatcactaaatgggaagatttctgtcctaatcagtatcctgtcaacctagtagcttaaggacaagcattagatttcagcttttctttcctacctttttagtggggccgctccttaactgaaaacaatttctcaaaagtactctcccactatttctgcagaccctctggagactttggggtgtggctggttcctgagcatatccaaatggtgccttcccaggtgtgtgttcccatctttgtgcctcacaacagttcacttgtattttccctctttgtctggcaggaccagtttgacatggtgagtgatgctgaccttcaagtcctagatggcaaaatcgtggccctcactgctaaggtgcagagcttgcagcagagctgccgctacatggaggctggtaggactgggtagcccctccaaagtgcccataggcttaggttcattctagaggtcaggaattactaaatgaatggttcaatgactgcagcatcttgttgcagctaagacccctttgctgggctcccttaggcataaaaagaaatgtaggataactaacggcttttgtgtaccaacaaatggacaagatacgcatttgttctccctgccacgattatcagtacactgtccccacgtttccctttattcctgcttctttaactggctacgcctaagtaagtgttcaacctcacacccacgccacttgtagatggaggaggaaagaaaattagaagaataaataatcctgtatggcttagtttccatgtgagatgatagatccagagcaaggtggaacacctcagggagcacccactgggaaagacagaactccttcctcaggggtagcaagtgaccccaggcggatgtggtttcagagctcaaggaattatctagtgccctgaccacaccagagatgcagaaagaaatccaggagttaaagaaggaatgcgctggctacagagagagattgaagaacattaaagcagctaccaatcatgtgactccagaagagaaagagcaggtgtacagagagaggcagaagtactgtaaggagtggaggaagaggaagaggatggctacagagctgtctgatgcaatacttgaaggataccccaagagcaagaagcagttctttgaggaagttgggatagagacggatgaagattacaacgtcacactcccagacccctgaggggcccacggtcaggactggtggggactgcaggatgtcagaagagtgagatgtcttgcactggctaccttgtttttggttggcttttgttgttgttcctgctactttcacctttaagcagagcagtcaggagacaagcataaaccagagcactgggtagagaggatgagggctggtggctgggggtagacccagcccatttcattgtctaaattgcagtagcttgaggttaacatttagacttggaacaatgctaaaggaaagcatttggcaatatttattataatttaattttatataaaaatatttaatttcctctggatagtcaaacctgccagatatcaaacctgaggaaggcagaagtgaatttggagaactagggtagagagaggttgctataaaacgagcatttggagggcccacggcttcactcaggacctgctgggcttgtgtaccccaggagcccttttaagtatcttttgtacgcttttcaccccacccccaagtcctgggagaaatgcaggcaacactgagacatgggagaggccaagatatgcttgacagaaagggtgattttgaggctcagttaatatttcaaaattgtaaccgtagcaaaactgcattggtatttagaaaaataaaaaatttccaatatgt

SEQ ID NO: 26289 - protein, 92 aa, Homo sapiens; identical to SEQ ID NO: 26279

SEQ ID NO: 26290 - DNA, 1326 bp, Homo sapiens
gtaaaggccgggcagaagctgcggcgggagccgccgggatcctcctgaggtacctgcaggagcagaaccggccctacagctcccaggatgtgttcgggaacctacagcgggaacacggactgggcaaggcggtggtggtgaagacgctggagcagctggcgcaacaaggcaagatcaaagagaagatgtacggcaagcagaagatctattttgcggatcagaccctctggagactttggggaccagtttgacatggtgagtgatgctgaccttcaagtcctagatggcaaaatcgtggccctcactgctaaggtgcagagcttgcagcagagctgccgctacatggaggctgagctcaaggaattatctagtgccctgaccacaccagagatgcagaaagaaatccaggagttaaagaaggaatgcgctggctacagagagagattgaagaacattaaagcagctaccaatcatgtgactccagaagagaaagagcaggtgtacagagagaggcagaagtactgtaaggagtggaggaagaggaagaggatggctacagagctgtctgatgcaatacttgaaggataccccaagagcaagaagcagttctttgaggaagttgggatagagacggatgaagattacaacgtcacactcccagacccctgaggggcccacggtcaggactggtggggactgcaggatgtcagaagagtgagatgtcttgcactggctaccttgtttttggttggcttttgttgttgttcctgctactttcacctttaagcagagcagtcaggagacaagcataaaccagagcactgggtagagaggatgagggctggtggctgggggtagacccagcccatttcattgtctaaattgcagtagcttgaggttaacatttagacttggaacaatgctaaaggaaagcatttggcaatatttattataatttaattttatataaaaatatttaatttcctctggatagtcaaacctgccagatatcaaacctgaggaaggcagaagtgaatttggagaactagggtagagagaggttgctataaaacgagcatttggagggcccacggcttcactcaggacctgctgggcttgtgtaccccaggagcccttttaagtatcttttgtacgcttttcaccccacccccaagtcctgggagaaatgcaggcaacactgagacatgggagaggccaagatatgcttgacagaaagggtgattttgaggctcagttaatatttcaaaattgtaaccgtagcaaaactgcattggtatttagaaaaataaaaaatttccaatatgt

SEQ ID NO: 26291 - protein, 138 aa, Homo sapiens; identical to SEQ ID NO: 26281

SEQ ID NO: 26292 - DNA, 1415 bp, Homo sapiens
ggcgggaaaggcgatgagtaaaggccgggcagaagctgcggcgggaggtaacggcgccgtgggcgcggggaagacccgggagggcagtgggtgaggaggtcggttgagtggccccctcccctgcctttctctccgtagccgccgggatcctcctgaggtacctgcaggagcagaaccggccctacagctcccaggatgtgttcgggaacctacagcgggaacacggactgggcaaggcggtggtggtgaagacgctggagcagctggcgcaacaaggcaagatcaaagagaagatgtacggcaagcagaagatctattttgcggatcaggaccagtttgacatggtgagtgatgctgaccttcaagtcctagatggcaaaatcgtggccctcactgctaaggtgcagagcttgcagcagagctgccgctacatggaggctgagctcaaggaattatctagtgccctgaccacaccagagatgcagaaagaaatccaggagttaaagaaggaatgcgctggctacagagagagattgaagaacattaaagcagctaccaatcatgtgactccagaagagaaagagcaggtgtacagagagaggcagaagtactgtaaggagtggaggaagaggaagaggatggctacagagctgtctgatgcaatacttgaaggataccccaagagcaagaagcagttctttgaggaagttgggatagagacggatgaagattacaacgtcacactcccagacccctgaggggcccacggtcaggactggtggggactgcaggatgtcagaagagtgagatgtcttgcactggctaccttgtttttggttggcttttgttgttgttcctgctactttcacctttaagcagagcagtcaggagacaagcataaaccagagcactgggtagagaggatgagggctggtggctgggggtagacccagcccatttcattgtctaaattgcagtagcttgaggttaacatttagacttggaacaatgctaaaggaaagcatttggcaatatttattataatttaattttatataaaaatatttaatttcctctggatagtcaaacctgccagatatcaaacctgaggaaggcagaagtgaatttggagaactagggtagagagaggttgctataaaacgagcatttggagggcccacggcttcactcaggacctgctgggcttgtgtaccccaggagcccttttaagtatcttttgtacgcttttcaccccacccccaagtcctgggagaaatgcaggcaacactgagacatgggagaggccaagatatgcttgacagaaagggtgattttgaggctcagttaatatttcaaaattgtaaccgtagcaaaactgcattggtatttagaaaaataaaaaatttccaatatgt

SEQ ID NO: 26293 - protein, 154 aa, Homo sapiens; identical to SEQ ID NO: 26283

SEQ ID NO: 26294 - DNA, 1329 bp, Homo sapiens
ctgagttgggtggcgggaaaggcgatgagtaaaggccgggcagaagctgcggcgggaggtaacggcgccgtgggcgcggggaagacccgggagggcagtgggtgaggaggtcggttgagtggccccctcccctgcctttctctccgtagccgccgggatcctcctgaggtacctgcaggagcagaaccggccctacagctcccaggatgtgttcgggaacctacagcgggaacacggactgggcaaggcggtggtggtgaagacgctggagcagctggcgcaacaaggcaagatcaaagagaagatgtacggcaagcagaagatctattttgcggatcaggaccagtttgacatgagctcaaggaattatctagtgccctgaccacaccagagatgcagaaagaaatccaggagttaaagaaggaatgcgctggctacagagagagattgaagaacattaaagcagctaccaatcatgtgactccagaagagaaagagcaggtgtacagagagaggcagaagtactgtaaggagtggaggaagaggaagaggatggctacagagctgtctgatgcaatacttgaaggataccccaagagcaagaagcagttctttgaggaagttgggatagagacggatgaagattacaacgtcacactcccagacccctgaggggcccacggtcaggactggtggggactgcaggatgtcagaagagtgagatgtcttgcactggctaccttgtttttggttggcttttgttgttgttcctgctactttcacctttaagcagagcagtcaggagacaagcataaaccagagcactgggtagagaggatgagggctggtggctgggggtagacccagcccatttcattgtctaaattgcagtagcttgaggttaacatttagacttggaacaatgctaaaggaaagcatttggcaatatttattataatttaattttatataaaaatatttaatttcctctggatagtcaaacctgccagatatcaaacctgaggaaggcagaagtgaatttggagaactagggtagagagaggttgctataaaacgagcatttggagggcccacggcttcactcaggacctgctgggcttgtgtaccccaggagcccttttaagtatcttttgtacgcttttcaccccacccccaagtcctgggagaaatgcaggcaacactgagacatgggagaggccaagatatgcttgacagaaagggtgattttgaggctcagttaatatttcaaaattgtaaccgtagcaaaactgcattggtatttagaaaaataaaaaatttccaatatgt

SEQ ID NO: 26295 - protein, 92 aa, Homo sapiens; identical to SEQ ID NO: 26279

SEQ ID NO: 26296 - DNA, 1363 bp, Homo sapiens
gccccgagcaactacaacgtccggctttctgagttgggtggcgggaaaggcgatgagtaaaggccgggcagaagctgcggcgggagccgccgggatcctcctgaggtacctgcaggagcagaaccggccctacagctcccaggatgtgttcgggaacctacagcgggaacacggactgggcaaggcggtggtggtgaagacgctggagcagctggcgcaacaaggcaagatcaaagagaagatgtacggcaagcagaagatctattttgcggatcaggaccagtttgacatggtgagtgatgctgaccttcaagtcctagatggcaaaatcgtggccctcactgctaaggtgcagagcttgcagcagagctgccgctacatggaggctgagctcaaggaattatctagtgccctgaccacaccagagatgcagaaagaaatccaggagttaaagaaggaatgcgctggctacagagagagattgaagaacattaaagcagctaccaatcatgtgactccagaagagaaagagcaggtgtacagagagaggcagaagtactgtaaggagtggaggaagaggaagaggatggctacagagctgtctgatgcaatacttgaaggataccccaagagcaagaagcagttctttgaggaagttgggatagagacggatgaagattacaacgtcacactcccagacccctgaggggcccacggtcaggactggtggggactgcaggatgtcagaagagtgagatgtcttgcactggctaccttgtttttggttggcttttgttgttgttcctgctactttcacctttaagcagagcagtcaggagacaagcataaaccagagcactgggtagagaggatgagggctggtggctgggggtagacccagcccatttcattgtctaaattgcagtagcttgaggttaacatttagacttggaacaatgctaaaggaaagcatttggcaatatttattataatttaattttatataaaaatatttaatttcctctggatagtcaaacctgccagatatcaaacctgaggaaggcagaagtgaatttggagaactagggtagagagaggttgctataaaacgagcatttggagggcccacggcttcactcaggacctgctgggcttgtgtaccccaggagcccttttaagtatcttttgtacgcttttcaccccacccccaagtcctgggagaaatgcaggcaacactgagacatgggagaggccaagatatgcttgacagaaagggtgattttgaggctcagttaatatttcaaaattgtaaccgtagcaaaactgcattggtatttagaaaaataaaaaatttccaatatgt

SEQ ID NO: 26297 - protein, 217 aa, Homo sapiens; identical to SEQ ID NO: 3499

SEQ ID NO: 26298 - DNA, 1420 bp, Homo sapiens
ggagtccgggaggggtcgctttgctcctccggaaggcttccccttcagccaatcaccgttcgaggcccgcccccgtcgccggaaggagccgtcgccccgagcaactacaacgtccggctttctgagttgggtggcgggaaaggcgatgagtaaaggccgggcagaagctgcggcgggagccgccgggatcctcctgaggtacctgcaggagcagaaccggccctacagctcccaggatgtgttcgggaacctacagcgggaacacggactgggcaaggcggtggtggtgaagacgctggagcagctggcgcaacaaggcaagatcaaagagaagatgtacggcaagcagaagatctattttgcggatcaggaccagtttgacatggtgagtgatgctgaccttcaagtcctagatggcaaaatcgtggccctcactgctaaggtgcagagcttgcagcagagctgccgctacatggaggctgagatgcagaaagaaatccaggagttaaagaaggaatgcgctggctacagagagagattgaagaacattaaagcagctaccaatcatgtgactccagaagagaaagagcaggtgtacagagagaggcagaagtactgtaaggagtggaggaagaggaagaggatggctacagagctgtctgatgcaatacttgaaggataccccaagagcaagaagcagttctttgaggaagttgggatagagacggatgaagattacaacgtcacactcccagacccctgaggggcccacggtcaggactggtggggactgcaggatgtcagaagagtgagatgtcttgcactggctaccttgtttttggttggcttttgttgttgttcctgctactttcacctttaagcagagcagtcaggagacaagcataaaccagagcactgggtagagaggatgagggctggtggctgggggtagacccagcccatttcattgtctaaattgcagtagcttgaggttaacatttagacttggaacaatgctaaaggaaagcatttggcaatatttattataatttaattttatataaaaatatttaatttcctctggatagtcaaacctgccagatatcaaacctgaggaaggcagaagtgaatttggagaactagggtagagagaggttgctataaaacgagcatttggagggcccacggcttcactcaggacctgctgggcttgtgtaccccaggagcccttttaagtatcttttgtacgcttttcaccccacccccaagtcctgggagaaatgcaggcaacactgagacatgggagaggccaagatatgcttgacagaaagggtgattttgaggctcagttaatatttcaaaattgtaaccgtagcaaaactgcattggtatttagaaaaataaaaaatttccaatatgt

SEQ ID NO: 26299 - protein, 205 aa, Homo sapiens; identical to SEQ ID NO: 3497

SEQ ID NO: 26300 - DNA, 718 bp, Homo sapiens
ggcagaagctgcggcgggaggtaacggcgccgtgggcgcggggaagacccgggagggcagtgggtgaggaggtcggttgagtggccccctcccctgcctttctctccgtagccgccgggatcctcctgaggtacctgcaggagcagaaccggccctacagctcccaggatgtgttcgggaacctacagcgggaacacggactgggcaaggcggtggtggtgaagacgctggagcagctggcgcaacaaggcaagatcaaagagaagatgtacggcaagcagaagatctattttgcggatcaggtgaggagaacttgcgccgattgtcacccatgagagcccgacaacgggtgaatctactcctggtgtgaactctttggggacaaggccccccatggaaaactcacctgtcttaggccaccatccttaaatcaaggtgtgtactcctcttgttaggatcccaacttcacgaggtttccagatttacaatatgatggatgacagaagattctgtattgttgctaccaagatccatttccgctccaaagctcttattccttatcatctacattagcaacaccctctgccaaatgatgttcctcctgcctccatccgattctctaaacacacatatcaaatttatattctccagcccagacctccagctggaatctgtcaggcattaatatcagagtcaaaattgccacagtagaatgcct

SEQ ID NO: 26301 - protein, 62 aa, Homo sapiens
MTEDSVLLLPRSISAPKLLFLIIYISNTLCQMMFLLPPSDSLNTHIKFIFSSPDLQLESVRH

SEQ ID NO: 26302 - DNA, 2366 bp, Homo sapiens
ctgctggcctggatgatgaggacgacactagcattggcatgcccagcttgatgtaccgttctccgccaggggctgaggagccccaggccccacctgccagccgggacgaggctgcgctgccggagctcctgcttggtgctcttcctgtaggatccaacctcaccagcaaccttgccagcctggtctcccagggtatgattcagctggccttgtcaggggcctcccaaccaggcccttctggagcacctgcccagagagcaacgagaggcttcctccggtcccccagttcagacctggacactgatgctgagggggatgactttgaacttctggaccagtcggagctgagtcagctggaccctgccagttctaggagccactgaggcagagactccttttgggagtcactgtggtttaggtttttttctccccatcccacttaaggtgatggggcaagggaagaactcagctcccctcccctgaattatatttgtatgctgggtggcctggctgatgctcagaggcctccttagagaggacactcactcccctcccaccagctggatgcccatttctgagctcagtcactgaagtgagagtgtgctcccccaagggaggcttctctccatcaggatggtactttgggggaacaaaatagtcagggatattggttcccctttgaggaggtgctgctgtttgcttttaggtatgagtgctcaggggccctcactgaaagagcccatgcctgccttcctcctttcatcgcctctctagagcccccaaagtcaggcagcagctggagtagttacattgtcatcatctttttttttgagacagtttcgctctgttgcccaggctggagtgcagtggtgtgatcttggctttctgcaacgtctgccttccaggttgaagaggttctcctgcctcagcctccttagtagtgggattacaggtgcccgctactatgcccggctaatttttcttttggtatttttagtagaaatggggtttcaccatgttggccaggctggtctcaaactcctgactgcaaatgatcagcccgcctcagccacccaaagtgttgggattacaggtgtgagccactgtgcccagcgtgatttttttttttttttaaagcaaacttgtcctttggttttgcagaacaggcctgctccctctcatctagcccatcatttcttggggcctgaaccccagtggtccaaagtattgcttgtgaaatttaaaaaatgtgaatatgatgtggggatgggcctcttctacattaccttggcccagggggatcagctggctgggaggattagtgagcacctctgtattttgaggtctgagtcttctggagctgtgtagttaatcttcggtttctgataacccctgggtccatctggccatcagcctcagcagtgagcaaagcaataccatactcatttctatgttcctgttccttcctctgctcctcctttggagaagcaataattcatgggggatgatacagtagcactttacaaatggctccatgtcattcatcccaggggccataatctcttgcaccacctattcttacttcctgttcagctcctttacagcttttattttcaactgcttcccaacttggtggggcctcctttaaggatgagccaatagtaagaatgtggctgtaatcagcagagacccctctgaggggtatctgttctgcagcccctagtgaaatcatgtgatgtgagacagaaacctaaacatggtacttgattctaaacctgtgccagtctatagcctctgcctccccaagcagagctcaagccaaacgcttctgtcctctttccttctgcattaaccctttgctgatcctcaggggccactcccccaacacccctgtacttgggtgagggatgttggacagagcctgttttcatgtactgcaggtgggggtgtgctgacatgtttgctcttggttgatggagaaggtacagaggccagggagtgaaaatggttgacagaagagggaagagttaggtgtctcatagtcactcatagtggggtggtcaggggtaatggcatctccccactttaggcttctcaaacagacttttgacacctctcaagttcagagctctgatgtggaaagacaggaggtgtggggaaggagggggatttcgtgtgtttgcatgagtgtgcgcttcaggccttgggagttggcaagagggagggaaggaaggagagcaaaatcttcggaaggtgtttcttgtacctgagggatcctgccctgaatctccatagtctccactgtgaactgaggaggggaggggtgtgctggggaataaatcttgtatgagaacaatctttaagag

SEQ ID NO: 26303 - protein, 121 aa, Homo sapiens
MGFHHVGQAGLKLLTANDQPASATQSVGITGVSHCAQRDFFFFLKQTCPLVLQNRPAPSHLAHHFLGPEPQWSKVLLVKFKKCEYDVGMGLFYITLAQGDQLAGRISEHLCILRSESSGAV

SEQ ID NO: 26304 - DNA, 4157 bp, Homo sapiens
gttattgtgacttgtcgggccacggccccggatgttgtggctgccgcggggagatggctgaggccgaaggggttcccacgaccccaggcccggcttcggggtcgactttcaggggccgccgagatgtgtcaggctcctgggagcgggaccagcaggttgaggcggcgcagcgggccctggtggaggtgctggggccttacgagcctctgctgagtcgggtgcaggcagccctggtgtgggagcggccagctaggagcgctctgtggtgcctggggctgaacgcggctttctggtgagagaactggaccctcggaaaccctccgagtcccgaattcgttggttcctctagggctctacttctcgcctgccctgttttcttcgctgcactggctccttcctgtacttgcctaattttgcctcacctccttccactccatcccgcctgcaggcttcggcaccctagttcttcccagggccgtccacccatcttctctgccttacctgtgcccgcacccccgccccgcacatctggcgggagcttctggtaacatcttgagccgctcaagagtgagcgagggctcctcttttgagcccgacaaagctgcgtccctttaaagccatcacttcctttctcttgtctgctcaagtgcaagttctagattgtttccagaggttttagtagtttattgttggagtagaggcgtgaagtcttgcaaaggttttttgccctgacatctcttcgtcttgtgtttttacttgcatttggcttgatgatcattgtgtgtattgatcaatggaagaacaaaatctggcctgaaataaaagctggggctttgtgcaccctcggttgctcagcgtgcccgagctctgccaccatgtagctgaagtctgggttagtgggaccattttcataaggaatgttttgcttttcaaaaagcaaaacccaggcaagttctgcttgctgagctgtgggatactgacctttttggctgtcttgggccgctacgtccctgggcttctgctgtcctacttgatgcttgtcactgtcatgatgtggccccttgctgtgtaccaccgactgtgggatcgagcatatgtgcggctgaagccagctctgcagcggctagacttcagtgtccgtggctacatgatgtccaagcagagagagagacaattacgccgcagagctctccacccagaacgagccatggacaaccacagtgacagcgaagaggagcttgctgccttctgtcctcagctggacgattctactgttgccagggaattggccatcacagactctgagcactcagacgctgaagtctcctgtacagacaatggcacattcaatctttcaaggggccaaacacctctaacggaaggctctgaagacctagatggtcacagtgatccagaggaatcctttgccagagaccttccagacttcccttccattaatatggatcctgctggcctggatgatgaggacgacactagcattggcatgcccagcttgatgtaccgttctccgccaggggctgaggagccccaggccccacctgccagccgggacgaggctgcgctgccggagctcctgcttggtgctcttcctgtaggatccaacctcaccagcaaccttgccagcctggtctcccagggtatgattcagctggccttgtcaggggcctcccaaccaggcccttctggagcacctgcccagagagcaacgagaggcttcctccggtcccccagttcagacctggacactgatgctgagggggatgactttgaacttctggaccagtcggagctgagtcagctggaccctgccagttctaggagccactgaggcagagactccttttgggagtcactgtggtttaggtttttttctccccatcccacttaaggtgatggggcaagggaagaactcagctcccctcccctgaattatatttgtatgctgggtggcctggctgatgctcagaggcctccttagagaggacactcactcccctcccaccagctggatgcccatttctgagctcagtcactgaagtgagagtgtgctcccccaagggaggcttctctccatcaggatggtactttgggggaacaaaatagtcagggatattggttcccctttgaggaggtgctgctgtttgcttttaggtatgagtgctcaggggccctcactgaaagagcccatgcctgccttcctcctttcatcgcctctctagagcccccaaagtcaggcagcagctggagtagttacattgtcatcatctttttttttgagacagtttcgctctgttgcccaggctggagtgcagtggtgtgatcttggctttctgcaacgtctgccttccaggttgaagaggttctcctgcctcagcctccttagtagtgggattacaggtgcccgctactatgcccggctaatttttcttttggtatttttagtagaaatggggtttcaccatgttggccaggctggtctcaaactcctgacctcaagtgagctgactgccttggcctcccagagtgctgggattagtcgtcatcttttgttaaaccaggatttgatttttttcttttcttttcttttcttttttttttttttgagacagagtctctctctgttgcccaggctggagtgcagtggcacaatctcggctcactgcagcctccgcctgccgggtcaagcgattctcctacctcagcctcctcagtagctgagattacaggcatgcaccaccatgcccggctaatttttttgtgtttttagtagagatggggtttcaccgtgctggccaggctggtctagaactcctgactgcaaatgatcagcccgcctcagccacccaaagtgttgggattacaggtgtgagccactgtgcccagcgtgatttttttttttttttaaagcaaacttgtcctttggttttgcagaacaggcctgctccctctcatctagcccatcatttcttggggcctgaaccccagtggtccaaagtattgcttgtgaaatttaaaaaatgtgaatatgatgtggggatgggcctcttctacattaccttggcccagggggatcagctggctgggaggattagtgagcacctctgtattttgaggtctgagtcttctggagctgtgtagttaatcttcggtttctgataacccctgggtccatctggccatcagcctcagcagtgagcaaagcaataccatactcatttctatgttcctgttccttcctctgctcctcctttggagaagcaataattcatgggggatgatacagtagcactttacaaatggctccatgtcattcatcccaggggccataatctcttgcaccacctattcttacttcctgttcagctcctttacagcttttattttcaactgcttcccaacttggtggggcctcctttaaggatgagccaatagtaagaatgtggctgtaatcagcagagacccctctgaggggtatctgttctgcagcccctagtgaaatcatgtgatgtgagacagaaacctaaacatggtacttgattctaaacctgtgccagtctatagcctctgcctccccaagcagagctcaagccaaacgcttctgtcctctttccttctgcattaaccctttgctgatcctcaggggccactcccccaacacccctgtacttgggtgagggatgttggacagagcctgttttcatgtactgcaggtgggggtgtgctgacatgtttgctcttggttgatggagaaggtacagaggccagggagtgaaaatggttgacagaagagggaagagttaggtgtctcatagtcactcatagtggggtggtcaggggtaatggcatctccccactttaggcttctcaaacagacttttgacacctctcaagttcagagctctgatgtggaaagacaggaggtgtggggaaggagggggatttcgtgtgtttgcatgagtgtgcgcttcaggccttgggagttggcaagagggagggaaggaaggagagcaaaatcttcggaaggtgtttcttgtacctgagggatcctgccctgaatctccatagtctccactgtgaactgaggaggggaggggtgtgctggggaataaatcttgtatgagaacaatctttaagag

SEQ ID NO: 26305 - protein, 271 aa, Homo sapiens
MLVTVMMWPLAVYHRLWDRAYVRLKPALQRLDFSVRGYMMSKQRERQLRRRALHPERAMDNHSDSEEELAAFCPQLDDSTVARELAITDSEHSDAEVSCTDNGTFNLSRGQTPLTEGSEDLDGHSDPEESFARDLPDFPSINMDPAGLDDEDDTSIGMPSLMYRSPPGAEEPQAPPASRDEAALPELLLGALPVGSNLTSNLASLVSQGMIQLALSGASQPGPSGAPAQRATRGFLRSPSSDLDTDAEGDDFELLDQSELSQLDPASSRSH

SEQ ID NO: 26306 - DNA, 3769 bp, Homo sapiens
agttgctgttattgtgacttgtcgggccacggccccggatgttgtggctgccgcggggagatggctgaggccgaaggggttcccacgaccccaggcccggcttcggggtcgactttcaggggccgccgagatgtgtcaggctcctgggagcgggaccagcaggttgaggcggcgcagcgggccctggtggaggtgctggggccttacgagcctctgctgagtcgggtgcaggcagccctggtgtgggagcggccagctaggagcgctctgtggtgcctggggctgaacgcggctttctggttttttgccctgacatctcttcgtcttgtgtttttacttgcatttggcttgatgatcattgtgtgtattgatcaatggaagaacaaaatctggcctgaaataaaagtgccaagacccgacgcattagacaatgagagctggggctttgtgcaccctcggttgctcagcgtgcccgagctctgccaccatgtagctgaagtctgggttagtgggaccattttcataaggaatgttttgcttttcaaaaagcaaaacccaggcaagttctgcttgctgagctgtgggatactgacctttttggctgtcttgggccgctacgtccctgggcttctgctgtcctacttgatgcttgtcactgtcatgatgtggccccttgctgtgtaccaccgactgtgggatcgagcatatgtgcggctgaagccagctctgcagcggctagacttcagtgtccgtggctacatgatgtccaagcagagagagagacaattacgccgcagagctctccacccagaacgagccatggacaaccacagtgacagcgaagaggagcttgctgccttctgtcctcagctggacgattctactgttgccagggaattggccatcacagactctgagcactcagacgctgaagtctcctgtacagacaatggcacattcaatctttcaaggggccaaacacctctaacggaaggctctgaagacctagatggtcacagtgatccagaggaatcctttgccagagaccttccagacttcccttccattaatatggatcctgctggcctggatgatgaggacgacactagcattggcatgcccagcttgatgtaccgttctccgccaggggctgaggagccccaggccccacctgccagccgggacgaggctgcgctgccggagctcctgcttggtgctcttcctgtaggatccaacctcaccagcaaccttgccagcctggtctcccagggtatgattcagctggccttgtcaggggcctcccaaccaggcccttctggagcacctgcccagagagcaacgagaggcttcctccggtcccccagttcagacctggacactgatgctgagggggatgactttgaacttctggaccagtcggagctgagtcagctggaccctgccagttctaggagccactgaggcagagactccttttgggagtcactgtggtttaggtttttttctccccatcccacttaaggtgatggggcaagggaagaactcagctcccctcccctgaattatatttgtatgctgggtggcctggctgatgctcagaggcctccttagagaggacactcactcccctcccaccagctggatgcccatttctgagctcagtcactgaagtgagagtgtgctcccccaagggaggcttctctccatcaggatggtactttgggggaacaaaatagtcagggatattggttcccctttgaggaggtgctgctgtttgcttttaggtatgagtgctcaggggccctcactgaaagagcccatgcctgccttcctcctttcatcgcctctctagagcccccaaagtcaggcagcagctggagtagttacattgtcatcatctttttttttgagacagtttcgctctgttgcccaggctggagtgcagtggtgtgatcttggctttctgcaacgtctgccttccaggttgaagaggttctcctgcctcagcctccttagtagtgggattacaggtgcccgctactatgcccggctaatttttcttttggtatttttagtagaaatggggtttcaccatgttggccaggctggtctcaaactcctgacctcaagtgagctgactgccttggcctcccagagtgctgggattagtcgtcatcttttgttaaaccaggatttgatttttttcttttcttttcttttcttttttttttttttgagacagagtctctctctgttgcccaggctggagtgcagtggcacaatctcggctcactgcagcctccgcctgccgggtcaagcgattctcctacctcagcctcctcagtagctgagattacaggcatgcaccaccatgcccggctaatttttttgtgtttttagtagagatggggtttcaccgtgctggccaggctggtctagaactcctgactgcaaatgatcagcccgcctcagccacccaaagtgttgggattacaggtgtgagccactgtgcccagcgtgatttttttttttttttaaagcaaacttgtcctttggttttgcagaacaggcctgctccctctcatctagcccatcatttcttggggcctgaaccccagtggtccaaagtattgcttgtgaaatttaaaaaatgtgaatatgatgtggggatgggcctcttctacattaccttggcccagggggatcagctggctgggaggattagtgagcacctctgtattttgaggtctgagtcttctggagctgtgtagttaatcttcggtttctgataacccctgggtccatctggccatcagcctcagcagtgagcaaagcaataccatactcatttctatgttcctgttccttcctctgctcctcctttggagaagcaataattcatgggggatgatacagtagcactttacaaatggctccatgtcattcatcccaggggccataatctcttgcaccacctattcttacttcctgttcagctcctttacagcttttattttcaactgcttcccaacttggtggggcctcctttaaggatgagccaatagtaagaatgtggctgtaatcagcagagacccctctgaggggtatctgttctgcagcccctagtgaaatcatgtgatgtgagacagaaacctaaacatggtacttgattctaaacctgtgccagtctatagcctctgcctccccaagcagagctcaagccaaacgcttctgtcctctttccttctgcattaaccctttgctgatcctcaggggccactcccccaacacccctgtacttgggtgagggatgttggacagagcctgttttcatgtactgcaggtgggggtgtgctgacatgtttgctcttggttgatggagaaggtacagaggccagggagtgaaaatggttgacagaagagggaagagttaggtgtctcatagtcactcatagtggggtggtcaggggtaatggcatctccccactttaggcttctcaaacagacttttgacacctctcaagttcagagctctgatgtggaaagacaggaggtgtggggaaggagggggatttcgtgtgtttgcatgagtgtgcgcttcaggccttgggagttggcaagagggagggaaggaaggagagcaaaatcttcggaaggtgtttcttgtacctgagggatcctgccctgaatctccatagtctccactgtgaactgaggaggggaggggtgtgctggggaataaatcttgtatgagaacaatctttaagag

SEQ ID NO: 26307 - protein, 466 aa, Homo sapiens; identical to SEQ ID NO: 3501

SEQ ID NO: 26308 - DNA, 1597 bp, Homo sapiens
ctcagcctccttagtagtgggattacaggtgcccgctactatgcccggctaatttttcttttggtatttttagtagaaatggggtttcaccatgttggccaggctggtctcaaactcctgacctcaagtgagctgactgccttggcctcccagagtgctgggattagtcgtcatcttttgttaaaccaggatttgatttttttcttttcttttcttttcttttttttttttttgagacagagtctctctctgttgcccaggctggagtgcagtggcacaatctcggctcactgcagcctccgcctgccgggtcaagcgattctcctacctcagcctcctcagtagctgagattacaggcatgcaccaccatgcccggctaatttttttgtgtttttagtagagatggggtttcaccgtgctggccaggctggtctagaactcctgactgcaaatgatcagcccgcctcagccacccaaagtgttgggattacaggtgtgagccactgtgcccagcgtgatttttttttttttttaaagcaaacttgtcctttggttttgcagaacaggcctgctccctctcatctagcccatcatttcttggggcctgaaccccagtggtccaaagtattgcttgtgaaatttaaaaaatgtgaatatgatgtggggatgggcctcttctacattaccttggcccagggggatcagctggctgggaggattagtgagcacctctgtattttgaggtctgagtcttctggagctgtgtagttaatcttcggtttctgataacccctgggtccatctggccatcagcctcagcagtgagcaaagcaataccatactcatttctatgttcctgttccttcctctgctcctcctttggagaagcaataattcatgggggatgatacagtagcactttacaaatggctccatgtcattcatcccaggggccataatctcttgcaccacctattcttacttcctgttcagctcctttacagcttttattttcaactgcttcccaacttggtggggcctcctttaaggatgagccaatagtaagaatgtggctgtaatcagcagagacccctctgaggggtatctgttctgcagcccctagtgaaatcatgtgatgtgagacagaaacctaaacatggtacttgattctaaacctgtgccagtctatagcctctgcctccccaagcagagctcaagccaaacgcttctgtcctctttccttctgcattaaccctttgctgatcctcaggggccactcccccaacacccctgtacttgggtgagggatgttggacagagcctgttttcatgtactgcaggtgggggtgtgctgacatgtttgctcttggttgatggagaaggtacagaggccagggagtgaaaatggttgacagaagagggaagagttaggtgtctcatagtcactcatagtggggtggtcaggggtaatggcatctccccactttaggcttctcaaacagacttttgacacctctcaagttcagagctctgatgtggaaagacaggaggtgtggggaaggagggtgtgctggggaataaatcttgtatgagaac

SEQ ID NO: 26309 - protein, 40 aa, Homo sapiens
MASPHFRLLKQTFDTSQVQSSDVERQEVWGRRVCWGINLV

SEQ ID NO: 26310 - DNA, 1844 bp, Homo sapiens
caagcaggcgcccacccagaggggagggaggacgccgtaccccgccctcactgaggcgcggagccggatccggaggcgccgagccgcatccggagccgcgcacgcgcaatctgcatgaacgaaggccagtgcttaaagacgtgccattcattgccagaactcgattctcattggagcggaggaagttcgtgggtggagctggttgtttggcgcctgcgtcttgcggcgagcgggctggcgtgcggcgccgttgcgggcgggagcggctgcaacgccggtgcctgaggagcgatgccgagggaaatcatcaccctacagttgggccagtgcggcaatcagattgggttcgagttctggaaacagctgtgcgccgagcatggtatcagccccgagggcatcgtggaggagttcgccaccgagggcactgaccgcaaggacgtctttttctaccaggcagacgatgagcactacatcccccgggccgtgctgctggacttggaaccccgggtgatccactccatcctcaactccccctatgccaagctctacaacccagagaacatctacctgtcggaacatggaggaggagctggcaacaactgggccagcggattctcccagggagaaaagatccatgaggacatttttgacatcatagaccgggaggcagatggtagtgacagtctagagggctttgtgctgtgtcactccattgctggggggacaggctctggactgggttcctacctcttagaacggctgaatgacaggtatcctaagaagctggtgcagacatactcagtgtttcccaaccaggacgagatgagcgatgtggtggtccagccttacaattcactcctcacactcaagaggctgacgcagaatgcagactgtgtggtggtgctggacaacacagccctgaaccggattgccacagaccgcctgcacatccagaacccatccttctcccagatcaaccagctggtgtctaccatcatgtcagccagcaccaccaccctgcgctaccctggctacatgaacaatgacctcatcggcctcatcgcctcgctcattcccaccccacggctccacttcctcatgaccggctacacccctctcactacggaccagtcagtggccagcgtgaggaagaccacggtcctggatgtcatgaggcggctgctgcagcccaagaacgtgatggtgtccacaggccgagaccgccagaccaaccactgctacatcgccatcctcaacatcatccagggagaggtggaccccacccaggtccacaagagcttgcagaggatccgggaacgcaagttggccaacttcatcccgtggggccccgccagcatccaggtggccctgtcgaggaagtctccctacctgccctcggcccaccgggtcagcgggctcatgatggccaaccacaccagcatctcctcgctcttcgagagaacctgtcgccagtatgacaagctgcgtaagcgggaggccttcctggagcagttccgcaaggaggacatgttcaaggacaactttgatgagatggacacatccagggagattgtgcagcagctcatcgatgagtaccatgcggccacacggccagactacatctcctggggcacccaggagcagtgagtcccccaggacagggaccctcatctgccttactggttggcccaagccctgcctgactgaccaccccctcagagcacagatcagggacctcacgcatctctttctcatatacatggactctctgttggcctgcaaacacatttacttctcctcttatgagactatttatctttaataaagcactggatataaatcaa

SEQ ID NO: 26311 - protein, 451 aa, Homo sapiens; identical to SEQ ID NO: 3503

SEQ ID NO: 26312 - DNA, 1756 bp, Homo sapiens
cagaggggagggaggacgccgtaccccgccctcactgaggcgcggagccggatccggaggcgccgagccgcatccggagccgcgcacgcgcaatctgcatgaacgaaggccagtgcttaaagacgtgccattcattgccagaactcgattctcattggagcggaggaagttcgtgggtggagctggttgtttggcgcctgcgtcttgcggcgagcgggctggcgtgcggcgccgttgcgggcgggagcggctgcaacgccggtgcctgaggagcgatgccgagggaaatcatcaccctacagttgggccagtgcggcaatcagattgggttcgagttctggaaacagctgtgcgccgagcatggtatcagccccgagggcatcgtggaggagttcgccaccgagggcactgaccgcaaggacgtctttttctaccaggcagacgatgagcactacatcccccgggccgtgctgctggacttggaaccccgggtgatccactccatcctcaactccccctatgccaagctctacaacccagagaacatctacctgtcggaacatggaggaggagctggcaacaactgggccagcggattctcccagggagaaaagatccatgaggacatttttgacatcatagaccgggaggcagatggtagtgacagtctagaggtatcctaagaagctggtgcagacatactcagtgtttcccaaccaggacgagatgagcgatgtggtggtccagccttacaattcactcctcacactcaagaggctgacgcagaatgcagactgtgtggtggtgctggacaacacagccctgaaccggattgccacagaccgcctgcacatccagaacccatccttctcccagatcaaccagctggtgtctaccatcatgtcagccagcaccaccaccctgcgctaccctggctacatgaacaatgacctcatcggcctcatcgcctcgctcattcccaccccacggctccacttcctcatgaccggctacacccctctcactacggaccagtcagtggccagcgtgaggaagaccacggtcctggatgtcatgaggcggctgctgcagcccaagaacgtgatggtgtccacaggccgagaccgccagaccaaccactgctacatcgccatcctcaacatcatccagggagaggtggaccccacccaggtccacaagagcctgcagaggatccgggaacggaagttggccaacttcatcccgtggggccccgccagcatccaggtggccctgtcgaggaagtctccctacctgccctcggcccaccgggtcagcgggctcatgatggccaaccacaccagcatctcctcgctctttgaaagttcctgccagcagtttgacaagctgcggaagcgggatgccttcctcgagcagttccgtaaggaggacatgttcaaggacaactttgatgagatggacaggtctagggaggttgttcaggagctcattgatgagtaccatgcggccacccagccagactacatttcctggggcacccaggagcagtgatttccctccccactactccttctccttctagatggtaaccacagcctcgaccatgcctgctccctctgacccagcttcacctcatggacaacccttcttggttcatctccagcccgtgagctggtcctgcttcctcccttccatgccctaacttttaatatgcttgttcagctctaataaagtaataaagcttggttgtcagtat

SEQ ID NO: 26313 - protein, 274 aa, Homo sapiens
MSDVVVQPYNSLLTLKRLTQNADCVVVLDNTALNRIATDRLHIQNPSFSQINQLVSTIMSASTTTLRYPGYMNNDLIGLIASLIPTPRLHFLMTGYTPLTTDQSVASVRKTTVLDVMRRLLQPKNVMVSTGRDRQTNHCYIAILNIIQGEVDPTQVHKSLQRIRERKLANFIPWGPASIQVALSRKSPYLPSAHRVSGLMMANHTSISSLFESSCQQFDKLRKRDAFLEQFRKEDMFKDNFDEMDRSREVVQELIDEYHAATQPDYISWGTQEQ

SEQ ID NO: 26314 - DNA, 1878 bp, Homo sapiens
cagaggggagggaggacgccgtaccccgccctcactgaggcgcggagccggatccggaggcgccgagccgcatccggagccgcgcacgcgcaatctgcatgaacgaaggccagtgcttaaagacgtgccattcattgccagaactcgattctcattggagcggaggaagttcgtgggtggagctggttgtttggcgcctgcgtcttgcggcgagcgggctggcgtgcggcgccgttgcgggcgggagcggctgcaacgccggtgcctgaggagcgatgccgagggaaatcatcaccctacagttgggccagtgcggcaatcagattgggttcgagttctggaaacagctgtgcgccgagcatggtatcagccccgagggcatcgtggaggagttcgccaccgagggcactgaccgcaaggacgtctttttctaccaggcagacgatgagcactacatcccccgggccgtgctgctggacttggaaccccgggtgatccactccatcctcaactccccctatgccaagctctacaacccagagaacatctacctgtcggaacatggaggaggagctggcaacaactgggccagcggattctcccagggagaaaagatccatgaggacatttttgacatcatagaccgggaggcagatggtagtgacagtctagaggtatcctaagaagctggtgcagacatactcagtgtttcccaaccaggacgagatgagcgatgtggtggtccagccttacaattcactcctcacactcaagaggctgacgcagaatgcagactgtgtggtggtgctggacaacacagccctgaaccggattgccacagaccgcctgcacatccagaacccatccttctcccagatcaaccagctggtgtctaccatcatgtcagccagcaccaccaccctgcgctaccctggctacatgaacaatgacctcatcggcctcatcgcctcgctcattcccaccccacggctccacttcctcatgaccggctacacccctctcactacggaccagtcagtggccagcgtgaggaagaccacggtcctggatgtcatgaggcggctgctgcagcccaagaacgtgatggtgtccacaggccgagaccgccagaccaaccactgctacatcgccatcctcaacatcatccagggagaggtggaccccacccaggtccacaagagcctgcagaggatccgggaacggaagttggccaacttcatcccgtggggccccgccagcatccaggtggccctgtcgaggaagtctccctacctgccctcggcccaccgggtcagcgggctcatgatggccaaccacaccagcatctcctcgctctttgaaagttcctgccagcagtttgacaagctgcggaagcgggatgccttcctcgagcagttccgtaaggaggacatgttcaaggacaactttgatgagatggacaggtctagggaggttgttcaggagctcattgatgagtaccatgcggccacccagccagactacatttcctggggcacccaggagcagtgatttccctccccactactccttctccttctagatggtaaccacagcctcgaccatgcctgctccctctgacccagcttcacctcatggacaacccttcttggttcatctccagcccgtgagctggtcctgcttcctcccttccatgccctaacttttaatatgcttgttcagctctaataaagtaataaagcttggttgtcagtatagccagggcttgatctgtgaatacgggggggtggtgaaggggtccagtttctaggcatctgacagtagggtggccttcacctcctccaacgtcttatcacttagtccaaatcttagtgtgtt

SEQ ID NO: 26315 - protein, 274 aa, Homo sapiens; identical to SEQ ID NO: 26313

SEQ ID NO: 26316 - DNA, 1090 bp, Homo sapiens
tgcggcgccgttgcgggcgggagcggctgcaacgccggtgcctgaggagcgatgccgagggaaatcatcaccctacagttgggccagtgcggcaatcagattgggttcgagttctggaaacagctgtgcgccgagcatggtatcagccccgagggcatcgtggaggagttcgccaccgagggcactgaccgcaaggacgtctttttctaccaggcagacgatgagcactacatcccccgggccgtgctgctggacaacacagccctgaaccggattgctacatgaacaatgacctcatcggcctcatcgcctcgctcattcccaccccacggctccacttcctcatgaccggctacacccctctcactacggaccagtcagtggccagcgtgaggaagaccacggtcctggatgtcatgaggcggctgctgcagcccaagaacgtgatggtgtccacaggccgagaccgccagaccaaccactgctacatcgccatcctcaacatcatccagggagaggtggaccccacccaggtccacaagagcttgcagaggatccgggaacgcaagttggccaacttcatcccgtggggccccgccagcatccaggtggccctgtcgaggaagtctccctacctgccctcggcccaccgggtcagcgggctcatgatggccaaccacaccagcatctcctcgctcttcgagagaacctgtcgccagtatgacaagctgcgtaagcgggaggccttcctggagcagttccgcaaggaggacatgttcaaggacaactttgatgagatggacacatccagggagattgtgcagcagctcatcgatgagtaccatgcggccacacggccagactacatctcctggggcacccaggagcagtgagtcccccaggacagggaccctcatctgccttactggttggcccaagccctgcctgactgaccaccccctcagagcacagatcagggacctcacgcatctctttctcatatacatggactctctgttggcctgcaaacacatttacttctcctcttatgagactatttatctttaataaagcactggatataaatcaa

SEQ ID NO: 26317 - protein, 203 aa, Homo sapiens
MNNDLIGLIASLIPTPRLHFLMTGYTPLTTDQSVASVRKTTVLDVMRRLLQPKNVMVSTGRDRQTNHCYIAILNIIQGEVDPTQVHKSLQRIRERKLANFIPWGPASIQVALSRKSPYLPSAHRVSGLMMANHTSISSLFERTCRQYDKLRKREAFLEQFRKEDMFKDNFDEMDTSREIVQQLIDEYHAATRPDYISWGTQEQ

SEQ ID NO: 26318 - DNA, 361 bp, Homo sapiens
tacatgaacaatgacctcatcggcctcatcgcctcgctcattcccaccccacggctccacttcctcatgaccggctacacccctctcactacggaccagtcagtggccagcgtgaggaagaccacggtcctggatgtcatgaggcggctgctgcagcccaagaacgtgatggtgtccacaggccgagaccgccagaccaaccactgctacatcgccatcctcaacatcatccagggagaggtggaccccacccaggtaggggaggccccttcatcccacaccctggacctgcaggggtagaggagaggccacctccactgctcctatgcccaccccaggtccacaagagcttgcagaggat

SEQ ID NO: 26319 - protein, 98 aa, Homo sapiens
MNNDLIGLIASLIPTPRLHFLMTGYTPLTTDQSVASVRKTTVLDVMRRLLQPKNVMVSTGRDRQTNHCYIAILNIIQGEVDPTQVGEAPSSHTLDLQG

SEQ ID NO: 26320 - DNA, 419 bp, Homo sapiens
ggccaacacaccagcatctcctcgctcttcgagagaacctgtcgccagtatgacaagctgcgtaagcgggaggccttcctggagcagttccgcaaggaggacatgttcaaggacaactttgatgagatggacacatccagggagattgtgcagcagctcatcgatgagtaccatgcggccacacggccagactacatctcctggggcacccaggagcagtgagtcccccaggacagggaccctcatctgccttactggttggcccaagccctgcctgactgaccaccccctcagagcacagatcagggacctcacgcatctctttctcatatacatggactctctgttggcctgcaaacacatttacttctcctcttatgagactatttatctttaataaagcactggatataaatcaa

SEQ ID NO: 26321 - protein, 115 aa, Homo sapiens
MTSCVSGRPSWSSSARRTCSRTTLMRWTHPGRLCSSSSMSTMRPHGQTTSPGAPRSSESPRTGTLICLTGWPKPCLTDHPLRAQIRDLTHLFLIYMDSLLACKHIYFSSYETIYL

SEQ ID NO: 26322 - DNA, 1515 bp, Homo sapiens
gcgcctgtgcggaattccagctgcgactgctgagggagaaaatgatgcccaggttgggctccccggcccaccggccgaggagaggcctgcgctgcacacgcgcagaccgagcatccgcgtcaagaggcgaagagagcgcgcgctccccacgtcctgcgctcctggctgccgggcattcgtctcagccgtgactctcgccaggccggggctggcgcgcccacgtctgaagagcgatgccccgggagatcatcaccctgcagctgggccagtgcggcaaccagattgggttcgagttctggaaacagctgtgcgccgagcatggtatcagccccgagggcatcgtggaggaattcgccaccgagggcactgaccgcaaggacgtctttttctaccaggcagacgatgagcactacatcccccgggccgtgctgctggacttggaaccccgggtgatccactccatcctcaactccccctatgccaagctctacaacccagagaacatctacctgtcggaacatggaggaggagctggcaacaactgggccagcggattctcccagggtgagaaaattcatgaagacatctttgacatcatagaccgagaagcagatggaagtgacagtttggaggtgaagttatggagtgggggaaggaatgggcagggaggccgaagagtgctggggacaggtcaggaggtggcctggataggtaatatgaggggagcaattcaattcaaaacccgtttatggagcatcagatgtgggatattgaggtgaataagatataatctttgttctcaaggaagtcataaatctgaatggcaccggccccttaggcatgagtcattcagctgcttctccagctccaaaccttcccaaggagcctcagcctggatgcataagaggaagctttgagacattggcgttttgggaatggagaatgaaccaagccgaagtctctcccccagatccttggagactgcctctccatctctccccatgctgggtgcgatatgttcctggcttacagctcttataacccatgtaatttcctaagggactagagcaataatagtatgttttgttaaaatatttgaccttttgtccttggtttctgaaacagctccagaacagctccagagtgataaaggtgaaagacagtcttttgttatttataacaagcccgtttcttttagtttaatctttcattttattttaattagttaattttactaaccactgtactaaggaggaacaagtgcctttcaaccaaacctgagcttatgttaaagaggcgatttttggaaagtcccagatagccactggatggggggctggttgccaggggaacaaacctggtgctctgagggttggaatttacaggcccacccctcacctctggggaagggagaggggatgaagattgagtagagcaccaattgccaatgatttaatcggtcatgcctgtgtaatgaagcctccataaaaatccaaaaggactgagtttgggggc

SEQ ID NO: 26323 - protein, 181 aa, Homo sapiens [sequence omitted]

SEQ ID NO: 26324 - DNA, 1794 bp, Homo sapiens
gcgcctgtgcggaattccagctgcgactgctgagggagaaaatgatgcccaggttgggctccccggcccaccggccgaggagaggcctgcgctgcacacgcgcagaccgagcatccgcgtcaagaggcgaagagagcgcgcgctccccacgtcctgcgctcctggctgccgggcattcgtctcagccgtgactctcgccaggccggggctggcgcgcccacgtctgaagagcgatgccccgggagatcatcaccctgcagctgggccagtgcggcaaccagattgggttcgagttctggaaacagctgtgcgccgagcatggtatcagccccgagggcatcgtggaggaattcgccaccgagggcactgaccgcaaggacgtctttttctaccaggcagacgatgagcactacatcccccgggccgtgctgctggacttggaaccccgggtgatccactccatcctcaactccccctatgccaagctctacaacccagagaacatctacctgtcggaacatggaggaggagctggcaacaactgggccagcggattctcccagggtgagaaaattcatgaagacatctttgacatcatagaccgagaagcagatggaagtgacagtttggagggcttcgtgctgtgtcactccatcgctgggggtacgggttctggcctgggctcctacctcctggagcgactgaatgacaggtaccccaagaagctagtgcagacttattcagtgtttccctaccaggacgagatgagcgacgtagtggttcagccctacaattcactcctgacactcaagaggctgacgcagaacgcagattgtgtggtggtgctggacaacacagccctgaaccggattgccacagaccgcctgcacatccagaacccgtccttctcccagatcaaccagctggtgtccaccatcatgtcggccagcaccaccaccctgcgctaccccggctacatgaacaatgacctcatcggcctcatcgcctcgctcattcccaccccacggctccacttcctcatgaccggctacaccccgctcactacagaccagtcagtggccagcgtgaggaagaccacggtcctggatgtcatgaggcggctgctgcagcccaagaacgtgatggtgtccacaggccgagaccgccagaccaaccactgctacatcgccatcctcaacatcatccagggagaggtggaccccacccaggtccacaagagcctgcagaggatccgggaacggaagttggccaacttcatcccgtggggccccgccagcatccaggtggccctgtcgaggaagtctccctacctgccctcggcccaccgggtcagcgggctcatgatggccaaccacaccagcatctcctcgctctttgaaagttcctgccagcagtttgacaagctgcggaagcgggatgccttcctcgagcagttccgtaaggaggacatgttcaaggacaactttgatgagatggacaggtctagggaggttgttcaggagctcattgatgagtaccatgcggccacccagccagactacatttcctggggcacccaggagcagtgatttccctccccactactccttctccttctagatggtaaccacagcctcgaccatgcctgctccctctgacccagcttcacctcatggacaacccttcttggttcatctccagcccgtgagctggtcctgcttcctcccttccatgccctaacttttaatatgcttgttcagctctaataaagtaataaagcttggttgtcagtat

SEQ ID NO: 26325 - protein, 451 aa, Homo sapiens; identical to SEQ ID NO: 3507

SEQ ID NO: 26326 - DNA, 1916 bp, Homo sapiens
gcgcctgtgcggaattccagctgcgactgctgagggagaaaatgatgcccaggttgggctccccggcccaccggccgaggagaggcctgcgctgcacacgcgcagaccgagcatccgcgtcaagaggcgaagagagcgcgcgctccccacgtcctgcgctcctggctgccgggcattcgtctcagccgtgactctcgccaggccggggctggcgcgcccacgtctgaagagcgatgccccgggagatcatcaccctgcagctgggccagtgcggcaaccagattgggttcgagttctggaaacagctgtgcgccgagcatggtatcagccccgagggcatcgtggaggaattcgccaccgagggcactgaccgcaaggacgtctttttctaccaggcagacgatgagcactacatcccccgggccgtgctgctggacttggaaccccgggtgatccactccatcctcaactccccctatgccaagctctacaacccagagaacatctacctgtcggaacatggaggaggagctggcaacaactgggccagcggattctcccagggtgagaaaattcatgaagacatctttgacatcatagaccgagaagcagatggaagtgacagtttggagggcttcgtgctgtgtcactccatcgctgggggtacgggttctggcctgggctcctacctcctggagcgactgaatgacaggtaccccaagaagctagtgcagacttattcagtgtttccctaccaggacgagatgagcgacgtagtggttcagccctacaattcactcctgacactcaagaggctgacgcagaacgcagattgtgtggtggtgctggacaacacagccctgaaccggattgccacagaccgcctgcacatccagaacccgtccttctcccagatcaaccagctggtgtccaccatcatgtcggccagcaccaccaccctgcgctaccccggctacatgaacaatgacctcatcggcctcatcgcctcgctcattcccaccccacggctccacttcctcatgaccggctacaccccgctcactacagaccagtcagtggccagcgtgaggaagaccacggtcctggatgtcatgaggcggctgctgcagcccaagaacgtgatggtgtccacaggccgagaccgccagaccaaccactgctacatcgccatcctcaacatcatccagggagaggtggaccccacccaggtccacaagagcctgcagaggatccgggaacggaagttggccaacttcatcccgtggggccccgccagcatccaggtggccctgtcgaggaagtctccctacctgccctcggcccaccgggtcagcgggctcatgatggccaaccacaccagcatctcctcgctctttgaaagttcctgccagcagtttgacaagctgcggaagcgggatgccttcctcgagcagttccgtaaggaggacatgttcaaggacaactttgatgagatggacaggtctagggaggttgttcaggagctcattgatgagtaccatgcggccacccagccagactacatttcctggggcacccaggagcagtgatttccctccccactactccttctccttctagatggtaaccacagcctcgaccatgcctgctccctctgacccagcttcacctcatggacaacccttcttggttcatctccagcccgtgagctggtcctgcttcctcccttccatgccctaacttttaatatgcttgttcagctctaataaagtaataaagcttggttgtcagtatagccagggcttgatctgtgaatacgggggggtggtgaaggggtccagtttctaggcatctgacagtagggtggccttcacctcctccaacgtcttatcacttagtccaaatcttagtgtgtt

SEQ ID NO: 26327 - protein, 451 aa, Homo sapiens; identical to SEQ ID NO: 3507

SEQ ID NO: 26328 - DNA, 1960 bp, Homo sapiens
gagaaaatgatgcccaggttgggctccccggcccaccggccgaggagaggcctgcgctgcacacgcgcagaccgagcatccgcgtcaagaggcgaagagagcgcgcgctccccacgtcctgcgctcctggctgccgggcattcgtctcagccgtgactctcgccaggccggggctggcgcgcccacgtctgaagagcgatgccccgggagatcatcaccctgcagctgggccagtgcggcaaccagagtgagcaagcgagcgccggccccgccggtctctggttctgccccttcgggtcccacccaagtgcctggcttccaccagtccccctttcccttccatgaaccccctgccctgctgctctggataacccagaccgagagctgcgcctccagcccggggctggggcagctaccaaacccaggcatcttgggtccaccctctgatcgtgtcagcctctgagactaaaactgggctcctcaggccttaaggctccagcagacccgggcatctcccccctcccccagttgggttcgagttctggaaacagctgtgcgccgagcatggtatcagccccgagggcatcgtggaggaattcgccaccgagggcactgaccgcaaggacgtctttttctaccaggcagacgatgagcactacatcccccgggccgtgctgctggacttggaaccccgggtgatccactccatcctcaactccccctatgccaagctctacaacccagagaacatctacctgtcggaacatggaggaggagctggcaacaactgggccagcggattctcccagggtgagaaaattcatgaagacatctttgacatcatagaccgagaagcagatggaagtgacagtttggaggtaccccaagaagctagtgcagacttattcagtgtttccctaccaggacgagatgagcgacgtagtggttcagccctacaattcactcctgacactcaagaggctgacgcagaacgcagattgtgtggtggtgctggacaacacagccctgaaccggattgccacagaccgcctgcacatccagaacccgtccttctcccagatcaaccagctggtgtccaccatcatgtcggccagcaccaccaccctgcgctaccccggctacatgaacaatgacctcatcggcctcatcgcctcgctcattcccaccccacggctccacttcctcatgaccggctacaccccgctcactacagaccagtcagtggccagcgtgaggaagaccacggtcctggatgtcatgaggcggctgctgcagcccaagaacgtgatggtgtccacaggccgagaccgccagaccaaccactgctacatcgccatcctcaacatcatccagggagaggtggaccccacccaggtccacaagagcctgcagaggatccgggaacggaagttggccaacttcatcccgtggggccccgccagcatccaggtggccctgtcgaggaagtctccctacctgccctcggcccaccgggtcagcgggctcatgatggccaaccacaccagcatctcctcgctctttgaaagttcctgccagcagtttgacaagctgcggaagcgggatgccttcctcgagcagttccgtaaggaggacatgttcaaggacaactttgatgagatggacaggtctagggaggttgttcaggagctcattgatgagtaccatgcggccacccagccagactacatttcctggggcacccaggagcagtgatttccctccccactactccttctccttctagatggtaaccacagcctcgaccatgcctgctccctctgacccagcttcacctcatggacaacccttcttggttcatctccagcccgtgagctggtcctgcttcctcccttccatgccctaacttttaatatgcttgttcagctctaataaagtaataaagcttggttgtcagtat

SEQ ID NO: 26329 - protein, 298 aa, Homo sapiens
MEVTVWRYPKKLVQTYSVFPYQDEMSDVVVQPYNSLLTLKRLTQNADCVVVLDNTALNRIATDRLHIQNPSFSQINQLVSTIMSASTTTLRYPGYMNNDLIGLIASLIPTPRLHFLMTGYTPLTTDQSVASVRKTTVLDVMRRLLQPKNVMVSTGRDRQTNHCYIAILNIIQGEVDPTQVHKSLQRIRERKLANFIPWGPASIQVALSRKSPYLPSAHRVSGLMMANHTSISSLFESSCQQFDKLRKRDAFLEQFRKEDMFKDNFDEMDRSREVVQELIDEYHAATQPDYISWGTQEQ

SEQ ID NO: 26330 - DNA, 2082 bp, Homo sapiens
gagaaaatgatgcccaggttgggctccccggcccaccggccgaggagaggcctgcgctgcacacgcgcagaccgagcatccgcgtcaagaggcgaagagagcgcgcgctccccacgtcctgcgctcctggctgccgggcattcgtctcagccgtgactctcgccaggccggggctggcgcgcccacgtctgaagagcgatgccccgggagatcatcaccctgcagctgggccagtgcggcaaccagagtgagcaagcgagcgccggccccgccggtctctggttctgccccttcgggtcccacccaagtgcctggcttccaccagtccccctttcccttccatgaaccccctgccctgctgctctggataacccagaccgagagctgcgcctccagcccggggctggggcagctaccaaacccaggcatcttgggtccaccctctgatcgtgtcagcctctgagactaaaactgggctcctcaggccttaaggctccagcagacccgggcatctcccccctcccccagttgggttcgagttctggaaacagctgtgcgccgagcatggtatcagccccgagggcatcgtggaggaattcgccaccgagggcactgaccgcaaggacgtctttttctaccaggcagacgatgagcactacatcccccgggccgtgctgctggacttggaaccccgggtgatccactccatcctcaactccccctatgccaagctctacaacccagagaacatctacctgtcggaacatggaggaggagctggcaacaactgggccagcggattctcccagggtgagaaaattcatgaagacatctttgacatcatagaccgagaagcagatggaagtgacagtttggaggtaccccaagaagctagtgcagacttattcagtgtttccctaccaggacgagatgagcgacgtagtggttcagccctacaattcactcctgacactcaagaggctgacgcagaacgcagattgtgtggtggtgctggacaacacagccctgaaccggattgccacagaccgcctgcacatccagaacccgtccttctcccagatcaaccagctggtgtccaccatcatgtcggccagcaccaccaccctgcgctaccccggctacatgaacaatgacctcatcggcctcatcgcctcgctcattcccaccccacggctccacttcctcatgaccggctacaccccgctcactacagaccagtcagtggccagcgtgaggaagaccacggtcctggatgtcatgaggcggctgctgcagcccaagaacgtgatggtgtccacaggccgagaccgccagaccaaccactgctacatcgccatcctcaacatcatccagggagaggtggaccccacccaggtccacaagagcctgcagaggatccgggaacggaagttggccaacttcatcccgtggggccccgccagcatccaggtggccctgtcgaggaagtctccctacctgccctcggcccaccgggtcagcgggctcatgatggccaaccacaccagcatctcctcgctctttgaaagttcctgccagcagtttgacaagctgcggaagcgggatgccttcctcgagcagttccgtaaggaggacatgttcaaggacaactttgatgagatggacaggtctagggaggttgttcaggagctcattgatgagtaccatgcggccacccagccagactacatttcctggggcacccaggagcagtgatttccctccccactactccttctccttctagatggtaaccacagcctcgaccatgcctgctccctctgacccagcttcacctcatggacaacccttcttggttcatctccagcccgtgagctggtcctgcttcctcccttccatgccctaacttttaatatgcttgttcagctctaataaagtaataaagcttggttgtcagtatagccagggcttgatctgtgaatacgggggggtggtgaaggggtccagtttctaggcatctgacagtagggtggccttcacctcctccaacgtcttatcacttagtccaaatcttagtgtgtt

SEQ ID NO: 26331 - protein, 298 aa, Homo sapiens; identical to SEQ ID NO: 26329

SEQ ID NO: 26332 - DNA, 383 bp, Homo sapiens
ccccaggtgtccaccatcatgtcggccagcaccaccaccctgcgctaccccggctacatgaacaatgacctcatcggcctcatcgcctcgctcattcccaccccacggctccacttcctcatgaccggctacaccccgccagccagactacatttcctggggcacccaggagcagtgatttccctccccactactccttctccttctagatggtaaccacagcctcgaccatgcctgctccctctgacccagcttcacctcatggacaacccttcttggttcatctccagcccgtgagctggtcctgcttcctcccttccatgccctaacttttaatatgcttgttcagctctaataaagtaataaagcttggttgtcagtat

SEQ ID NO: 26333 - protein, 65 aa, Homo sapiens
MSASTTTLRYPGYMNNDLIGLIASLIPTPRLHFLMTGYTPPARLHFLGHPGAVISLPTTPSPSRW

SEQ ID NO: 26334 - DNA, 735 bp, Homo sapiens
ggccctcacatccctggagcctcagccccctccacacacgtgctgtgaatcatagggggatcaggatactcctgctcacagacacccatctccccctaccaaaaataacgctgggctcctccttccaccctgactctgcctctctgtctgcaggagcctggtcggggtgctccacagaagctgtgcctgggcttgggagccaaggccatgtccctctcccggccaggggagacggagcccatccacagtgtcagctatggccatgtggccgcctgccagctaatgggcccccacaccctggccttgagggtgggagagagccagctcctcctgcagagcccccaggtggaagagatcatgcagctggtgaatgcctacttggccaacccctcccccgagaggccctgcagcagctcttctcctccatgccaagacctgccagacacctcccctcccagccagcgcccgggcctggacgagccccagggacagtctggctgcttggggcagctgcaggactgagcctgccaagaggtcacgacttccctcctgcctgcagcctgggccaggactgctctgagatttgagggaaacatggacccttttggccctgcagggacagggcacatcccacacccaagggctacaatgggtgtgggtaattttctagtttgtttcttaatttatttgtagaagagaagcaaaaaaaaaaaaaaagtttcttatttacacaaa

SEQ ID NO: 26335 - protein, 104 aa, Homo sapiens [sequence omitted]

SEQ ID NO: 26336 - DNA, 753 bp, Homo sapiens
acctggccctggcggcgcagtgtccggggttcggcgctgctcggtatgacgttctggagctgagcacggtgagggggagaagggagaaggggactctggcggcccaagccccacacctttgccccagagccacaggtcccacggagtgtcacgtaattccccacatccagaacagagcgagactccgtctcaaaaaacaaaaaagaaatgaaggagagagtggtgataaggaaggaaaggttgcagggccagagcacgtaggaccctggtggggaagctggagccctagagcctggagaaaggatgagaaaaagaagagaacctggcagcccctgttgcacactgacctctgccctctcttaggtggaagagatcatgcagctggtgaatgcctacttggccaacccctcccccgagaggccctgcagcagctcttctcctccatgccaagacctgccagacacctcccctcccagccagcgcccgggcctggacgagccccagggacagtctggctgcttggggcagctgcaggactgagcctgccaagaggtcacgacttccctcctgcctgcagcctgggccaggactgctctgagatttgagggaaacatggacccttttggccctgcagggacagggcacatcccacacccaagggctacaatgggtgtgggtaattttctagtttgtttcttaatttatttgtagaagagaagcaaaaaaaaaaaaaaagtttcttatttacacaaa

SEQ ID NO: 26337 - protein, 69 aa, Homo sapiens
MPTWPTPPPRGPAAALLLHAKTCQTPPLPASARAWTSPRDSLAAWGSCRTEPAKRSRLPSCLQPGPGLL

SEQ ID NO: 26338 - DNA, 372 bp, Homo sapiens
ctgaggggctgtccccagacggtcacgaactgcctttcctctttgagcagctcttctcctccatgccaagacctgccagacacctcccctcccagccagcgcccgggcctggacgagccccagggacagtctggctgcttggggcagctgcaggactgagcctgccaagaggtcacgacttccctcctgcctgcagcctgggccaggactgctctgagatttgagggaaacatggacccttttggccctgcagggacagggcacatcccacacccaagggctacaatgggtgtgggtaattttctagtttgtttcttaatttatttgtagaagagaagcaaaaaaaaaaaaaaagtttcttatttacacaaa

SEQ ID NO: 26339 - protein, 53 aa, Homo sapiens
MPRPARHLPSQPAPGPGRAPGTVWLLGAAAGLSLPRGHDFPPACSLGQDCSEI

SEQ ID NO: 26340 - DNA, 2443 bp, Homo sapiens
tccttccgcctccgccagcgccgaggaatgtggcgaggccggctgggcggctcgaacgcctgggtccccctccgctcccagttcgcaagtgcggaggccagatgcgagagctcccgctgcggagacctggacgagggggagaagtcatcccaggattggggtctgtggcggggaccccaaggagagggagggtcccctggaagtgacgctgactcagccagtgaggagcgggcctgtctccaacaggctgcagagctgggaggagacttggagcctcatcccggagaaagggctgccggaggacgacccggacatcgttgtgaaaggttggctgtaccgggagccccgcggaggaggggcgcggccctggctgcccccgcgccgagcctggtttgtgctcacgcgggactccctggatcagttcagcagcagcgggaaaggggcgcggcgtctcgggagcctcgtgctcaccagcctgtgctcggtgaccggcccagagcgcaggcgtaaggagacaggtctgtggtcagtgactgtgtctggtcggaaacacagtgtccgcctctgctccccacgccaggcagaggctgagcgctggggggtggcattgcgggaagtgatcgcctccaaggcacccctggagacccccacccagctactgctcagggacatacaggaaagttgcggggacccagaggccgttgccctcatttacctgaggaacccgattctgagacacactagtggagccttgtatgccccactcctgcccctgccctatggagtcagcgccccaggtccccccgggctcccggctacccaagaccctgcggccctgcggtactggcaactcctcacctgcatgagctgcaccttccgacctgggggagctgtgcgggggcacctcctggggcacttggagaggaccgagcaggcactcccggactcggaactggcggaatatgcgcgcttcatccggaaagcgctgggccggacgcgcggcagagagctggtgccctcgctggcggagatttccgcgttgagccaacggcaggagctgctgtgtaccgtgcactgtccgggggctggtgcctgtgctgtggccatcgactcccacaccacggcgggggaggtggctcgagagctggtggggcggctgggcttggcccggagccgcaacgcattcgcgctgtacgagcagcgaggggcccaggagcgagccctggctggggggaccctcgtggccgacgtgctcaccaggtttgagaacttggccgcggaggaagctgggttggaggactcgcccgactccgggtggagactatgtctgcgtcttcacggacctctgcaccctgaggggctgtccccagacggtcacgaactgcctttcctctttgagcaggctcacgctctgctgctgcggggccggccgcccccacccgacgacacgctgcgcgccctggcggcgctgcgcctgcagagcctgcagcgggacttctctccgcgggtgcccctgccccgcctggaccgcctgctcccgcccccggccccgccgcgcgaagacccgccccgcccgacccccaggccgcccccttccgctgccctgctggccggggcgctctggagcccgggcctggccaagaggcgggcggagcgggcccggcgcggcggggccggccgcactgcgggaagcattgcccgcgagggaggaggcggcgccggcacggcagctgccgtgctgggcggctggaagcggctacggggcatgggccgagctgaggccatggccgcctacctggccctggcggcgcagtgtccggggttcggcgctgctcggtatgacgttctggagctgagcacggagcctggtcggggtgctccacagaagctgtgcctgggcttgggagccaaggccatgtccctctcccggccaggggagacggagcccatccacagtgtcagctatggccatgtggccgcctgccagctaatgggcccccacaccctggccttgagggtgggagagagccagctcctcctgcagagcccccaggtggaagagatcatgcagctggtgaatgcctacttggccaacccctcccccgagaggccctgcagcagctcttctcctccatgccaagacctgccagacacctcccctcccagccagcgcccgggcctggacgagccccagggacagtctggctgcttggggcagctgcaggactgagcctgccaagaggtcacgacttccctcctgcctgcagcctgggccaggactgctctgagatttgagggaaacatggacccttttggccctgcagggacagggcacatcccacacccaagggctacaatgggtgtgggtaattttctagtttgtttcttaatttatttgtagaagagaagcaaaaaaaaaaaaaaagtttcttatttacacaaa

SEQ ID NO: 26341 - protein, 455 aa, Homo sapiens [sequence omitted]

SEQ ID NO: 26342 - DNA, 3152 bp, Homo sapiens
gtgacgaaacctggaccctgcctagtaaagaagggaggagagaaagaagagagagggggggccccccgggagggagggggccgggggggcggggtcccagctctgtgctcgcgcccccagcgcgccagtcccggggctgcagggagcgcagcgcgcgcggcccgggccccggccaccggacgccctaccggacacgaccctccctggagcttggacaactgcccacctcggacgctgcaccggacactgccccccacagggctggacactccaacggacactacttcccagctccggacattgctccctcctctcccggggccctggacgcttttccccctcccccctccgggggcccagacactgagcccccctcagcgtctggctagcgtccccttgcaccccagcccaggacactgcctcctccctgtcctcttctcccttctgctcctcccacctcatctttcccctgctcgggtcggagccccgccagttcctccgaccccctactgctcggccgcggctgcccgcgcccccatccgcagctcctcgcccggatgcctctccccgggggactatggtggcttctctgctgccgtcgaggcttcactcttctgcaccgggactacggggacggcgagcttagcggggacggggacgaggacgaggacgaggaaacctttgagctgcggaccccgagtccagcgggcggcgggaggggtcccctggaagtgacgctgactcagccagtgaggagcgggcctgtctccaacaggctgcagagctgggaggagacttggagcctcatcccggagaaagggctgccggaggacgacccggacatcgttgtgaaaggttggctgtaccgggagccccgcggaggaggggcgcggccctggctgcccccgcgccgagcctggtttgtgctcacgcgggactccctggatcagttcagcagcagcgggaaaggggcgcggcgtctcgggagcctcgtgctcaccagcctgtgctcggtgaccggcccagagcgcaggcgtaaggagacaggtctgtggtcagtgactgtgtctggtcggaaacacagtgtccgcctctgctccccacgccaggcagaggctgagcgctggggggtggcattgcgggaagtgatcgcctccaaggcacccctggagacccccacccagctactgctcagggacatacaggaaagttgcggggacccagaggccgttgccctcatttacctgaggaacccgattctgagacacactagtggagccttgtatgccccactcctgcccctgccctatggagtcagcgccccaggtccgggctatgcacccctgcgcgaggaggcggtgcggctgttcttggcgctgcaggcgctggagggggcgcggcgccccgggcccttgatgcagggtgtgctccaaacctgccgggacttgcccgcgctccgggatgaactcttcctgcagctggctaagcagacctcgggccctgcaggtccccccgggctcccggctacccaagaccctgcggccctgcggtactggcaactcctcacctgcatgagctgcaccttccgacctgggggagctgtgcgggggcacctcctggggcacttggagaggaccgagcaggcactcccggactcggaactggcggaatatgcgcgcttcatccggaaagcgctgggccggacgcgcggcagagagctggtgccctcgctggcggagatttccgcgttgagccaacggcaggagctgctgtgtaccgtgcactgtccgggggctggtgcctgtgctgtggccatcgactcccacaccacggcgggggaggtggctcgagagctggtggggcggctgggcttggcccggagccgcaacgcattcgcgctgtacgagcagcgaggggcccaggagcgagccctggctggggggaccctcgtggccgacgtgctcaccaggtttgagaacttggccgcggaggaagctgggttggaggactcgcccgactccgggtggagactatgtctgcgtcttcacggacctctgcaccctgaggggctgtccccagacggtcacgaactgcctttcctctttgagcaggctcacgctctgctgctgcggggccggccgcccccacccgacgacacgctgcgcgccctggcggcgctgcgcctgcagagcctgcagcgggacttctctccgcgggtgcccctgccccgcctggaccgcctgctcccgcccccggccccgccgcgcgaagacccgccccgcccgacccccaggccgcccccttccgctgccctgctggccggggcgctctggagcccgggcctggccaagaggcgggcggagcgggcccggcgcggcggggccggccgcactgcgggaagcattgcccgcgagggaggaggcggcgccggcacggcagctgccgtgctgggcggctggaagcggctacggggcatgggccgagctgaggccatggccgcctacctggccctggcggcgcagtgtccggggttcggcgctgctcggtatgacgttctggagctgagcacggagcctggtcggggtgctccacagaagctgtgcctgggcttgggagccaaggccatgtccctctcccggccaggggagacggagcccatccacagtgtcagctatggccatgtggccgcctgccagctaatgggcccccacaccctggccttgagggtgggagagagccagctcctcctgcagagcccccaggtggaagagatcatgcagctggtgaatgcctacttggccaacccctcccccgagaggccctgcagcagctcttctcctccatgccaagacctgccagacacctcccctcccagccagcgcccgggcctggacgagccccagggacagtctggctgcttggggcagctgcaggactgagcctgccaagaggtcacgacttccctcctgcctgcagcctgggccaggactgctctgagatttgagggaaacatggacccttttggccctgcagggacagggcacatcccacacccaagggctacaatgggtgtgggtaattttctagtttgtttcttaatttatttgtagaagagaagcaaaaaaaaaaaaaaagtttcttatttacacaaa

SEQ ID NO: 26343 - protein, 793 aa, Homo sapiens
MPLPGGLWWLLCCRRGFTLLHRDYGDGELSGDGDEDEDEETFELRTPSPAGGGRGPLEVTLTQPVRSGPVSNRLQSWEETWSLIPEKGLPEDDPDIVVKGWLYREPRGGGARPWLPPRRAWFVLTRDSLDQFSSSGKGARRLGSLVLTSLCSVTGPERRRKETGLWSVTVSGRKHSVRLCSPRQAEAERWGVALREVIASKAPLETPTQLLLRDIQESCGDPEAVALIYLRNPILRHTSGALYAPLLPLPYGVSAPGPGYAPLREEAVRLFLALQALEGARRPGPLMQGVLQTCRDLPALRDELFLQLAKQTSGPAGPPGLPATQDPAALRYWQLLTCMSCTFRPGGAVRGHLLGHLERTEQALPDSELAEYARFIRKALGRTRGRELVPSLAEISALSQRQELLCTVHCPGAGACAVAIDSHTTAGEVARELVGRLGLARSRNAFALYEQRGAQERALAGGTLVADVLTRFENLAAEEAGLEDSPDSGWRLCLRLHGPLHPEGLSPDGHELPFLFEQAHALLLRGRPPPPDDTLRALAALRLQSLQRDFSPRVPLPRLDRLLPPPAPPREDPPRPTPRPPPSAALLAGALWSPGLAKRRAERARRGGAGRTAGSIAREGGGGAGTAAAVLGGWKRLRGMGRAEAMAAYLALAAQCPGFGAARYDVLELSTEPGRGAPQKLCLGLGAKAMSLSRPGETEPIHSVSYGHVAACQLMGPHTLALRVGESQLLLQSPQVEEIMQLVNAYLANPSPERPCSSSSPPCQDLPDTSPPSQRPGLDEPQGQSGCLGQLQD

SEQ ID NO: 26344 - DNA, 2280 bp, Homo sapiens
gtgacgaaacctggaccctgcctagtaaagaagggaggagagaaagaagagagagggggggccccccgggagggagggggccgggggggcggggtcccagctctgtgctcgcgcccccagcgcgccagtcccggggctgcagggagcgcagcgcgcgcggcccgggccccggccaccggacgccctaccggacacgaccctccctggagcttggacaactgcccacctcggacgctgcaccggacactgccccccacagggctggacactccaacggacactacttcccagctccggacattgctccctcctctcccggggccctggacgcttttccccctcccccctccgggggcccagacactgagcccccctcagcgtctggctagcgtccccttgcaccccagcccaggacactgcctcctccctgtcctcttctcccttctgctcctcccacctcatctttcccctgctcgggtcggagccccgccagttcctccgaccccctactgctcggccgcggctgcccgcgcccccatccgcagctcctcgcccggatgcctctccccgggggactatggtggcttctctgctgccgtcgaggcttcactcttctgcaccgggactacggggacggcgagcttagcggggacggggacgaggacgaggacgaggaaacctttgagctgcggaccccgagtccagcgggcggcgggaggggtcccctggaagtgacgctgactcagccagtgaggagcgggcctgtctccaacaggctgcagagctgggaggagacttggagcctcatcccggagaaagggctgccggaggacgacccggacatcgttgtgaaaggttggctgtaccgggagccccgcggaggaggggcgcggccctggctgcccccgcgccgagcctggtttgtgctcacgcgggactccctggatcagttcagcagcagcgggaaaggggcgcggcgtctcgggagcctcgtgctcaccagcctgtgctcggtgaccggcccagagcgcaggcgtaaggagacaggtctgtggtcagtgactgtgtctggtcggaaacacagtgtccgcctctgctccccacgccaggcagaggctgagcgctggggggtggcattgcgggaagtgatcgcctccaaggcacccctggagacccccacccagctactgctcagggacatacaggaaagttgcggggacccagaggccgttgccctcatttacctgaggaacccgattctgagacacactagtggagccttgtatgccccactcctgcccctgccctatggagtcagcgccccaggtccgggctatgcacccctgcgcgaggaggcggtgcggctgttcttggcgctgcaggcgctggagggggcgcggcgccccgggcccttgatgcagggtgtgctccaaacctgccgggacttgcccgcgctccgggatgaactcttcctgcagctggctaagcagacctcgggccctgcaggtccccccgggctcccggctacccaagaccctgcggccctgcggtactggcaactcctcacctgcatgagctgcaccttccgacctgggggagctgtgcgggggcacctcctggggcacttggagaggaccgagcaggcactcccggactcggaactggcggaatatgcgcgcttcatccggaaagcgctgggccggacgcgcggcagagagctggtgccctcgctggcggagatttccgcgttgagccaacggcaggagctgctgtgtaccgtgcactgtccgggggctggtgcctgtgctgtggccatcgactcccacaccacggcgggggaggtggctcgagagctggtggggcggctgggcttggcccggagccgcaacgcattcgcgctgtacgagcagcgaggggcccaggagcgagccctggctggggggaccctcgtggccgacgtgctcaccaggtttgagaacttggccgcggaggaagctgggttggaggactcgcccgactccgggtggagactatgtctgcgtcttcacggacctctgcaccctgaggggctgtccccagacggtcacgacttccctcctgcctgcagcctgggccaggactgctctgagatttgagggaaacatggacccttttggccctgcagggacagggcacatcccacacccaagggctacaatgggtgtgggtaattttctagtttgtttcttaatttatttgtagaagagaagcaaaaaaaaaaaaaaagtttcttatttacac

SEQ ID NO: 26345 - protein, 525 aa, Homo sapiens
MPLPGGLWWLLCCRRGFTLLHRDYGDGELSGDGDEDEDEETFELRTPSPAGGGRGPLEVTLTQPVRSGPVSNRLQSWEETWSLIPEKGLPEDDPDIVVKGWLYREPRGGGARPWLPPRRAWFVLTRDSLDQFSSSGKGARRLGSLVLTSLCSVTGPERRRKETGLWSVTVSGRKHSVRLCSPRQAEAERWGVALREVIASKAPLETPTQLLLRDIQESCGDPEAVALIYLRNPILRHTSGALYAPLLPLPYGVSAPGPGYAPLREEAVRLFLALQALEGARRPGPLMQGVLQTCRDLPALRDELFLQLAKQTSGPAGPPGLPATQDPAALRYWQLLTCMSCTFRPGGAVRGHLLGHLERTEQALPDSELAEYARFIRKALGRTRGRELVPSLAEISALSQRQELLCTVHCPGAGACAVAIDSHTTAGEVARELVGRLGLARSRNAFALYEQRGAQERALAGGTLVADVLTRFENLAAEEAGLEDSPDSGWRLCLRLHGPLHPEGLSPDGHDFPPACSLGQDCSEI

SEQ ID NO: 26346 - DNA, 1819 bp, Homo sapiens
gaatctcggcgcagtaaggagactgtagtaggaggaggcgcccagggagcgtgcatacaggggacccaccagctcctcgtcgcagccgtctagggtttcctggggccattactctggggatgaagaggacgcatactcggctgagccactgccggagctttgctacaaggccgatgtccaggccttcagccgggccttccaacccagtgtctccctgaccgtggctgcgctgggtctggccggcaatggcctggtcctggccacccacctggcagcccgacgcgcagcgcgctcgcccacctctgcccacctgctccagctggccctggccgacctcttgctggccctgactctgcccttcgcggcagcaggggctcttcagggctggagtctgggaagtgccacctgccgcaccatctctggcctctactcggcctccttccacgccggcttcctcttcctggcctgtatcagcgccgaccgctacgtggccatcgcgcgagcgctcccagccgggccgcggccctccactcccggccgcgcacacttggtctccgtcatcgtgtggctgctgtcactgctcctggcgctgcctgcgctgctcttcagccaggatgggcagcgggaaggccaacgacgctgtcgcctcatcttccccgagggcctcacgcagacggtgaagggggcgagcgccgtggcgcaggtggccctgggcttcgcgctgccgctgggcgtcatggtagcctgctacgcgcttctgggccgcacgctgctggccgccagggggcccgagcgccggcgtgcgctgcgcgtcgtggtggctctggtggcggccttcgtggtgctgcagctgccctacagcctcgccctgctgctggatactgccgatctactggctgcgcgcgagcggagctgccctgccagcaaacgcaaggatgtcgcactgctggtgaccagcggcttggccctcgcccgctgtggcctcaatcccgttctctacgccttcctgggcctgcgcttccgccaggacctgcggaggctgctacggggtgggagctgcccctcagggcctcaaccccgccgcggctgcccccgccggccccgcctttcttcctgctcagctcccacggagacccacagtctctcctgggacaactagggctgcgaatctagaggagggggcaggctgagggtcgtgggaaaggggagtaggtgggggaacactgagaaagaggcagggacctaaagggactacctctgtgccttgccacattaaattgataacatggaaatgagatgcaacccaacaactgttactatttttgagtcaccgacttggaagtgatttgtggcggggcagaaccggtgggttaacaccccgcccccgccccaccccccgccctgccccgcgcttggctctctgagtggaagacgctgagggcctgggtgggggtggggggctgctgagtctgctaaagctctagccactgacaccccctccaccgtcacctggcctcagccaacagaggtgaggtgggaaagctgccaggcaaggaggggcggtggttcctcttgcaatactgtaaggaagagctttctaacaaccagagcgctctccagtaatggctgccttagcaaatactgagttcccgctattggaatgttcagactgtcggggacgctgtgggcctttgcgtggtgtggggggagggggaggggcaggggattcccgtttttggtgggcgtttggatttcataaccactttacaatcccttcctagtgtctgtgatggaaagaaaaaatgaaaaaatgaattgt

SEQ ID NO: 26347 - protein, 140 aa, Homo sapiens
MVACYALLGRTLLAARGPERRRALRVVVALVAAFVVLQLPYSLALLLDTADLLAARERSCPASKRKDVALLVTSGLALARCGLNPVLYAFLGLRFRQDLRRLLRGGSCPSGPQPRRGCPRRPRLSSCSAPTETHSLSWDN

SEQ ID NO: 26348 - DNA, 1239 bp, Homo sapiens
agagatggggacggaggccacagagcaggtttcctggggccattactctggggatgaagaggacgcatactcggctgagccactgccggagctttgctacaaggccgatgtccaggccttcagccgggccttccaacccagtgtctccctgaccgtggctgcgctgggtctggccggcaatggcctggtcctggccacccacctggcagcccgacgcgcagcgcgctcgcccacctctgcccacctgctccagctggccctggccgacctcttgctggccctgactctgcccttcgcggcagcaggggctcttcagggctggagtctgggaagtgccacctgccgcaccatctctggcctctactcggcctccttccacgccggcttcctcttcctggcctgtatcagcgccgaccgctacgtggccatcgcgcgagcgctcccagccgggccgcggccctccactcccggccgcgcacacttggtctccgtcatcgtgtggctgctgtcactgctcctggcgctgcctgcgctgctcttcagccaggatgggcagcgggaaggccaacgacgctgtcgcctcatcttccccgagggcctcacgcagacggtgaagggggcgagcgccgtggcgcaggtggccctgggcttcgcgctgccgctgggcgtcatggtagcctgctacgcgcttctgggccgcacgctgctggccgccagggggcccgagcgccggcgtgcgctgcgcgtcgtggtggctctggtggcggccttcgtggtgctgcagctgccctacagcctcgccctgctgctggatactgccgatctactggctgcgcgcgagcggagctgccctgccagcaaacgcaaggatgtcgcactgctggtgaccagcggcttggccctcgcccgctgtggcctcaatcccgttctctacgccttcctgggcctgcgcttccgccaggacctgcggaggctgctacggggtgggagctgcccctcagggcctcaaccccgccgcggctgcccccgccggccccgcctttcttcctgctcagctcccacggagacccacagtctctcctgggacaactagggctgcgaatctagaggagggggcaggctgagggtcgtgggaaaggggagtaggtgggggaacactgagaaagaggcagggacctaaagggactacctctgtgccttgccacattaaattgataacatggaaatgagatgcaaccc

SEQ ID NO: 26349 - protein, 362 aa, Homo sapiens
MGTEATEQVSWGHYSGDEEDAYSAEPLPELCYKADVQAFSRAFQPSVSLTVAALGLAGNGLVLATHLAARRAARSPTSAHLLQLALADLLLALTLPFAAAGALQGWSLGSATCRTISGLYSASFHAGFLFLACISADRYVAIARALPAGPRPSTPGRAHLVSVIVWLLSLLLALPALLFSQDGQREGQRRCRLIFPEGLTQTVKGASAVAQVALGFALPLGVMVACYALLGRTLLAARGPERRRALRVVVALVAAFVVLQLPYSLALLLDTADLLAARERSCPASKRKDVALLVTSGLALARCGLNPVLYAFLGLRFRQDLRRLLRGGSCPSGPQPRRGCPRRPRLSSCSAPTETHSLSWDN

SEQ ID NO: 26350 - DNA, 1305 bp, Homo sapiens
gaatctcggcgcagtaaggagactgtagtaggaggaggcgcccagggagcgtgcatacaggggacccaccagctcctcgtcgcagccgtctagggtttcctggggccattactctggggatgaagaggacgcatactcggctgagccactgccggagctttgctacaaggccgatgtccaggccttcagccgggccttccaacccagtgtctccctgaccgtggctgcgctgggtctggccggcaatggcctggtcctggccacccacctggcagcccgacgcgcagcgcgctcgcccacctctgcccacctgctccagctggccctggccgacctcttgctggccctgactctgcccttcgcggcagcaggggctcttcagggctggagtctgggaagtgccacctgccgcaccatctctggcctctactcggcctccttccacgccggcttcctcttcctggcctgtatcagcgccgaccgctacgtggccatcgcgcgagcgctcccagccgggccgcggccctccactcccggccgcgcacacttggtctccgtcatcgtgtggctgctgtcactgctcctggcgctgcctgcgctgctcttcagccaggatgggcagcgggaaggccaacgacgctgtcgcctcatcttccccgagggcctcacgcagacggtgaagggggcgagcgccgtggcgcaggtggccctgggcttcgcgctgccgctgggcgtcatggtagcctgctacgcgcttctgggccgcacgctgctggccgccagggggcccgagcgccggcgtgcgctgcgcgtcgtggtggctctggtggcggccttcgtggtgctgcagctgccctacagcctcgccctgctgctggatactgccgatctactggctgcgcgcgagcggagctgccctgccagcaaacgcaaggatgtcgcactgctggtgaccagcggcttggccctcgcccgctgtggcctcaatcccgttctctacgccttcctgggcctgcgcttccgccaggacctgcggaggctgctacggggtgggagctgcccctcagggcctcaaccccgccgcggctgcccccgccggccccgcctttcttcctgctcagctcccacggagacccacagtctctcctgggacaactagggctgcgaatctagaggagggggcaggctgagggtcgtgggaaaggggagtaggtgggggaacactgagaaagaggcagggacctaaagggactacctctgtgccttgccacattaaattgataacatggaaatgagatgcaaccc

SEQ ID NO: 26351 - protein, 140 aa, Homo sapiens; identical to SEQ ID NO: 26347

SEQ ID NO: 26352 - DNA, 461 bp, Homo sapiens
ctgcccatcctggctgaagagcagcgcaggcagcgccaggagcagtgacagcagccacacgatgacggagaccaagtgtgcgcggccgggagtggagggccgcggcccggctgggagcgctcgcgcgatggccacgtagcggtcggcgctgatacaggccaggaagaggaagccggcgtggaaggaggccgagtagaggccagagatggtgcggcaggtggcacttcccagactccagccctgaagagcccctgctgccgcgaagggcagagtcagggccagcaagaggtcggccagggccagctggagcaggtgggcagaggtgggcgagcgcgctgcgcgtcgggctgccaggatctggattttacgaaaaaaaaaaaaagaagaagaaaggaaggaaagaggaaagaaagaaagaaagaaagaaaaaaaggaaggaaagaaagaaaaaagaatgaacg

SEQ ID NO: 26353 - protein, 136 aa, Homo sapiens
QQPHDDGDQVCAAGSGGPRPGWERSRDGHVAVGADTGQEEEAGVEGGRVEARDGAAGGTSQTPALKSPCCREGQSQGQQEVGQGQLEQVGRGGRARCASGCQDLDFTKKKKRRRKEGKRKERKKERKKGRKERKKN

SEQ ID NO: 26354 - DNA, 5312 bp, Homo sapiens
gagaggaaagagggtggaaaggagaggatagagagagaagagcggaggaccaggaaccagagagagagagagagaaaagagagaggagagacagagcgcttgggggcgaaaggagagagggagggaagggtgggtaaggaggagagagcggtctgctgcaaaccccaggaggagagcttggagcccaagccagaactcgagccctagccggagccgttcacagggaggcggctgccgggaccgtcagccctgcatgatgcatctccggctcttctgcatcctgctcgccgcggtctcaggagccgagggctggggctactacggctgcgacgaggagctggtgggtcccctgtatgcacgctccctgggcgcctcctcctactacagtctccttactgcgccgagattcgccaggctgcacggcataagcgggtggtcaccacggattggggatccgaatccctggctccagatagacttaatgaagaagcaccggatccgggccgtggccacacagggctcctttaattcttgggactgggtcacacgttacatgctactctacggcgaccgagtggacagctggacaccgttctaccagcgagggcacaactcgaccttctttggtaacgtgaacgagtcggcggtggtgcgccatgacctgcacttccacttcactgcgcgctacatccgcatcgtgcccctggcctggaacccacgcggcaagatcggcctgaggctcggcctctatggctgcccatacaaggccgacatactctatttcgacggcgacgatgccatctcctaccgcttcccgcgaggggtcagccgaagcctgtgggacgtgttcgccttcagcttcaagaccgaggagaaggacggtcttctgctgcacgccgagggcgcccagggcgactacgtgacgctcgagctggagggggcacacctgctgctgcacatgagcctgggcagcagccctatccagccaagaccaggtcacaccaccgtgagcgcaggcggagtcctcaatgaccagcactggcactatgtgcgggtggaccgatttggccgcgatgtaaatttcaccctggacggctatgtgcagcgctttattctcaatggagacttcgagaggctgaacctggacactgagatgttcatcggaggtctggtgggcgccgcgcggaagaacctggcctatcggcataacttccgcggctgcatagaaaacgtaatcttcaaccgcgtcaacatcgcagacctggccgtgcggcgccattcccggatcaccttcgagggtaaggtggcttttcgttgcctggacccggtaccgcaccctatcaacttcggaggccctcacaacttcgttcaagtgcccggtttcccacgccgtggccgcctggcagtctcatttcgcttccgcacctgggacctcaccgggcttctccttttctcccgtctgggggacgggctgggccacgtggagctgacgctcagcgaagggcaggtcaacgtgtccatcgcgcagagcggccgaaagaagcttcagttcgctgctgggtaccgactgaatgacggcttttggcacgaggtgaattttgtggcacaggaaaaccatgcagttatcagcattgatgatgtggaaggggcagaggtcagggtctcatacccgttgctgatccggacagggacctcatatttctttgggggttgtcccaagccagccagtcgatgggactgccactccaaccagacggcattccatggctgcatggagctgctcaaggtggatggtcaactggtcaacctgactctggtggagggccggcggcttggattctatgctgaggtcctctttgatacatgtggcatcactgataggtgcagccctaacatgtgtgagcatgatggacgctgctaccagtcttgggatgacttcatttgctactgcgaactgacgggctacaagggagagacctgccacacacctttgtataaggaatcctgtgaggcttatcggctcagtgggaaaacttctggaaacttcaccattgatcctgatggcagtggccccctgaagccatttgtagtgtactgtgatatccgagagaaccgagcgtggacagttgtgcggcatgacaggctgtggacaactcgagtgacaggttccagcatggagcggccattcctgggggctatccagtactggaatgcatcctgggaggaagtcagtgcccttgccaatgcttcccagcattgtgaacagtggatcgagttctcctgctacaattcccggctgctcaacactgcaggaggctacccctacagcttttggattggccgaaatgaggagcagcacttctactggggaggctcccagcctgggatccagcgctgtgcctgtggtctggaccggagctgtgtggaccctgccttgtactgcaactgtgacgctgaccagccccagtggagaactgacaagggactgctgacctttgtggaccatctgcctgtcactcaggtagtgataggggatacgaaccgctccacttctgaggcccagttcttcctgaggcctctgcgctgctatggcgatcgaaattcctggaacaccatttccttccacaccggggctgcactacgcttccccccaatccgtgccaaccacagcctggatgtctccttctacttcaggacctctgctccctcgggggtcttcctagagaatatggggggcccttactgccagtggcgccgaccttatgtgcgggtggaactcaacacatcccgggatgtggtcttcgcctttgatgtggggaatggggatgagaacctcacagtacactcagacgactttgagttcaatgatgacgagtggcacctggtccgggctgaaatcaacgtgaagcaggcccggctccgagtggatcaccggccctgggttctgcggcctatgccactgcagacctacatctggatggagtatgaccagcccctctatgtgggatctgcagagcttaagagacgcccctttgtgggttgcttgagggccatgcgtctgaacggagtgactctgaacctggagggccgtgccaatgcctctgagggtacctcacccaactgcacaggccactgtgcccaccctcggctcccctgtttccatggaggccgctgcgtggagcgctatagctactacacgtgtgactgtgacctcacggcttttgatgggccatactgcaaccacgatattggtggtttctttgagccgggcacctggatgcgctataacctacagtcagcgctgcgctctgcagccagggagttctcccacatgctgagccggccagtgccaggctatgagcctggctacatcccgggctatgatactccgggctatgtgcctggctaccatggccccgggtaccgcctgcccgactacccccggcctggtcggcctgtgcccggttaccgtgggcctgtctacaacgttacgggagaggaggtctccttcagcttcagcaccagctccgcccctgctgtcctgctctacgtcagttcctttgttcgtgactacatggctgtgctcatcaaggatgatgggacccttcagctgcgatatcagctgggcaccagtccctacgtgtaccagctaaccactcgaccagtgaccgatggccagccccatagcatcaatatcacccgtgtttaccggaacctcttcatccaggtggactacttcccactgacagagcagaagttctcgctgttggtggacagccagttggactcacccaaggccttgtatttagggcgtgtgatggagacaggagtcattgacccggagatccagcgctacaacaccccaggtttctcaggctgcctgtctggtgttcgattcaacaacgtggctcccctcaagacccacttccgaacccctcgacccatgactgctgagctagctgaggcccttcgagttcagggagaactgtccgaatctaattgcggagctatgccacgtcttgtttcagaggtgccacctgagcttgatccctggtatctgcccccagacttcccctactaccatgatgaaggatgggttgccatacttttaggctttttggtggcctttctgctgctggggctggtgggaatgttggtgctcttctatctgcaaaatcatcgctataagggctcctaccataccaatgagcccaaggctgcccacgagtaccatcctggcagcaaacctcccctacccacttcaggccctgcccaggtccccacccctacagcagctcccaaccaagctccagcctcagccccagccccagccccaactccagccccagcccctggcccccgggatcagaacctaccccagatcctggaggagtccaggtctgaatgagtcagaagggcttctgggaccaattccagctcctgacattcccccagtcctgcctctcccccatcctatcagggacatttggctcctcttagctggctctgctcatccagaggatattcccccatcccccccccatcaagtttggtgggcagagctacagatgggacccaagggagtggccgagcctcactgcctaaaccaatgcccttctcatccctgtttccccaggctcctggctgtttatctgccccaaaggagaagcctcatggggttgacataggtcctttctgccatctctgttccagctgctgtcagggattaacaacagagtgtaggggagattaactgcctcccttccaatagacactatcagcagggacagatgtgtgggagtgcagggctgcagagggtatggggggaggaggctgctaaaccctatcccccagcctcccccctgccctgaagatcttccatttgcttccactcagctggaggctcaagagggcttgatggctgtcccctgcccccctccttttgttttgtacacagagaccaagaggcctcagtttagcaccttagtacctccgctgcttcacttgctttagccaaagccataaaaaacctgcaacgtagagaaaataatgcagataccctgactagccagccctctactcctccaaccttttccaagatatgcaatggcctttgtgcctgcccaaaggcttcgccccctccagtgcatgaggaaccctctttcctccgctcagagatgctgcttcatttacccaggaggtcatattctttatatatattttttgttgcaaagtgtctctctagagaaactctatatattattcgaatttttaaattatttgtttatatataaaagaaaagctcaattggc

SEQ ID NO: 26355 - protein, 1384 aa, Homo sapiens; identical to SEQ ID NO: 3513

SEQ ID NO: 26356 - DNA, 1070 bp, Homo sapiens
ggataagtgtatactggtgaccgatactaggattaaggttttgccagggcttaaggctggactttggagctggccaaggggtggggtttgtggctagggctggggtttgtggctggggctgggttttgtggcagggatccaagcaggagctggtgcccctgactgatgctaaggctggacatggagctggtgatggtgctagcactggctgaggttgggtgcaaggcctgtatttggggatggtgcaggttttgggggccgagttggattgaggctagggttggagctggattggtgtcttgggttgacttaggttgtggaagatgctgaggtttaggattgagtttgggaaagtatgcctaaaccaatgcccttctcatccctgtttccccaggctcctggctgtttatctgccccaaaggagaagcctcatggggttgacataggtcctttctgccatctctgttccagctgctgtcagggattaacaacagagtgtaggggagattaactgcctcccttccaatagacactatcagcagggacagatgtgtgggagtgcagggctgcagagggtatggggggaggaggctgctaaaccctatcccccagcctcccccctgccctgaagatcttccatttgcttccactcagctggaggctcaagagggcttgatggctgtcccctgcccccctccttttgttttgtacacagagaccaagaggcctcagtttagcaccttagtacctccgctgcttcacttgctttagccaaagccataaaaaacctgcaacgtagagaaaataatgcagataccctgactagccagccctctactcctccaaccttttccaagatatgcaatggcctttgtgcctgcccaaaggcttcgccccctccagtgcatgaggaaccctctttcctccgctcagagatgctgcttcatttacccaggaggtcatattctttatatatattttttgttgcaaagtgtctctctagagaaactctatatattattcgaatttttaaattatttgtttatatataaaagaaaagctcaattggc

SEQ ID NO: 26357 - protein, 51 aa, Homo sapiens
MPKPMPFSSLFPQAPGCLSAPKEKPHGVDIGPFCHLCSSCCQGLTTECRGD

SEQ ID NO: 26358 - DNA, 1248 bp, Homo sapiens
ggataagtgtatactggtgaccgatactaggattaaggttttgccagggcttaaggctggactttggagctggccaaggggtggggtttgtggctagggctggggtttgtggctggggctgggttttgtggcagggatccaagcaggagctggtgcccctgactgatgctaaggctggacatggagctggtgatggtgctagcactggctgaggttgggtgcaaggcctgtatttggggatggtgcaggttttgggggccgagttggattgaggctagggttggagctggattggtgtcttgggttgacttaggttgtggaagatgctgaggtttaggattgagtttgggaaagtatgcctaaaccaatgcccttctcatccctgtttccccaggctcctggctgtttatctgccccaaaggagaagcctcatggggttgacataggtcctttctgccatctctgttccagctgctgtcagggattaacaacagagtgtaggggagattaactgcctcccttccaatagacactatcagcagggacagatgtgtgggagtgcagggctgcagagggtatggggggaggaggctgctaaaccctatcccccagcctcccccctgccctgaagatcttccatttgcttccactcagctggaggctcaagagggcttgatggctgtcccctgcccccctccttttgttttgtacacagagaccaagaggcctcagtttagcaccttagtacctccgctgcttcacttgctttagccaaagccataaaaaacctgcaacgtagagaaaataatgcagataccctgactagccagccctctactcctccaaccttttccaagatatgcaatggcctttgtgcctgcccaaaggcttcgccccctccagtgcatgaggaaccctctttcctccgctcagagatgctgcttcatttacccaggaggtcatattctttatatatattttttgttgcaaagtgtctctctagagaaactctatatattattcgaatttttaaattatttgtttatatataaaagaaaagctcaattggctgtgctgtcctgtgctgtgctgtgcccacagtctgtagtttgcctttcctgtgttggaagtgtcgtgagtcctgctggtcacccaccagcctggtccggcctccactctgaagcagggttgagcctgctgtgctctcagacgcggagccgttccaataaagcagagtggcagagcccc

SEQ ID NO: 26359 - protein, 51 aa, Homo sapiens; identical to SEQ ID NO: 26357

SEQ ID NO: 26360 - DNA, 167 bp, Homo sapiens
atagaagagcaccaacattcccaccagccccagcagcagaaaggccaccaaaactgaaaagaagaaaagggacaattcagatccaggaacatatgccacagctccttgcctaaaacgcgtccgcacccgcagcttacccatcacacgccctaaatacaaggccttgg

SEQ ID NO: 26361 - protein, 53 aa, Homo sapiens
KSTNIPTSPSSRKATKTEKKKRDNSDPGTYATAPCLKRVRTRSLPITRPKYKA

SEQ ID NO: 26362 - DNA, 3071 bp, Homo sapiens
gattaatatctggtatcattttaggcccctctcaatcttagttttctaatctgcttttttcagcgaatacattataaacactttcccacaaacatgatttaaccagcctgagcaacatagtgagacccatctcacaaaataataataggctgggtgtggtggcttacgcctgtaatcccagcactttgggaggctgaggcaggtggatcacttgaggccaggagttcaagaccagcctagcaaacatggtgaaaccccatctctactaaaaatacaaaaatcagctggggggcgtggtggtgtgcacctgtagtcccagctactcaggtggctgaggcacaagaatcgcttgaaccctggaggcagaggttgcaatgagccaagatcatgccactgcactccagcctgggcaacagagcaagactctgtctcaaaaaacaaaacaaaacaaaacaaaaaaccccacttataataataataaagataatttttctgccataataacagatctaaaagcatagaggcaactaccatattgactactttctaattccatttgattcatgttttcactgggaatttggagaaaatcaacccagaagcctactggttattgacttggagttgggtaggaacctagcctcgggtttatcctgcttgcagtggtcatggtgaatggagaccatcggattgggatctttgccaagagggcaattcaagctggcgaagagctcttctttgattacaggtacagccaagctgatgctctcaagtacgtggggatcgagagggagaccgacgtcctttagccctcccaggccccacggcagcacttatggtagcggcactgtcttggctttcgtgctcacaccactgctgctcgagtctcctgcactgtgtctcccacactgagaaaccccccaacccactccctctgtagtgaggcctctgccatgtccagagggcacaaaactgtctcaatgagaggggagacagaggcagctagggcttggtctcccaggacagagagttacagaaatgggagactgtttctctggcctcagaagaagcgagcacaggctggggtggatgacttatgcgtgatttcgtgtcggctccccaggctgtggcctcaggaatcaacttaggcagttcccaacaagcgctagcctgtaattgtagctttccacatcaagagtccttatgttattgggatgcaggcaaacctctgtggtcctaagacctggagaggacaggctaagtgaagtgtggtccctggagcctacaagtggtctgggttagaggcgagcctggcaggcagcacagactgaactcagaggtagacaggtcaccttactacctcctccctcgtggcagggctcaaactgaaagagtgtgggttctaagtacaggcattcaaggctgggggaaggaaagctacgccatccttccttagccagagagggagaaccagccagatgatagtagttaaactgctaagcttgggcccaggaggctttgagaaagccttctctgtgtactctggagatagatggagaagtgttttcagattcctgggaacagacaccagtgctccagctcctccaaagttctggcttagcagctgcaggcaagcattatgctgctattgaagaagcattaggggtatgcctggcaggtgtgagcatcctggctcgctggatttgtgggtgttttcaggccttccattccccatagaggcaaggcccaatggccagtgttgcttatcgcttcagggtaggtgggcacaggcttggactagagaggagaaagattggtgtaatctgctttcctgtctgtagtgcctgctgtttggaaagggtgagttagaatatgttccaaggttggtgaggggctaaattgcacgcgtttaggctggcaccccgtgtgcagggcacactggcagagggtatctgaagtgggagaagaagcaggtagaccacctgtcccaggctgtggtgccaccctctctggcattcatgcagagcaaagcactttaaccatttcttttaaaaggtctatagattggggtagagtttggcctaaggtctctagggtccctgcctaaatcccactcctgagggagggggaagaagagagggtgggagattctcctccagtcctgtctcatctcctgggagaggcagacgagtgagtttcacacagaagaatttcatgtgaatggggccagcaagagctgccctgtgtccatggtgggtgtgccgggctggctgggaacaaggagcagtatgttgagtagaaagggtgtgggcgggtatagattggcctgggagtgttacagtagggagcaggcttctcccttctttctgggactcagagccccgcttcttcccactccacttgttgtcccatgaaggaagaagtggggttcctcctgacccagctgcctcttacggtttggtatgggacatgcacacacactcacatgctctcactcaccacactggagggcacacacgtaccccgcacccagcaactcctgacagaaagctcctcccacccaaatgggccaggccccagcatgatcctgaaatctgcatccgccgtggtttgtattcattgtgcatatcagggataccctcaagctggactgtgggttccaaattactcatagaggagaaaaccagagaaagatgaagaggaggagttaggtctatttgaaatgccaggggctcgctgtgaggaataggtgaaaaaaaacttttcaccagcctttgagagactagactgaccccacccttccttcagtgagcagaatcactgtggtcagtctcctgtcccagcttcagttcatgaatactcctgttcctccagtttcccatcctttgtccctgctgtcccccacttttaaagatgggtctcaacccctccccaccacgtcatgatggatggggcaaggtggtggggactaggggagcctggtatacatgcggcttcattgccaataaatttcatgcactttaaagtcctgtggcttgtgacctcttaataaagtgttagaatccattttg

SEQ ID NO: 26363 - protein, 78 aa, Homo sapiens
METIGLGSLPRGQFKLAKSSSLITGTAKLMLSSTWGSRGRPTSFSPPRPHGSTYGSGTVLAFVLTPLLLESPALCLPH

SEQ ID NO: 26364 - DNA, 4728 bp, Homo sapiens
gagtctcactcttgttgcccaggccgcagtacaatggcgtgatctcagctcactgcaacctctgcctcccgggttcacatgattctcctgcctcagcctcccgagtagctgggattacagctggacacctgttctgctgttgtgtcctgccattctcctgaagaacagaggcacactgtaaaacccaacacttccccttgcattctataagattacagcaagatggaaataccaaatccccctacctccaaatgtatcacttactggaaaagaaaagtgaaatctgaatacatgcgacttcgacaacttaaacggcttcaggcaaatatgggtgcaaaggctttgtatgtggcaaattttgcaaaggttcaagaaaaaacccagatcctcaatgaagaatggaagaagcttcgtgtccaacctgttcagtcaatgaagcctgtgagtggacacccttttctcaaaaagtgtaccatagagagcattttcccgggatttgcaagccaacatatgttaatgaggtcactgaacacagttgcattggttcccatcatgtattcctggtcccctctccaacagaactttatggtagaagatgagacggttttgtgcaatattccctacatgggagatgaagtgaaagaagaagatgagacttttattgaggagctgatcaataactatgatgggaaagtccatggtgaagaagagatgatccctggatccgttctgattagtgatgctgtttttctggagttggtcgatgccctgaatcagtactcagatgaggaggaggaagggcacaatgacacctcagatggaaagcaggatgacagcaaagaagatctgccagtaacaagaaagagaaagcgacatgctattgaaggcaacaaaaagagttccaagaaacagttcccaaatgacatgatcttcagtgcaattgcctcaatgttccctgagaatggtgtcccagatgacatgaaggagaggtatcgagaactaacagagatgtcagaccccaatgcacttccccctcagtgcacacccaacatcgatggccccaatgccaagtctgtgcagcgggagcaatctctgcactccttccacacacttttttgccggcgctgctttaaatacgactgcttccttcacccttttcatgccacccctaatgtatataaacgcaagaataaagaaatcaagattgaaccagaaccatgtggcacagactgcttccttttgctggaaggagcaaaggagtatgccatgctccacaacccccgctccaagtgctctggtcgtcgccggagaaggcaccacatagtcagtgcttcctgctccaatgcctcagcctctgctgtggctgagactaaagaaggagacagtgacagggacacaggcaatgactgggcctccagttcttcagaggctaactctcgctgtcagactcccacaaaacagaaggctagtccagccccacctcaactctgcgtagtggaagcaccctcggagcctgtggaatggactggggctgaagaatctctttttcgagtcttccatggcacctacttcaacaacttctgttcaatagccaggcttctggggaccaagacgtgcaagcaggtctttcagtttgcagtcaaagaatcacttatcctgaagctgccaacagatgagctcatgaacccctcacagaagaagaaaagaaagcacagattgtgggctgcacactgcaggaagattcagctgaagaaagataactcttccacacaagtgtacaactaccaaccctgcgaccacccagaccgcccctgtgacagcacctgcccctgcatcatgactcagaatttctgtgagaagttctgccagtgcaacccagactgtcagaatcgtttccctggctgtcgctgtaagacccagtgcaataccaagcaatgtccttgctatctggcagtgcgagaatgtgaccctgacctgtgtctcacctgtggggcctcagagcactgggactgcaaggtggtttcctgtaaaaactgcagcatccagcgtggacttaagaagcacctgctgctggccccctctgatgtggccggatggggcaccttcataaaggagtctgtgcagaagaacgaattcatttctgaatactgtggtgagctcatctctcaggatgaggctgatcgacgcggaaaggtctatgacaaatacatgtccagcttcctcttcaacctcaataatgattttgtagtggatgctactcggaaaggaaacaaaattcgatttgcaaatcattcagtgaatcccaactgttatgccaaagtggtcatggtgaatggagaccatcggattgggatctttgccaagagggcaattcaagctggcgaagagctcttctttgattacaggtacagccaagctgatgctctcaagtacgtggggatcgagagggagaccgacgtcctttagccctcccaggccccacggcagcacttatggtagcggcactgtcttggctttcgtgctcacaccactgctgctcgagtctcctgcactgtgtctcccacactgagaaaccccccaacccactccctctgtagtgaggcctctgccatgtccagagggcacaaaactgtctcaatgagaggggagacagaggcagctagggcttggtctcccaggacagagagttacagaaatgggagactgtttctctggcctcagaagaagcgagcacaggctggggtggatgacttatgcgtgatttcgtgtcggctccccaggctgtggcctcaggaatcaacttaggcagttcccaacaagcgctagcctgtaattgtagctttccacatcaagagtccttatgttattgggatgcaggcaaacctctgtggtcctaagacctggagaggacaggctaagtgaagtgtggtccctggagcctacaagtggtctgggttagaggcgagcctggcaggcagcacagactgaactcagaggtagacaggtcaccttactacctcctccctcgtggcagggctcaaactgaaagagtgtgggttctaagtacaggcattcaaggctgggggaaggaaagctacgccatccttccttagccagagagggagaaccagccagatgatagtagttaaactgctaagcttgggcccaggaggctttgagaaagccttctctgtgtactctggagatagatggagaagtgttttcagattcctgggaacagacaccagtgctccagctcctccaaagttctggcttagcagctgcaggcaagcattatgctgctattgaagaagcattaggggtatgcctggcaggtgtgagcatcctggctcgctggatttgtgggtgttttcaggccttccattccccatagaggcaaggcccaatggccagtgttgcttatcgcttcagggtaggtgggcacaggcttggactagagaggagaaagattggtgtaatctgctttcctgtctgtagtgcctgctgtttggaaagggtgagttagaatatgttccaaggttggtgaggggctaaattgcacgcgtttaggctggcaccccgtgtgcagggcacactggcagagggtatctgaagtgggagaagaagcaggtagaccacctgtcccaggctgtggtgccaccctctctggcattcatgcagagcaaagcactttaaccatttcttttaaaaggtctatagattggggtagagtttggcctaaggtctctagggtccctgcctaaatcccactcctgagggagggggaagaagagagggtgggagattctcctccagtcctgtctcatctcctgggagaggcagacgagtgagtttcacacagaagaatttcatgtgaatggggccagcaagagctgccctgtgtccatggtgggtgtgccgggctggctgggaacaaggagcagtatgttgagtagaaagggtgtgggcgggtatagattggcctgggagtgttacagtagggagcaggcttctcccttctttctgggactcagagccccgcttcttcccactccacttgttgtcccatgaaggaagaagtggggttcctcctgacccagctgcctcttacggtttggtatgggacatgcacacacactcacatgctctcactcaccacactggagggcacacacgtaccccgcacccagcaactcctgacagaaagctcctcccacccaaatgggccaggccccagcatgatcctgaaatctgcatccgccgtggtttgtattcattgtgcatatcagggataccctcaagctggactgtgggttccaaattactcatagaggagaaaaccagagaaagatgaagaggaggagttaggtctatttgaaatgccaggggctcgctgtgaggaataggtgaaaaaaaacttttcaccagcctttgagagactagactgaccccacccttccttcagtgagcagaatcactgtggtcagtctcctgtcccagcttcagttcatgaatactcctgttcctccagtttcccatcctttgtccctgctgtcccccacttttaaagatgggtctcaacccctccccaccacgtcatgatggatggggcaaggtggtggggactaggggagcctggtatacatgcggcttcattgccaataaatttcatgcactttaaagtcctgtggcttgtgacctcttaataaagtgttagaatccattttg

SEQ ID NO: 26365 - protein, 747 aa, Homo sapiens; identical to SEQ ID NO: 3515

SEQ ID NO: 26366 - DNA, 4640 bp, Homo sapiens
ctagcagcgggacccgcggctcgggatggaggctggacacctgttctgctgttgtgtcctgccattctcctgaagaacagaggcacactgtaaaacccaacacttccccttgcattctataagattacagcaagatggaaataccaaatccccctacctccaaatgtatcacttactggaaaagaaaagtgaaatctgaatacatgcgacttcgacaacttaaacggcttcaggcaaatatgggtgcaaaggctttgtatgtggcaaattttgcaaaggttcaagaaaaaacccagatcctcaatgaagaatggaagaagcttcgtgtccaacctgttcagtcaatgaagcctgtgagtggacacccttttctcaaaaagtgtaccatagagagcattttcccgggatttgcaagccaacatatgttaatgaggtcactgaacacagttgcattggttcccatcatgtattcctggtcccctctccaacagaactttatggtagaagatgagacggttttgtgcaatattccctacatgggagatgaagtgaaagaagaagatgagacttttattgaggagctgatcaataactatgatgggaaagtccatggtgaagaagagatgatccctggatccgttctgattagtgatgctgtttttctggagttggtcgatgccctgaatcagtactcagatgaggaggaggaagggcacaatgacacctcagatggaaagcaggatgacagcaaagaagatctgccagtaacaagaaagagaaagcgacatgctattgaaggcaacaaaaagagttccaagaaacagttcccaaatgacatgatcttcagtgcaattgcctcaatgttccctgagaatggtgtcccagatgacatgaaggagaggtatcgagaactaacagagatgtcagaccccaatgcacttccccctcagtgcacacccaacatcgatggccccaatgccaagtctgtgcagcgggagcaatctctgcactccttccacacacttttttgccggcgctgctttaaatacgactgcttccttcacccttttcatgccacccctaatgtatataaacgcaagaataaagaaatcaagattgaaccagaaccatgtggcacagactgcttccttttgctggaaggagcaaaggagtatgccatgctccacaacccccgctccaagtgctctggtcgtcgccggagaaggcaccacatagtcagtgcttcctgctccaatgcctcagcctctgctgtggctgagactaaagaaggagacagtgacagggacacaggcaatgactgggcctccagttcttcagaggctaactctcgctgtcagactcccacaaaacagaaggctagtccagccccacctcaactctgcgtagtggaagcaccctcggagcctgtggaatggactggggctgaagaatctctttttcgagtcttccatggcacctacttcaacaacttctgttcaatagccaggcttctggggaccaagacgtgcaagcaggtctttcagtttgcagtcaaagaatcacttatcctgaagctgccaacagatgagctcatgaacccctcacagaagaagaaaagaaagcacagattgtgggctgcacactgcaggaagattcagctgaagaaagataactcttccacacaagtgtacaactaccaaccctgcgaccacccagaccgcccctgtgacagcacctgcccctgcatcatgactcagaatttctgtgagaagttctgccagtgcaacccagactgtcagaatcgtttccctggctgtcgctgtaagacccagtgcaataccaagcaatgtccttgctatctggcagtgcgagaatgtgaccctgacctgtgtctcacctgtggggcctcagagcactgggactgcaaggtggtttcctgtaaaaactgcagcatccagcgtggacttaagaagcacctgctgctggccccctctgatgtggccggatggggcaccttcataaaggagtctgtgcagaagaacgaattcatttctgaatactgtggtgagctcatctctcaggatgaggctgatcgacgcggaaaggtctatgacaaatacatgtccagcttcctcttcaacctcaataatgattttgtagtggatgctactcggaaaggaaacaaaattcgatttgcaaatcattcagtgaatcccaactgttatgccaaagtggtcatggtgaatggagaccatcggattgggatctttgccaagagggcaattcaagctggcgaagagctcttctttgattacaggtacagccaagctgatgctctcaagtacgtggggatcgagagggagaccgacgtcctttagccctcccaggccccacggcagcacttatggtagcggcactgtcttggctttcgtgctcacaccactgctgctcgagtctcctgcactgtgtctcccacactgagaaaccccccaacccactccctctgtagtgaggcctctgccatgtccagagggcacaaaactgtctcaatgagaggggagacagaggcagctagggcttggtctcccaggacagagagttacagaaatgggagactgtttctctggcctcagaagaagcgagcacaggctggggtggatgacttatgcgtgatttcgtgtcggctccccaggctgtggcctcaggaatcaacttaggcagttcccaacaagcgctagcctgtaattgtagctttccacatcaagagtccttatgttattgggatgcaggcaaacctctgtggtcctaagacctggagaggacaggctaagtgaagtgtggtccctggagcctacaagtggtctgggttagaggcgagcctggcaggcagcacagactgaactcagaggtagacaggtcaccttactacctcctccctcgtggcagggctcaaactgaaagagtgtgggttctaagtacaggcattcaaggctgggggaaggaaagctacgccatccttccttagccagagagggagaaccagccagatgatagtagttaaactgctaagcttgggcccaggaggctttgagaaagccttctctgtgtactctggagatagatggagaagtgttttcagattcctgggaacagacaccagtgctccagctcctccaaagttctggcttagcagctgcaggcaagcattatgctgctattgaagaagcattaggggtatgcctggcaggtgtgagcatcctggctcgctggatttgtgggtgttttcaggccttccattccccatagaggcaaggcccaatggccagtgttgcttatcgcttcagggtaggtgggcacaggcttggactagagaggagaaagattggtgtaatctgctttcctgtctgtagtgcctgctgtttggaaagggtgagttagaatatgttccaaggttggtgaggggctaaattgcacgcgtttaggctggcaccccgtgtgcagggcacactggcagagggtatctgaagtgggagaagaagcaggtagaccacctgtcccaggctgtggtgccaccctctctggcattcatgcagagcaaagcactttaaccatttcttttaaaaggtctatagattggggtagagtttggcctaaggtctctagggtccctgcctaaatcccactcctgagggagggggaagaagagagggtgggagattctcctccagtcctgtctcatctcctgggagaggcagacgagtgagtttcacacagaagaatttcatgtgaatggggccagcaagagctgccctgtgtccatggtgggtgtgccgggctggctgggaacaaggagcagtatgttgagtagaaagggtgtgggcgggtatagattggcctgggagtgttacagtagggagcaggcttctcccttctttctgggactcagagccccgcttcttcccactccacttgttgtcccatgaaggaagaagtggggttcctcctgacccagctgcctcttacggtttggtatgggacatgcacacacactcacatgctctcactcaccacactggagggcacacacgtaccccgcacccagcaactcctgacagaaagctcctcccacccaaatgggccaggccccagcatgatcctgaaatctgcatccgccgtggtttgtattcattgtgcatatcagggataccctcaagctggactgtgggttccaaattactcatagaggagaaaaccagagaaagatgaagaggaggagttaggtctatttgaaatgccaggggctcgctgtgaggaataggtgaaaaaaaacttttcaccagcctttgagagactagactgaccccacccttccttcagtgagcagaatcactgtggtcagtctcctgtcccagcttcagttcatgaatactcctgttcctccagtttcccatcctttgtccctgctgtcccccacttttaaagatgggtctcaacccctccccaccacgtcatgatggatggggcaaggtggtggggactaggggagcctggtatacatgcggcttcattgccaataaatttcatgcactttaaagtcctgtggcttgtgacctcttaataaagtgttagaatccattttg

SEQ ID NO: 26367 - protein, 747 aa, Homo sapiens; identical to SEQ ID NO: 3515

SEQ ID NO: 26368 - DNA, 3022 bp, Homo sapiens
gattaatatctggtatcattttaggcccctctcaatcttagttttctaatctgcttttttcagcgaatacattataaacactttcccacaaacatgatttaaccagcctgagcaacatagtgagacccatctcacaaaataataataggctgggtgtggtggcttacgcctgtaatcccagcactttgggaggctgaggcaggtggatcacttgaggccaggagttcaagaccagcctagcaaacatggtgaaaccccatctctactaaaaatacaaaaatcagctggggggcgtggtggtgtgcacctgtagtcccagctactcaggtggctgaggcacaagaatcgcttgaaccctggaggcagaggttgcaatgagccaagatcatgccactgcactccagcctgggcaacagagcaagactctgtctcaaaaaacaaaacaaaacaaaacaaaaaaccccacttataataataataaagataatttttctgccataataacagatctaaaagcatagaggcaactaccatattgactactttctaattccatttgattcatgttttcactgggaatttggagaaaatcaacccagaagcctactggttattgacttggagttgggtaggaacctagcctcgggtttatcctgcttgcagtggtcatggtgaatggagaccatcggattgggatctttgccaagagggcaattcaagctggcgaagagctcttctttgattacaggtacagccaagctgatgctctcaagtacgtggggatcgagagggagaccgacgtcctttagccctcccaggccccacggcagcacttatggtagcggcactgtcttggctttcgtgctcacaccactgctgctcgagtctcctgcactgtgtctcccacactgagaaaccccccaacccactccctctgtagtgaggcctctgccatgtccagagggcacaaaactgtctcaatgagaggggagacagaggcagctagggcttggtctcccaggacagagagttacagaaatgggagactgtttctctggcctcagaagaagcgagcacaggctggggtggatgacttatgcgtgatttcgtgtcggctccccaggctgtggcctcaggaatcaacttaggcagttcccaacaagcgctagcctgtaattgtagctttccacatcaagagtccttatgttattgggatgcaggcaaacctctgtggtcctaagacctggagaggacaggctaagtgaagtgtggtccctggagcctacaagtggtctgggttagaggcgagcctggcaggcagcacagactgaactcagaggtagacaggtcaccttactacctcctccctcgtggcagggctcaaactgaaagagtgtgggttctaagtacaggcattcaaggctgggggaaggaaagctacgccatccttccttagccagagagggagaaccagccagatgatagtagttaaactgctaagcttgggcccaggaggctttgagaaagccttctctgtgtactctggagatagatggagaagtgttttcagattcctgggaacagacaccagtgctccagctcctccaaagttctggcttagcagctgcaggcaagcattatgctgctattgaagaagcattaggggtatgcctggcaggtgtgagcatcctggctcgctggatttgtgggtgttttcaggccttccattccccatagaggcaaggcccaatggccagtgttgcttatcgcttcagggtaggtgggcacaggcttggactagagaggagaaagattggtgtaatctgctttcctgtctgtagtgcctgctgtttggaaagggtgagttagaatatgttccaaggttggtgaggggctaaattgcacgcgtttaggctggcaccccgtgtgcagggcacactggcagagggtatctgaagtgggagaagaagcaggtagaccacctgtcccaggctgtggtgccaccctctctggcattcatgcagagcaaagcactttaaccatttcttttaaaaggtctatagattggggtagagtttggcctaaggtctctagggtccctgcctaaatcccactcctgagggagggggaagaagagagggtgggagattctcctccagtcctgtctcatctcctgggagaggcagacgagtgagtttcacacagaagaatttcatgtgaatggggccagcaagagctgccctgtgtccatggtgggtgtgccgggctggctgggaacaaggagcagtatgttgagtagaaagggtgtgggcgggtatagattggcctgggagtgttacagtagggagcaggcttctcccttctttctgggactcagagccccgcttcttcccactccacttgttgtcccatgaaggaagaagtggggttcctcctgacccagctgcctcttacggtttggtatgggacatgcacacacactcacatgctctcactcaccacactggagggcacacacgtaccccgcacccagcaactcctgacagaaagctcctcccacccaaatgggccaggccccagcatgatcctgaaatctgcatccgccgtggtttgtattcattgtgcatatcagggataccctcaagctggactgtgggttccaaattactcatagaggagaaaaccagagaaagatgaagaggaggagttaggtctatttgaaatgccaggggctcgctgtgaggaataggtgaaaaaaaacttttcaccagcctttgagagactagactgaccccacccttccttcagtgagcagaatcactgtggtcagtctcctgtcccagcttcagttcatgaatactcctgttcctccagtttcccatcctttgtccctgctgtcccccacttttaaagatgggtctcaacccctccccaccacgtcatgatggatggggcaaggtggtggggactaggggagcctggtatacatgcggcttcattgccaataaatttcatgcacttt

SEQ ID NO: 26369 - protein, 78 aa, Homo sapiens; identical to SEQ ID NO: 26363

SEQ ID NO: 26370 - DNA, 725 bp, Homo sapiens
tctatgttcaggcctctctatgaacactcttttcacctccctggttcaagtgattcttgtgtgtcagccttctaagtagctgggactataggcatgcaccaccatgcccagctaagttttgtatttttagtagagttggggttttaccatgttggccaggctggtctcaaactcctggcctcaagtgatccgctcccctcggcctctcaaagtactgactgggattacaggcgtgagccacctcacatccagattctaattgggactgtggattttgttgttaatatgtagactactctaacttccttatttactggtagcatatatcagataagtccagatagcactgatgtttatatatctccaaacaatcagtggttaggttaacaaagcagctgtaatcaaaatgctatgacaaaaggaaaaaagatcacacagatttgtttacgtgttctgataatcgcactcaggagctttttatcatttccaattcaggcaacaaaaagagttccaagaaacagttcccaaatgacatgatcttcagtgcaattgcctcaatgttccctgagaatggtgtcccagatgacatgaaggagaggtagggaaagctgtcccacttaggccatatacagagtgctcggacaaaacctttattccctcctaatttttggttagtaaaaagctttgtttatggtaagggcattatgatttgcccgcaatttgat

SEQ ID NO: 26371 - protein, 65 aa, Homo sapiens [sequence omitted]

SEQ ID NO: 26372 - DNA, 4302 bp, Homo sapiens
cgcggctggagggggagtcgctgcctcacccgcgcctggcgcccgcggctccctccgcctcgccggcgttggcccaccctctcgtagctcaccccgcgaggctggacagctcccggaaccccggaaccgggatctatttcgggggctcggctgcgtggcgcccaggactctccagggtctcccaggatcgctccccgaattcgagtcgccccctctctctttcgggaataccagctgatgtcagtccgccagccaaaaccagggaggagaagcgggagccagccctctggagtcgggagaaggtctggggagtggggtagaggggaaagcaaagtccaaataccttcccttcagacacctcctggggcctagaccccacaaacctgttgtggggagggcaaaatacgatgactacgttcccaggaagaaggtgccacagctcttcaggaccacggttgggagaaagaatggaggggttttagaaccttcagtgtgcgacttcatgtgccagtcttcatctcaggatctcaagctcttggatcatgggcacggataacctgttgtcctcctctatggtcaagaggctgcttttgcaaagaatccagtgggagagagtcaatggcctgcttgacgtgaactccaaagtcctcctggccaagggtcatcctgcctggagcagggcaagaggtgacttgacccttaggaagagtggcatctctaatcttcaacttccaccaccaccacacacacaaatgcagagccacccaggaggaagtaaaaagtgctagggccttctacaccttgaaattatatgtggagcatcctgcaataagcatctctgtgatgcacagtcattcacacctgctggtctctcccccagctgtctgcaaaatgaagagcagagcacaagagaacatgtgagaaagaggcagggtcggggaagccagaagtcctggctggcaggggctgatccttcctaactagagagaggagacacacttcttgagagggcagggagatagcagggagaactagaggagctatagccagggagccagctaagggagggaagacaaaggagtggagacacaactactccatctctccccagcctcctcatctccagaatgatggcacacctgggaggggcctgactacctttcagggggaaaaatggtcactgggcctggtgcggtggctcatgcctgtcatcccagcactttgggaggccaaggtgggtggataacctgaggtcaggagttcgagaccagccagaacaacatggtgaaaccccatctctactaaaaatacaaaaatttgctgggcgtggtggtgcctgcctgtaatccagctacttaggaggctgaggcaggaaaatcgcttgaacccgaaaggcagaggttgcagtgtgccgagattaagccactgaactccagcctgggcaacaagagtgaaactctgtctgaaggaaaaaaaaaaaaagccattggagaagacggggtccttccagagaagctgatcaagtcatattactcatcaactgctggggacctaacagtcactaccatgtattgaacacttactatgggctgcataatgtgcctactgacgcatgtgctgaaagctttgcatgtatgtcttaaagccacaccactataacatcagaattatcttctccatgtgtgaaatggggaaacaggaggagaaagtttacaatcccagagctagtaattggcagagccaggatttaaacccaggatatcttgatgctaaagttcatgtcttaaccattatgatttatcacctcctctcactgcagatcagaataccaatttcttactgggtctggaaaggaggagagaaggatagagagtttcttctaggaccaaattgattcctccacaaataggaagatccccagactgtgtgcacacaccctcctcctccttccttctccaaccctggctggaccatgacatcacatggtggaggctgttttttaaaaagaactcaggccagatttacaagaatgatgctcaggcagcgtgactgtcaaggaccgtggccaagtgacccatagcacacacccagcagtgctgagaacatagctagtcccttagcacctggggctgactcatggttgctgtaggacccaatgccagatgccaggattgctttctccctccattcattaggactgtcccatgaaaccctccccaggaacccttctaccccatcccggcatgccaggagcctggatactgcataacacagggtactcatatttgtttaccaagccttgaagatgacaggcaatatgctgatatgctcaatgcatcatacaaattgttttatttaaaactgaactattaaattaagtatcatagcaactcactttacagacaaggaaactgaagctcaaaggttaagtaagggccaggcatggtggctcactcctgtaatcccagcagtttgggaggctgaggtgggaggaggattgcttaagcccgcgagtttgagaccagcctaggcaatatagggagaccccatctctacaaaaaattatctgggcctggtgatgtgtgcctgtagtcccagctacttgagaggctgaggtgggaggattgcttgagcccagaagttgaggctgcagtgagccatgatcatgccattgtactccagcctgggcagcaaagcaaaaccctgtattgaaaacaaacaaacaggctgggcacggtggctcacacctgtaatcccaacactttgggaggccgaggcaggtggatcacctgaggtcaggagttagagaccagcctggccaacatggtgaaacccgcctctactgaaaatacaaaaattagcagggcattgtggcacatgccaaggtgggcagatcacctgaggtcaggagttcgagaccagcctggccaacatggtgaaaccccatctctactaaaaatacaaaaattagctgggcgtggtggtgggcgcctgtagtcccagctactcaggaggctgaggcaggagaatcgcttgaacctgggaggtggaggttgcagtaagccaagatagtgccactgcactccagcctgggcgacagacaaaaaaaaaaaaaaaaagaagttggagcagtgtgaagaagaggtgagaacaacccccggactgatcaaagcccacatgccactgcatcccgcgtccagcgcctacatcctgccaccgtcgctgccaccaccatgcccaagagaaaggctaaaggggatgctaaaggagacaaagccaaggtgaaggacgaaccatagagaagatccacaaggttgtctgctaaacctgctcctccaaagccacagcccaagcctaaaaaggcccctgcaaagaagggagagaagatacccaaagggaaaaagggaaaagctgatgctggcaaggaggggaataaccctgcagaaaatggagatgccaaaacagaccaggcacagaaagctgaaggtgctggagttgccaagtgaagtgtgtgcatttttgataactgtgtacttctggtgactgtacaatttcaaatactattttttatcaagttttataaaaatgcagaattttgttttactttttttttaagctatgttgttaacacacagaacacttcattgttgttttttggggaaggggcatatgtcactagtagaatgtctccaaagctggattgatgtggggaaaacacatttcccttccagttttgaaagatttcctcttggctcccaggaggagggattccctgactttgacacacatggccaccttggcacaaaagccttgtggtatggaaaaacaaattcgtttttatgtcctcttctccctttccatccttcagcatagacttaactcccttaagcccagacatctgttgggacctgacctctagtcattggttaccagtgtgtcaggcaatctggattttccagtgatgccgctgagatggcacctgtcaaaagagtagtggttccatttctagattgtggatattcagataaattctgccattttcatttcacttcatgaaagtcaggttcagcctgtgaaaagttgttaaacaacatgctaaatgtgaaatgtcaaccctcactctaaactttccctgttcagagcatcagatgaagacttcagtggctttctgatttttggtagtccattgaagaagggagtttgaaagttgttgtatactgttaacgattgtctgcccatgtcctgcctgaaatgccatgattgtttatggaacgtatctttaataaagctggatacagcttg

SEQ ID NO: 26373 - protein, 81 aa, Homo sapiens
MGTDNLLSSSMVKRLLLQRIQWERVNGLLDVNSKVLLAKGHPAWSRARGDLTLRKSGISNLQLPPPPHTQMQSHPGGSKKC

SEQ ID NO: 26374 - DNA, 3317 bp, Homo sapiens
gacgctcggggcccgcggctggagggggagtcgctgcctcacccgcgcctggcgcccgcggctccctccgcctcgccggcgttggcccaccctctcgtagctcaccccgcgaggctggacagctcccggaaccccggaaccgggatctatttcgggggctcggctgcgtggcgcccaggactctccagggtctcccaggatcgctccccgaattcgagtcgccccctctctctttcgggtctggaggggtcggcaagctgctctcccagacgtggagaagagggagggggctgggagctccagcggcctctcgacgccgctgcttctaaggggctgtcctgggttgtgggggaaggggcgcctggagctgagccatgcagctcagggttccttatcctatccctaggaataccagctgatgtcagtccgccagccaaaaccagggaggagaagcgggagccagccctctggagtcgggagaaggtctggggagtggggtagaggggaaagcaaagtccaaataccttcccttcagacacctcctggggcctagaccccacaaacctgttgtggggagggcaaaatacgatgactacgttcccaggaagaaggtgccacagctcttcaggaccacggttgggagaaagaatggaggggttttagaaccttcagtgtgcgacttcatgtgccagtcttcatctcaggatctcaagctcttggatcatgggcacggataacctgttgtcctcctctatggtcaagaggctgcttttgcaaagaatccagtgggagagagtcaatggcctgcttgacgtgaactccaaagtcctcctgatcagaataccaatttcttactgggtctggaaaggaggagagaaggatagagagtttcttctaggaccaaattgattcctccacaaataggaagatccccagactgtgtgcacacaccctcctcctccttccttctccaaccctggctggaccatgacatcacatggtggaggctgttttttaaaaagaactcaggccagatttacaagaatgatgctcaggcagcgtgactgtcaaggaccgtggccaagtgacccatagcacacacccagcagtgctgagaacatagctagtcccttagcacctggggctgactcatggttgctgtaggacccaatgccagatgccaggattgctttctccctccattcattaggactgtcccatgaaaccctccccaggaacccttctaccccatcccggcatgccaggagcctggatactgcataacacagggtactcatatttgtttaccaagccttgaagatgacaggcaatatgctgatatgctcaatgcatcatacaaattgttttatttaaaactgaactattaaattaagtatcatagcaactcactttacagacaaggaaactgaagctcaaaggttaagtaagggccaggcatggtggctcactcctgtaatcccagcagtttgggaggctgaggtgggaggaggattgcttaagcccgcgagtttgagaccagcctaggcaatatagggagaccccatctctacaaaaaattatctgggcctggtgatgtgtgcctgtagtcccagctacttgagaggctgaggtgggaggattgcttgagcccagaagttgaggctgcagtgagccatgatcatgccattgtactccagcctgggcagcaaagcaaaaccctgtattgaaaacaaacaaacaggctgggcacggtggctcacacctgtaatcccaacactttgggaggccgaggcaggtggatcacctgaggtcaggagttagagaccagcctggccaacatggtgaaacccgcctctactgaaaatacaaaaattagcagggcattgtggcacatgccaaggtgggcagatcacctgaggtcaggagttcgagaccagcctggccaacatggtgaaaccccatctctactaaaaatacaaaaattagctgggcgtggtggtgggcgcctgtagtcccagctactcaggaggctgaggcaggagaatcgcttgaacctgggaggtggaggttgcagtaagccaagatagtgccactgcactccagcctgggcgacagacaaaaaaaaaaaaaaaaagaagttggagcagtgtgaagaagaggtgagaacaacccccggactgatcaaagcccacatgccactgcatcccgcgtccagcgcctacatcctgccaccgtcgctgccaccaccatgcccaagagaaaggctaaaggggatgctaaaggagacaaagccaaggtgaaggacgaaccatagagaagatccacaaggttgtctgctaaacctgctcctccaaagccacagcccaagcctaaaaaggcccctgcaaagaagggagagaagatacccaaagggaaaaagggaaaagctgatgctggcaaggaggggaataaccctgcagaaaatggagatgccaaaacagaccaggcacagaaagctgaaggtgctggagttgccaagtgaagtgtgtgcatttttgataactgtgtacttctggtgactgtacaatttcaaatactattttttatcaagttttataaaaatgcagaattttgttttactttttttttaagctatgttgttaacacacagaacacttcattgttgttttttggggaaggggcatatgtcactagtagaatgtctccaaagctggattgatgtggggaaaacacatttcccttccagttttgaaagatttcctcttggctcccaggaggagggattccctgactttgacacacatggccaccttggcacaaaagccttgtggtatggaaaaacaaattcgtttttatgtcctcttctccctttccatccttcagcatagacttaactcccttaagcccagacatctgttgggacctgacctctagtcattggttaccagtgtgtcaggcaatctggattttccagtgatgccgctgagatggcacctgtcaaaagagtagtggttccatttctagattgtggatattcagataaattctgccattttcatttcacttcatgaaagtcaggttcagcctgtgaaaagttgttaaacaacatgctaaatgtgaaatgtcaaccctcactctaaactttccctgttcagagcatcagatgaagacttcagtggctttctgatttttggtagtccattgaagaagggagtttgaaagttgttgtatactgttaacgattgtctgcccatgtcctgcctgaaatgccatgattgtttatggaacgtatctttaataaagctggatacagcttg

SEQ ID NO: 26375 - protein, 61 aa, Homo sapiens
MGTDNLLSSSMVKRLLLQRIQWERVNGLLDVNSKVLLIRIPISYWVWKGGEKDREFLLGPN

SEQ ID NO: 26376 - DNA, 3342 bp, Homo sapiens
atcgtgcagcaaggaggcgaggagcggcggcggcgctgagccgggcccgggtgtgggggcgcctatatccccagcccaagctgcaggaagccgcgccgcttcctcggaggggctgggacggcggcggccacgtggggggcgggggcgacgctcggggcccgcggctggagggggagtcgctgcctcacccgcgcctggcgcccgcggctccctccgcctcgccggcgttggcccaccctctcgtagctcaccccgcgaggctggacagctcccggaaccccggaaccgggatctatttcgggggctcggctgcgtggcgcccaggactctccagggtctcccaggatcgctccccgaattcgagtcgccccctctctctttcgggtctggaggggtcggcaagctgctctcccagacgtggagaagagggagggggctgggagctccagcggcctctcgacgccgctgcttctaaggggctgtcctgggttgtgggggaaggggcgcctggagctgagccatgcagctcagggttccttatcctatccctaggaataccagctgatgtcagtccgccagccaaaaccagggaggagaagcgggagccagccctctggagtcgggagaaggaagaaggtgccacagctcttcaggaccacggttgggagaaagaatggaggggttttagaaccttcagtgtgcgacttcatgtgccagtcttcatctcaggatctcaagctcttggatcatgggcacggataacctgttgtcctcctctatggtcaagaggctgcttttgcaaagaatccagtgggagagagtcaatggcctgcttgacgtgaactccaaagtcctcctgatcagaataccaatttcttactgggtctggaaaggaggagagaaggatagagagtttcttctaggaccaaattgattcctccacaaataggaagatccccagactgtgtgcacacaccctcctcctccttccttctccaaccctggctggaccatgacatcacatggtggaggctgttttttaaaaagaactcaggccagatttacaagaatgatgctcaggcagcgtgactgtcaaggaccgtggccaagtgacccatagcacacacccagcagtgctgagaacatagctagtcccttagcacctggggctgactcatggttgctgtaggacccaatgccagatgccaggattgctttctccctccattcattaggactgtcccatgaaaccctccccaggaacccttctaccccatcccggcatgccaggagcctggatactgcataacacagggtactcatatttgtttaccaagccttgaagatgacaggcaatatgctgatatgctcaatgcatcatacaaattgttttatttaaaactgaactattaaattaagtatcatagcaactcactttacagacaaggaaactgaagctcaaaggttaagtaagggccaggcatggtggctcactcctgtaatcccagcagtttgggaggctgaggtgggaggaggattgcttaagcccgcgagtttgagaccagcctaggcaatatagggagaccccatctctacaaaaaattatctgggcctggtgatgtgtgcctgtagtcccagctacttgagaggctgaggtgggaggattgcttgagcccagaagttgaggctgcagtgagccatgatcatgccattgtactccagcctgggcagcaaagcaaaaccctgtattgaaaacaaacaaacaggctgggcacggtggctcacacctgtaatcccaacactttgggaggccgaggcaggtggatcacctgaggtcaggagttagagaccagcctggccaacatggtgaaacccgcctctactgaaaatacaaaaattagcagggcattgtggcacatgccaaggtgggcagatcacctgaggtcaggagttcgagaccagcctggccaacatggtgaaaccccatctctactaaaaatacaaaaattagctgggcgtggtggtgggcgcctgtagtcccagctactcaggaggctgaggcaggagaatcgcttgaacctgggaggtggaggttgcagtaagccaagatagtgccactgcactccagcctgggcgacagacaaaaaaaaaaaaaaaaagaagttggagcagtgtgaagaagaggtgagaacaacccccggactgatcaaagcccacatgccactgcatcccgcgtccagcgcctacatcctgccaccgtcgctgccaccaccatgcccaagagaaaggctaaaggggatgctaaaggagacaaagccaaggtgaaggacgaaccatagagaagatccacaaggttgtctgctaaacctgctcctccaaagccacagcccaagcctaaaaaggcccctgcaaagaagggagagaagatacccaaagggaaaaagggaaaagctgatgctggcaaggaggggaataaccctgcagaaaatggagatgccaaaacagaccaggcacagaaagctgaaggtgctggagttgccaagtgaagtgtgtgcatttttgataactgtgtacttctggtgactgtacaatttcaaatactattttttatcaagttttataaaaatgcagaattttgttttactttttttttaagctatgttgttaacacacagaacacttcattgttgttttttggggaaggggcatatgtcactagtagaatgtctccaaagctggattgatgtggggaaaacacatttcccttccagttttgaaagatttcctcttggctcccaggaggagggattccctgactttgacacacatggccaccttggcacaaaagccttgtggtatggaaaaacaaattcgtttttatgtcctcttctccctttccatccttcagcatagacttaactcccttaagcccagacatctgttgggacctgacctctagtcattggttaccagtgtgtcaggcaatctggattttccagtgatgccgctgagatggcacctgtcaaaagagtagtggttccatttctagattgtggatattcagataaattctgccattttcatttcacttcatgaaagtcaggttcagcctgtgaaaagttgttaaacaacatgctaaatgtgaaatgtcaaccctcactctaaactttccctgttcagagcatcagatgaagacttcagtggctttctgatttttggtagtccattgaagaagggagtttgaaagttgttgtatactgttaacgattgtctgcccatgtcctgcctgaaatgccatgattgtttatggaacgtatctttaataaagctggatacagcttg

SEQ ID NO: 26377 - protein, 65 aa, Homo sapiens
MSVRQPKPGRRSGSQPSGVGRRKKVPQLFRTTVGRKNGGVLEPSVCDFMCQSSSQDLKLLDHGHG

SEQ ID NO: 26378 - DNA, 1679 bp, Homo sapiens
cagcaaggaggcgaggagcggcggcggcgctgagccgggcccgggtgtgggggcgcctatatccccagcccaagctgcaggaagccgcgccgcttcctcggaggggctgggacggcggcggccacgtggggggcgggggcgacgctcggggcccgcggctggagggggagtcgctgcctcacccgcgcctggcgcccgcggctccctccgcctcgccggcgttggcccaccctctcgtagctcaccccgcgaggctggacagctcccggaaccccggaaccgggatctatttcgggggctcggctgcgtggcgcccaggactctccagggtctcccaggatcgctccccgaattcgagtcgccccctctctctttcgggaataccagctgatgtcagtccgccagccaaaaccagggaggagaagcgggagccagccctctggagtcgggagaaggaagaaggtgccacagctcttcaggaccacggttgggagaaagaatggaggggttttagaaccttcagtgtgcgacttcatgtgccagtcttcatctcaggatctcaagctcttggatcatgggcacggataacctgttgtcctcctctatggtcaagaggctgcttttgcaaagaatccagtgggagagagtcaatggcctgcttgacgtgaactccaaagtcctcctgatcagaataccaatttcttactgggtctggaaaggaggagagaaggatagagagtttcttctaggaccaaattgattcctccacaaataggaagatccccagactgtgtgcacacaccctcctcctccttccttctccaaccctggctggaccatgacatcacatggtggaggctgttttttaaaaagaactcaggccagatttacaagaatgatgctcaggcagcgtgactgtcaaggaccgtggccaagtgacccatagcacacacccagcagtgctgagaacatagctagtcccttagcacctggggctgactcatggttgctgtaggacccaatgccagatgccaggattgctttctccctccattcattaggactgtcccatgaaaccctccccaggaacccttctaccccatcccggcatgccaggagcctggatactgcataacacagggtactcatatttgtttaccaagccttgaagatgacaggcaatatgctgatatgctcaatgcatcatacaaattgttttatttaaaactgaactattaaattaagtatcatagcaactcactttacagacaaggaaactgaagctcaaaggttaagtaagggccaggcatggtggctcactcctgtaatcccagcagtttgggaggctgaggtgggaggaggattgcttaagcccgcgagtttgagaccacctggccaacatggtgaaacccgcctctactgaaaatacaaaaattagcagggcattgtggcacatgccaaggtgggcagatcacctgaggtcaggagttcgagaccagcctggccaacatggtgaaaccccatctctactaaaaatacaaaaattagctgggcgtggtggtgggcgcctgtagtcccagctactcaggaggctgaggcaggagaatcgcttgaacctgggaggtggaggttgcagtaagccaagatagtgccactgcactccagcctgggcgacagac

SEQ ID NO: 26379 - protein, 65 aa, Homo sapiens; identical to SEQ ID NO: 26377

SEQ ID NO: 26380 - DNA, 1379 bp, Homo sapiens
cgcggctggagggggagtcgctgcctcacccgcgcctggcgcccgcggctccctccgcctcgccggcgttggcccaccctctcgtagctcaccccgcgaggctggacagctcccggaaccccggaaccgggatctatttcgggggctcggctgcgtggcgcccaggactctccagggtctcccaggatcgctccccgaattcgagtcgccccctctctctttcgggaataccagctgatgtcagtccgccagccaaaaccagggaggagaagcgggagccagccctctggagtcgggagaaggtctggggagtggggtagaggggaaagcaaagtccaaataccttcccttcagacacctcctggggcctagaccccacaaacctgttgtggggagggcaaaatacgatgactacgttcccaggaagaaggtgccacagctcttcaggaccacggttgggagaaagaatggaggggttttagaaccttcagtgtgcgacttcatgtgccagtcttcatctcaggatctcaagctcttggatcatgggcacggataacctgttgtcctcctctatggtcaagaggctgcttttgcaaagaatccagtgggagagagtcaatggcctgcttgacgtgaactccaaagtcctcctggaacaggggctcactctgttgcccacattggagtgcggtggaagaatcatggcatgctgcagtcttgagcttctaggctcaagagatcctcctggttcagtctcccaagtagctaggacagcaggcatattttttgtagatatgggggtcttgcttttttgccgaggctggtctcgaactcctggcttcaagcaatcttcctgcatcagtctcttaaagtgttgggattccaggcatgaaccactgcacctggcccttgggaagttttatttttagcctagggttggggttaagtttgcatcatgatgttgagacctccaaaggagaacttattgtagtcattcctgagctcaggtgtccaaactgtctaattggagaatctgggaattttctctcgttttgattttcctcttccacttttccatgccagttggatgtttgaatgtttttatcgacctctgagagcatccgggtaactgagggtttactttgggggtctttggagatgaatagggacaggagacctcacctttcttttccatgtagccataggagatagtcccacgatctgatgatctgtagcaatgggtagaggaagggccgtattaggaacagaagctagtttcgtcatgggaagtcccctgttttccactcctgagggccctcacattccctttctaagcccctttctgcttttgctattaaaaaatacagtttttaaattgc

SEQ ID NO: 26381 - protein, 128 aa, Homo sapiens
MGTDNLLSSSMVKRLLLQRIQWERVNGLLDVNSKVLLEQGLTLLPTLECGGRIMACCSLELLGSRDPPGSVSQVARTAGIFFVDMGVLLFCRGWSRTPGFKQSSCISLLKCWDSRHEPLHLALGKFYF

SEQ ID NO: 26382 - DNA, 851 bp, Homo sapiens
gccccttagaagcagcggcgtcgagaggccgctggagctcccagccccctccctcttctccacgtctgggagagcagcttgccgacccctccagacccgaaagagagagggggcgactcgaattcggggagcgatcctgggagaccctggagagtcctgggcgccacgcagccgagcccccgaaatagatcccggttccggggttccgggagctgtccagcctcgcgggctgtcctgaatccccacgaggccctggctcagcctcttcccaccacaggcacaccagggtcagaaggggggacggtgaagaactatgagacagctgtccaattttgctggaatcattataaggatcaaatggatcctatcgaaaaggattggtgcgactgggccatgattagcaggccttatagcaccctgcgagattgcctggagcactttgcagagttgtttgacctgggcttccccaatcccttggcagagaggatcatctttgagactcaccagatccactttgccaactgctccctggtgcagcccaccttctctgaccccccagaggatgtactcctggccatgatcatagcccccatctgcctcatccccttcctcatcactcttgtagtatggaggagtaaagacagtgaggcccaggcctagggggccacgagcttctcaacaaccatgttactccacttccccacccccaccaggcctccctcctcccctcctactcccttttctcactctcatccccaccacagatccctggattgctgggaatggaagccaggtggggtcatggcacaagttctgtaatcttcaaaataaaactttttttttgtacaatg

SEQ ID NO: 26383 - protein, 100 aa, Homo sapiens
MDPIEKDWCDWAMISRPYSTLRDCLEHFAELFDLGFPNPLAERIIFETHQIHFANCSLVQPTFSDPPEDVLLAMIIAPICLIPFLITLVVWRSKDSEAQA

SEQ ID NO: 26384 - DNA, 788 bp, Homo sapiens
gggatataggcgcccccacacccgggcccggctcagcgccgccgccgctcctcgcctccttgctgcacgatggcctcgctccgggtggagcgcgccggcggcccgcgtctccctaggacccgagtcgggcggccggcagcgctccgcctcctcctcctgctgggcgctgtcctgaatccccacgaggccctggctcagcctcttcccaccacaggcacaccagggtcagaaggggggacggtgaagaactatgagacagctgtccaattttgctggaatcattataaggatcaaatggatcctatcgaaaaggattggtgcgactgggccatgattagcaggccttatagcaccctgcgagattgcctggagcactttgcagagttgtttgacctgggcttccccaatcccttggcagagaggatcatctttgagactcaccagatccactttgccaactgctccctggtgcagcccaccttctctgaccccccagaggatgtactcctggccatgatcatagcccccatctgcctcatccccttcctcatcactcttgtagtatggaggagtaaagacagtgaggcccaggcctagggggccacgagcttctcaacaaccatgttactccacttccccacccccaccaggcctccctcctcccctcctactcccttttctcactctcatccccaccacagatccctggattgctgggaatggaagccaggtggggtcatggcacaagttctgtaatcttcaaaataaaactttttttttgtacaatg

SEQ ID NO: 26385 - protein, 175 aa, Homo sapiens
MASLRVERAGGPRLPRTRVGRPAALRLLLLLGAVLNPHEALAQPLPTTGTPGSEGGTVKNYETAVQFCWNHYKDQMDPIEKDWCDWAMISRPYSTLRDCLEHFAELFDLGFPNPLAERIIFETHQIHFANCSLVQPTFSDPPEDVLLAMIIAPICLIPFLITLVVWRSKDSEAQA

SEQ ID NO: 26386 - DNA, 674 bp, Homo sapiens
ttgctgcacgatggcctcgctccgggtggagcgcgccggcggcccgcgtctccctaggacccgagtcgggcggccggcagcgctccgcctcctcctcctgctgggcgctgtcctgaatccccacgaggccctggctcagcctcttcccaccacaggcacaccagggtcagaaggggggacggtgaagaactatgagacagctgtccaattttgctggaatcattataaggatcaaatggatcctatcattgcctggagcactttgcagagttgtttgacctgggcttccccaatcccttggcagagaggatcatctttgagactcaccagatccactttgccaactgctccctggtgcagcccaccttctctgaccccccagaggatgtactcctggccatgatcatagcccccatctgcctcatccccttcctcatcactcttgtagtatggaggagtaaagacagtgaggcccaggcctagggggccacgagcttctcaacaaccatgttactccacttccccacccccaccaggcctccctcctcccctcctactcccttttctcactctcatccccaccacagatccctggattgctgggaatggaagccaggtggggtcatggcacaagttctgtaatcttcaaaataaaactttttttttgtacaatg

SEQ ID NO: 26387 - protein, 130 aa, Homo sapiens
MASLRVERAGGPRLPRTRVGRPAALRLLLLLGAVLNPHEALAQPLPTTGTPGSEGGTVKNYETAVQFCWNHYKDQMDPIIAWSTLQSCLTWASPIPWQRGSSLRLTRSTLPTAPWCSPPSLTPQRMYSWP

SEQ ID NO: 26388 - DNA, 542 bp, Homo sapiens
cgggcgggaggcgcgagaggccccggaggggagaggggagaggggagaggggctggatggccgaggccggaacgggccctggggtgcgggttaggaccgacgtacctagcagcactggccctcggacggtccctgaccccacctcggggcgggcgcagcatgagctgcttcccacccagggaaagctggggtgctggccccggcccctcgaagagggcttaggaggacggaagctggccagagatgagggggctttgggcctgggtgtgagtgacaaggagctggtgccagcccctccctccccggcactgaggcgtccgtgggggctagattattcctccttttcttccaaggtagcctattttcggagggtctcagtcccccaacccccctcgcaggctccactgccggggtccccgctatgttaccctcctctcccgtttcttcccacagctgtcctgaatccccacgaggccctggctcagcctcttcccaccacaggcacaccagggtcagaaggggggacggtgaagaactatgag

SEQ ID NO: 26389 - protein, 161 aa, Homo sapiens
MAEAGTGPGVRVRTDVPSSTGPRTVPDPTSGRAQHELLPTQGKLGCWPRPLEEGLGGRKLARDEGALGLGVSDKELVPAPPSPALRRPWGLDYSSFSSKVAYFRRVSVPQPPSQAPLPGSPLCYPPLPFLPTAVLNPHEALAQPLPTTGTPGSEGGTVKNY

SEQ ID NO: 26390 - DNA, 506 bp, Homo sapiens
gaatccccacgaggccctggctcagcctcttcccaccacaggcacaccagggtcagaaggccttatagcaccctgcgagattgcctggagcactttgcagagttgtttgacctgggcttccccaatcccttggcagagaggatcatctttgagactcaccagatccactttgccaactgctccctggtgcagcccaccttctctgaccccccagaggatgtactcctggccatgatcatagcccccatctgcctcatccccttcctcatcactcttgtagtatggaggagtaaagacagtgaggcccaggcctagggggccacgagcttctcaacaaccatgttactccacttccccacccccaccaggcctccctcctcccctcctactcccttttctcactctcatccccaccacagatccctggattgctgggaatggaagccaggtggggtcatggcacaagttctgtaatcttcaaaataaaactttttttttgtacaatg

SEQ ID NO: 26391 - protein, 44 aa, Homo sapiens
MLLHFPTPTRPPSSPPTPFSHSHPHHRSLDCWEWKPGGVMAQVL

SEQ ID NO: 26392 - DNA, 1102 bp, Homo sapiens
gtccttagccggtagcttccgggtttcctgggctactacgatggcgatgagtttcgagtggccgtggcagtatcgcttcccacccttctttacgttacaaccgaatgtggacactcggcagaagcagctggccgcctggtgctcgctggtcctgtccttctgccgcctgcacaaacagtccagcatgacggtgatggaagctcaggagagcccgctcttcaacaacgtcaagctacagcgaaagcttcctgtggagtcgatccagattgtattagaggaactgaggaagaaagggaacctcgagtggttggataagagcaagtccagcttcctgatcatgtggcggaggccagaagaatgggggaaactcatctatcagtgggtttccaggagtggccagaacaactccgtctttaccctgtatgaactgactaatggggaagacacagaggatgaggagttccacgggctggatgaagccactctactgcgggctctgcaggccctacagcaggagcacaaggccgagatcatcactgtcagcgatggccgaggcgtcaagttcttctagcagggacctgtctccctttacttcttacctcccacctttccagggctttcaaaaggagacagacccagtgtcccccaaagactggatctgtgactccaccagactcaaaaggactccagtcctgaaggctgggacctggggatgggtttctcacaccccatatgtctgtcccttggatagggtgaggctgaagcaccagggagaaaatatgtgcttcttctcgccctacctcctttcccatcctagactgtccttgagccagggtctgtaaacctgacactttatatgtgttcacacatgtaagtacatacacacatgcgcctgcagcacatgcttctgtctcctcctcctcccacccctttagctgctgttgcctcccttctcaggctggtgctggatccttcctaggggatgggggaagccctggctgcaggcagccttccaggcaatatgaagataggaggcccacgggcctggcagtgagaggtgtggccccacaccgatttatgatattaaaatctcaactcccac

SEQ ID NO: 26393 - protein, 176 aa, Homo sapiens; identical to SEQ ID NO: 3519

SEQ ID NO: 26394 - DNA, 662 bp, Homo sapiens
ctgggctactacgatggcgatgagtttcgagtggccgtggcagtatcgcttcccacccttctttacgttacaaccgaatgtggacactcggcagaagcagctggccgcctggtgctcgctggtcctgtccttctgccgcctgcacaaacagtccagcatgacggtgatggaagctcaggagagcccgctcttcaacaacgtcaagctacagcgtatcctccctcaggctcttccacagcccatacacatgcacttctgcgctttcacacatgcccagacgcccccccgcgccagcccccttttacccatggtaggcagattcccacccaaactggacttaaagagtgaaaatgtgtagctgacattttcccctggcaaatgcagtaccataccctcttgttcttggcagtgatgactgctcggatgtcattaaggtcttagaatttctgccctgaagccaagttccaagttttttaacctaaacccttttgactatttgtatcttccatccttttctgtgtgaggcccagacttgggtaactacctttaattattttctctgcccccctcctgccaggaagtaagggtcatttgtttttgctgcctgattcatccctaaaatatctgtggagaaaggctgaaggaaggcaacagacagaggg

SEQ ID NO: 26395 - protein, 114 aa, Homo sapiens
MAMSFEWPWQYRFPPFFTLQPNVDTRQKQLAAWCSLVLSFCRLHKQSSMTVMEAQESPLFNNVKLQRILPQALPQPIHMHFCAFTHAQTPPRASPLLPMVGRFPPKLDLKSENV

SEQ ID NO: 26396 - DNA, 819 bp, Homo sapiens
tgggctactacgatggcgatgagtttcgagtggccgtggcagtatcgcttcccacccttctttacgttacaaccgaatgtggacactcggcagaagcagctggccgcctggtgctcgctggtcctgtccttctgccgcctgcacaaacagtccagcatgacggtgatggaagctcaggagagcccgctcttcaacaacgtcaagctacagcgaaagcttcctgtggagtcgatccagattgtattagaggaactgaggaagaaaggtgggttcagttccccagattccttatttttcttcctagttgggttttcctgagggcaaattaggataagtctttttccctttaataactttttctctctcctggcttgaaggccagagtcttctgtaaagtaggcagcccaattcccaagtcctttcttctttgtacacaaaattgaaatctctgtctgtgccctaaacctgaagagaagtggaagaaggatgagtgccttgtagataataatagtaaaataaatattgaatctttctttctgaaagctgagtctcttccactctgtcccaccttggtatttttttgcctctttgtttctttttagttcatgatactttttttttgggtggggagataaggtctcactctgtcatccaggctggagtgcagtggctcagtcctatctcactgcagcctcgactcccaggctcaagtgatcctcccatctcagcctcctgagtagttgagacctcaggcatgtgtcaccacacacctggctaattttttgtattttctatagagagaatttttttgtattttct

SEQ ID NO: 26397 - protein, 101 aa, Homo sapiens
MAMSFEWPWQYRFPPFFTLQPNVDTRQKQLAAWCSLVLSFCRLHKQSSMTVMEAQESPLFNNVKLQRKLPVESIQIVLEELRKKGGFSSPDSLFFFLVGFS

SEQ ID NO: 26398 - DNA, 4176 bp, Homo sapiens
gtccgtctgtcaggccgcctcctctccggccgtctgattttctacccttcggcgccctgctcttcctcatgttggcatccccggccacggagaccaccgtcctcatgtcccagactgaggccgacctggccctgcggcccccgcctcctcttggcaccgcggggcagccccgcctcgggccccctcctcgccgagcgcgccgcttctccgggaaggctgagccccggccgcgctcttctcgtctcagccgccgtagctcagtcgacttggggctgctgagctcttggtccctgccagcctcacccgctccggacccccccgatcctccggactccgctggtcctggccccgcgaggagcccaccgcctagctccaaagaaccccccgagggcacgtggaccgagggagcccctgtgaaggctgcggaagactccgcgcgtcccgagctcccggactctgcagtgggcccggggtccagggagccgctaagggtccctgaagctgtggccctagagcggcggcgggagcaggaagaaaaggaggacatggagacccaggctgtggcaacgtcccccgatggccgatacctcaagtttgacatcgagattggacgtggctccttcaagacggtgtatcgagggctagacaccgacaccacagtggaggtggcctggtgtgagctgcagactcggaaactgtctagagctgagcggcagcgcttctcagaggaggtggagatgctcaaggggctgcagcaccccaacatcgtccgcttctatgattcgtggaagtcggtgctgaggggccaggtttgcatcgtgctggtcaccgaactcatgacctcgggcacgctcaagacgtacctgaggcggttccgggagatgaagccgcgggtccttcagcgctggagccgccaaatcctgcggggacttcatttcctacactcccgggttcctcccatcctgcaccgggatctcaagtgcgacaatgtctttatcacgggacctactggctctgtcaaaatcggggacctgggcctggccacgctcaagcgcgcctcctttgccaagagtgtcatcgggaccccggaattcatggcccccgagatgtacgaggaaaagtacgatgaggccgtggacgtgtacgcgttcggcatgtgcatgctggagatggccacctctgagtacccgtactccgagtgccagaatgccgcgcaaatctaccgcaaggtcacttcgggcagaaagccgaacagcttccacaaggtgaagatacccgaggtgaaggagatcattgaaggctgcatccgcacggataagaacgagaggttcaccatccaggacctcctggcccacgccttcttccgcgaggagcgcggtgtgcacgtggaactagcggaggaggacgacggcgagaagccgggcctcaagctctggctgcgcatggaggacgcgcggcgcggggggcgcccacgggacaaccaggccatcgagttcctgttccagctgggccgggacgcggccgaggaggtggcacaggagatggtggctctgggcttggtctgtgaagccgattaccagccagtggcccgtgcagtacgtgaacgggttgctgccatccagcgaaagcgtgagaagctgcgtaaagcaagggaattggaggcactcccaccagagccaggacctccaccagcaactgtgcccatggcccccggtccccccagtgtcttcccccctgagcctgaggagccagaggcagaccagcaccagcccttccttttccgccacgccagctactcatctaccacttcggattgcgagactgatggctacctcagctcctccggcttcctggatgcctcagaccctgcccttcagccccctgggggggtgccatccagcctggctgagtcccatctctgcctgccctcggcttttgccctatccattccacgttctggccctggaagtgacttttcccccggggacagctatgcctcagatgcagcttcaggccttagcgatgtgggagaagggatgggacaaatgaggagacccccagggaggaatctccggcgcagaccccgatcccggctgcgggtcactagtgtctcagaccagaatgacagagtggttgagtgccagctacagacccataacagcaagatggtgaccttccgatttgatctggatggggacagcccggaagagattgcagctgccatggtatataacgagttcattctgccttcggagcgagatggatttctcagacggattcgggagattatccagcgagtggagaccctgttgaagagagacactggccccatggaggctgctgaagacaccctaagcccccaggaggagccagcaccattacctgccctgcccgtccccctcccagacccatccaatgaagagctccagagcagcacctccctggagcacaggagctggacagccttctccacctcctcatcttctcctggaactcctttgtctcctggaaacccattttcccctggaacccccatttccccaggtcccatcttccccatcacttctcccccatgtcatcccagcccctccccattctcccccatttcttcccaggtctcctcaaatccctctccacaccccaccagctctccacttccattctcctccagcacacccgagtttccggtcccactctctcagtgtccctggagttctctccccacgacttctccacctacgttctctcccacttgttctcaggtcactcttagttcccctttctttcctccgtgcccctccacttcttccttcccctccaccacagcagcccctctcctttctctggctagtgccttctcactggctgtgatgactgtggcccagtccctgctgtccccctcacctgggctcctttcccagtctcctccagcccctcctagtcccctccctagcctgccccttccccctcccgttgctcctggtggccaggaaagcccttcaccccacacagctgaggtggagagtgaggcctcaccacctcctgctcggcccctcccaggggaagccaggctggcgcccatctctgaagagggaaagccgcagcttgttgggcgtttccaagtgacttcatccaaggaaccggctgagcctcttcccttgcagccaacatcccccactctctctggttctccaaaaccttcaacccctcagctcacttcagagagctcagatacagaggacagtgctggaggcgggccagagaccagggaagctctggctgagagcgaccgtgcagctgagggtctgggggctggagttgaggaggaaggagatgatgggaaggaaccccaagttgggggcagcccccaacccctgagccatcccagcccagtgtggatgaactactcctacagcagcctgtgtttgagcagcgaggagtcagaaagcagtggggaagatgaggagttctgggctgagctgcagagtcttcggcagaagcacttgtcagaggtggaaacactacagacactacagaaaaaagaaattgaagatttgtacagccggctggggaagcagcccccaccgggtattgtggccccagctgctatgctgtccagccgccagcgccgcctctccaagggcagcttccccacctcccgccgcaacagcctacagcgctctgagcccccaggccctggcatcatgcgaaggaactctctgagtggcagcagcaccggctcccaggagcagcgggcaagcaagggggtgacattcgccggggatgttggcaggatgtgaattcagaacagaagccatgtatctcccccacaccagggcccaccatggagcttgtgttctcagaatctgatgctttctgatcaacaaaactgagcaaggaagatcccaacactgaaggggtagaaggccaggggggcatggagagtgcagctccattatagtgaagagccaaacatatgtgaactgtttgctgtgtggaggtgttagttctgctgcctaccatcttcatctctagcacctcccctgccaagagtcaaccactaagcaatcccacccaagcctggatgcttctagaggggcccactcccagctgggagagtgtaggggatatgctcacaccacattagcagcaaccaataaaaatgctggaaacaag

SEQ ID NO: 26399 - protein, 1243 aa, Homo sapiens; identical to SEQ ID NO: 3521

SEQ ID NO: 26400 - DNA, 815 bp, Homo sapiens
ctgagtcccatctctgcctgccctcggcttttgccctatccattccacgttctggccctggaagtgacttttcccccggggacagctatgcctcagatatgaggagttctgggctgagctgcagagtcttcggcagaagcacttgtcagaggtggaaacactacagacactacagaaaaaagaaattgaagatttgtacagccggctggggaagcagcccccaccgggtattgtggccccagctgctatgctgtccagccgccagcgccgcctctccaagggcagcttccccacctcccgccgcaacagcctacagcgctctgagcccccaggccctggcatcatgcgaaggaactctctgagtggcagcagcaccggctcccaggagcagcgggcaagcaagggggtgacattcgccggggatgttggcaggatgtgaattcagaacagaagccatgtatctcccccacaccagggcccaccatggagcttgtgttctcagaatctgatgctttctgatcaacaaaactgagcaaggaagatcccaacactgaaggggtagaaggccaggggggcatggagagtgcagctccattatagtgaagagccaaacatatgtgaactgtttgctgtgtggaggtgttagttctgctgcctaccatcttcatctctagcacctcccctgccaagagtcaaccactaagcaatcccacccaagcctggatgcttctagaggggcccactcccagctgggagagtgtaggggatatgctcacaccacattagcagcaaccaataaaaatgctggaaacaag

SEQ ID NO: 26401 - protein, 87 aa, Homo sapiens
MRSSGLSCRVFGRSTCQRWKHYRHYRKKKLKICTAGWGSSPHRVLWPQLLCCPAASAASPRAASPPPAATAYSALSPQALASCEGTL

SEQ ID NO: 26402 - DNA, 726 bp, Homo sapiens
tgacttttcccccggggacagctatgcctcagatgcagcttcaggccttagcgatgtgggagaagggatgggacaaatgaggagacccccagggaggaatctccggcgcagaccccgatcccggctgcgggtcactagtgtctcagaccagaatgacagagtggttgagtgccagctacagacccataacagcaagatggtgaccttccgatttgatctggatggggacagcccggaagagattgcagctgccatggtgagggggagagagatgaggacagagtgtttggatctggaacaagagtctccttcctgatgtccgctggggctgaaacccactgatccgacagcaagcatttttaaatctctggttgacacttagcacagtaacgctgaagatgtctcagcccttgttttgggggagatttctgtttatccagtgaggtttggcttctcagctggagcaatttgagactcacattgaccgggtacacacaagtgctacgtataagtgcctggtagatgtgcaatactgtggctgtaggtgaaggatggactgggcagcaggggcaatgagcttacccaggatcttggcaaatgggcaagaaaggctgtgaagggtggaaaggccatgaagggtgtccctgtgcagggacagcataagcaaaggcattccaagtagagagtgtcttggaatatggggctgggagggcttcatgaggaaac

SEQ ID NO: 26403 - protein, 82 aa, Homo sapiens [sequence omitted]

SEQ ID NO: 26404 - DNA, 935 bp, Homo sapiens
gctgagcctcttcccttgcagccaacatcccccactctctctggttctccaaaaccttcaacccctcagctcacttcagagagctcagatacagaggacagtgctggaggcgggccagagaccagggaagctctggctgagagcgaccgtgcagctgagggtctgggggctggagttgaggaggaaggagatgatgggaaggaaccccaagttgggggcagcccccaacccctgagccatcccagcccagtgtggatgaactactcctacagcagcctgtgtttgagcagcgaggagtcagaaagcagtggggaagatgaggagttctgggctgagctgcagagtcttcggcagaagcacttgtcagaggtggaaacactacagacactacagaaaaaagaaattgaagatttgtacagccggctggggaagcagcccccaccgggtattgtggccccagctgctatgctgtccagccgccagcgccgcctctccaagggcagcttccccacctcccgccgcaacagcctacagcgctctgagcccccaggccctgtgaattcagaacagaagccatgtatctcccccacaccagggcccaccatggagcttgtgttctcagaatctgatgctttctgatcaacaaaactgagcaaggaagatcccaacactgaaggggtagaaggccaggggggcatggagagtgcagctccattatagtgaagagccaaacatatgtgaactgtttgctgtgtggaggtgttagttctgctgcctaccatcttcatctctagcacctcccctgccaagagtcaaccactaagcaatcccacccaagcctggatgcttctagaggggcccactcccagctgggagagtgtaggggatatgctcacaccacattagcagcaaccaataaaaatgctggaaacaag

SEQ ID NO: 26405 - protein, 127 aa, Homo sapiens
MNYSYSSLCLSSEESESSGEDEEFWAELQSLRQKHLSEVETLQTLQKKEIEDLYSRLGKQPPPGIVAPAAMLSSRQRRLSKGSFPTSRRNSLQRSEPPGPVNSEQKPCISPTPGPTMELVFSESDAF

SEQ ID NO: 26406 - DNA, 196 bp, Homo sapiens
gaaggaactctctgagtggcagcagcaccggctcccaggagcagcgggcaagcaagggggtgacattcgccggggatgttggcaggatgtgaattcagaacagaagccatgtatctcccccacatcccagctgggagagtgtaggggatatgctcacaccacattagcagcaaccaataaaaatgctggaaacaag

SEQ ID NO: 26407 - protein, 64 aa, Homo sapiens
KELSEWQQHRLPGAAGKQGGDIRRGCWQDVNSEQKPCISPTSQLGECRGYAHTTLAATNKNAGN

SEQ ID NO: 26408 - DNA, 1358 bp, Homo sapiens
cagcgaggcccgcgcggcggcaccgcgaagggaggagtggcaacatggcgtcttcgggagctggtgaccctctggattctaagcgtggagaggccccgttcgctcagcgtatcgacccgactcgggagaagctgacacccgagcaactgcattccatgcggcaggcggagcttgcccagtggcagaaggtcctaccacggcggcgaacccggaacatcgtgaccggcctaggcatcggggccctggtgttggctatttatggttacaccttctactcgatttcccaggagcgtttcctagatgagctagaagacgaggccaaagctgcccgagcccgagctctggcaagggcgtcagggtcctaatctggatgggtattgatcatgtccaacctgctggagccccttcacatggtggatgatgccccatgaccctgtagaaattgaatcctgctcacaacattgttggccttcttactaaccttggaccgtgattgagcccaagaaaccagggacttacgcatttggccaatgtcaaaagaacagaactttgcccactgcacacttgctgtgtacaatgactgagccctttcttgtagtttgtttccttgtttgagaggtgtgcatgcgaccgtggcttttcccaaagtttctgactttgtggtttacccccttcaccttccagggacgcagttgttacgaggttagacgtggcagctctgtgcagtgtttgagcctacagtgggatacatagggtcaaattgagaataataaactgagtcattctcctggagtcaagtgagtatggaggctgagaggcagcatatggcacttcatgctggaaagcttcacaagcagtagctgcagtggtggcattgccccagggagctgtaaatgtttaactagaattactttttccatgagatctttccacctgatttaagggagagatcactgggcagtttgagactgaacccacgtcttaggggaaggaaggtcactcttctgtcctctacccacaagaacatactgtaactctactgcttttcccatccccagagagagggagggagagagaggtggatgaagggtgaaagacaagcagtcttcattcttttaactttccctggtacctgcctatacaggtctagggtggggtctggaggggatcctaacttagtcaagtggatcactgaccttgcagtttcctcattaactgatggcaggaagccagagggctgggcagcttccacccctgcctcccattgtgaaaagaaagtcccttttaaatcctcccctgcctcaccccacaagtctttgctcccccaattcctaaggcatggcatatggattcacggc

SEQ ID NO: 26409 - protein, 106 aa, Homo sapiens; identical to SEQ ID NO: 3523

SEQ ID NO: 26410 - DNA, 791 bp, Homo sapiens
cagcgaggcccgcgcggcggcaccgcgaagggaggagtggcaacatggcgtcttcgggagctggtgaccctctggattctaagcgtggagaggccccgttcgctcagcgtatcgacccgactcgggagaagctgacacccgagcaactgcattccatgcggcaggcggagcttgcccagtggcagaaggtcctaccacggcggcgaacccggaacatcgtgaccggcctaggcatcggggccctggtgttggctatttatggttacaccttctactcgatttcccaggagcgtttcctagatgagctagaagacgaggccaaagctgcccgagcccgagctctggcaagggcgtcagggtcctaatctggatgggtattgatcatgtccaacctgctggagccccttcacatggtggatgatgccccatgaccctgtagaaattgaatcctgctcacaacattgttggccttcttactaaccttggaccgtgattgagcccaagaaaccagggacttacgcatttggccaatgtcaaaagaacagaactttgcccactgcacacttgctgtgtacaatgactgagccctttcttgtagtttgtttccttgtttgagaggtgtgcatgcgaccgtggcttttcccaaagtttctgactttgtggtttacccccttcaccttccagggacgcagttgttacgaggttagacgtggcagctctgtgcagtgtttgagcctacagtgggatacatagggtcaaattgagaataataaactgagtcattctcctgg

SEQ ID NO: 26411 - protein, 106 aa, Homo sapiens; identical to SEQ ID NO: 3523

SEQ ID NO: 26412 - DNA, 583 bp, Homo sapiens
gcggcggcaccgcgaagggaggagtggcaacatggcgtcttcgggagctggtgaccctctggattctaagcgtggagaggccccgttcgctcagcgtatcgacccgactcgggagaagctgacacccgagcaactgcattccatgcggcaggcggagcttgcccagtggcagaaggtcctaccacggcggcgaacccggaacatcgtgaccggcctaggcatcggggccctggtgttggctatttatggttacaccttctactcgatttcccaggagcgtttcctagatgagctagaagacgaggccaaagctgcccgagcccgagctctggcaagggcgtcagggtcctaatctggatgggtattgatcatgtccaacctgctggagccccttcacatggtggatgatgccccatgaccctgtagaaattgaatcctgctcacaacattgttggccttcttactaaccttggaccgtgattgagcccaagaaaccagggacttacgcatttggccaatgtcaaaagaacagaactttgcccactgcacacttgctgtgtacaatgactgagccctttcttgt

SEQ ID NO: 26413 - protein, 106 aa, Homo sapiens; identical to SEQ ID NO: 3523

SEQ ID NO: 26414 - DNA, 1378 bp, Homo sapiens
agagccgcggttcccgggcacaggggatggacgcgggaggtgagaagcggacgtgctttctgattggctgaggagtccgtggccgttggggcgggaaaaagctgtggagggttcgaggctgtggtggtaattgggttttcctcagacttgaggcgacgacacactcattggaaggggacgaggaatccagggtgtggcagaagactggagaggagctaagggggtcggtatgtggatccagtgaacccgtccaggtgccccaagaggctcgtgaatatggacggacccatgaggccacgatcggcctccctcgttgactttcagtttggagttgtcgccacagagacgattgaagacgccctgcttcacttggcccagcagaatgagcaagcagtgagggaggcttcggggcggctgggccgcttcagggagccccagatcgtggagtttgtttttctcctgtctgaacaatggtgtctggagaaatctgtgagctaccaggctgtagaaatcctagaaaggtttatggtaaaacaggcagagaacatctgcaggcaagccacaatccagccaagagataataagagagagtctcagaattggagggctctgaaacagcagcttgtcaacaagtttactctccgtcttgtgtcatgtgttcagctggccagcaaactttccttccgaaacaaaataatcagcaacattacagtcttgaatttcctccaggctctaggctatctacacactaaagaagaactgctggaatcagagcttgatgttttgaagtccttgaacttccgaattaatctgcccactcccctggcatatgtggagacgctcctagaggttttaggatacaatggctgtttggttccagccatgaggctgcatgcaacctgcctgacactgctcgacctggtctatcttctgcatgaacccatatatgagagcctgttgagggcttcaattgagaactccactcccagtcagctgcaaggggaaaagtttacttcagtgaaggaagacttcatgctgttggcagtaggaatcattgcagcaagtgctttcatccaaaaccatgagtgttggagccaggttgtggggcatttgcagagcatcactggtattgccttggcaagcattgctgagttctcttatgcaatcctgactcacggagtgggagccaacactccggggagacagcagtctattcctccccacctggcagccagagctctgaagactgttgcttcctctaacacatgagggaggctgaatccaccaaatataaacagccatccgtcactgcactcatgcctccctctgtttactttcatactaagggtacaaaaattccaagtctcttttgaactgt

SEQ ID NO: 26415 - protein, 330 aa, Homo sapiens
MDGPMRPRSASLVDFQFGVVATETIEDALLHLAQQNEQAVREASGRLGRFREPQIVEFVFLLSEQWCLEKSVSYQAVEILERFMVKQAENICRQATIQPRDNKRESQNWRALKQQLVNKFTLRLVSCVQLASKLSFRNKIISNITVLNFLQALGYLHTKEELLESELDVLKSLNFRINLPTPLAYVETLLEVLGYNGCLVPAMRLHATCLTLLDLVYLLHEPIYESLLRASIENSTPSQLQGEKFTSVKEDFMLLAVGIIAASAFIQNHECWSQVVGHLQSITGIALASIAEFSYAILTHGVGANTPGRQQSIPPHLAARALKTVASSNT

SEQ ID NO: 26416 - DNA, 2665 bp, Homo sapiens
agagccgcggttcccgggcacaggggatggacgcgggaggtgagaagcggacgtgctttctgattggctgaggagtccgtggccgttggggcgggaaaaagctgtggagggttcgaggctgtggtggtaattgggttttcctcagacttgaggcgacgacacactcattggaaggggacgaggaatccagggtgtggcagaagactggagaggagctaagggggtcggtatgtggatccagtgaacccgtccaggtgccccaagaggctcgtgaatatggacggacccatgaggccacgatcggcctccctcgttgactttcagtttggagttgtcgccacagagacgattgaagacgccctgcttcacttggcccagcagaatgagcaagcagtgagggaggcttcggggcggctgggccgcttcagggagccccagatcgtggagtttgtttttctcctgtctgaacaatggtgtctggagaaatctgtgagctaccaggctgtagaaatcctagaaaggtttatggtaaaacaggcagagaacatctgcaggcaagccacaatccagccaagagataataagagagagtctcagaattggagggctctgaaacagcagcttgtcaacaagtttactctccgtcttgtgtcatgtgttcagctggccagcaaactttccttccgaaacaaaataatcagcaacattacagtcttgaatttcctccaggctctaggctatctacacactaaagaagaactgctggaatcagagcttgatgttttgaagtccttgaacttccgaattaatctgcccactcccctggcatatgtggagacgctcctagaggttttaggatacaatggctgtttggttccagccatgaggctgcatgcaacctgcctgacactgctcgacctggtctatcttctgcatgaacccatatatgagagcctgttgagggcttcaattgagaactccactcccagtcagctgcaaggggaaaagtttacttcagtgaaggaagacttcatgctgttggcagtaggaatcattgcagcaagtgctttcatccaaaaccatgagtgttggagccaggttgtggggcatttgcagagcatcactggtattgccttggcaagcattgctgagttctcttatgcaatcctgactcacggagtgggagccaacactccggggagacagcagtctattcctccccacctggcagccagagctctgaagactgttgcttcctctaacacatgagggaggctgaatccaccaaatataaacagccatccgtcactgcactcatgcctccctctgtttactttcatactaagggtacaaaaattccaagtctcttttgaactgtattttgtatgccaatttcatgcttatttttcctttatcagagagagttaaggtggacgagcatgccctttttgtcatatcagcctgaaaatgttaaaaagctaggtggagacagattagttgtttcatttttgtttaacaaggtatttatacttttagcttaatttcattaagaggaacatcaggcattgcaatcagtattaatcaggggctcaaatacagactatctgggtgaccttgactaagcatcaaggaggtagcctttatttccccttaaaattagtttaacatctctgttccattattcagatctacacaaacaaggcttcctcaacagctatctatttttactagagtctttttttaaaactaaaactaactctaaagaagtttcaacagaatttccacatacctgcattcattagaacttgattctcccagaatacaaagtactctattttaaagaaaaacccaacagtgcacccctgggcagttttcagactgcagcaaatcttttattacaaataattaaatctctccataatgtctcaaacagtatcaaacaccatttcatatctctaacacagagcagagtcggcattcagtataagaaccaagtgaaaagtgttaaatttcaagcatctgatcacatcacatggtgaccaggtaaagcttagatgtcattttcccacattatccaactgtgcatctcaaacatatcctcatctcagtaaagacaaaagtttctatttcatattgttaagtgcaggaagttgagagagataaaaatccagtgaaaacacatcaatctcaattcaactcagttaaaaaaaagaaaagcaaatttaaattagtttttttcagagaagaaagggaaaggagtccatggggttaagaatcaaaactgaccagggctggcaactatagatggcatgttgtagctctggaaagtatctgtcacatgatattttaaaataaagtggcttttgtggattttttcttttttggtattgtaaacatgtactgtttaatattacccgaatttaatttaaaacatgtttgcaaacaaaacaaaattaaaagcctttaaggcaaacctccccctaaggaaaaaagtcatttgttataaaattgtgaggacacccaagcaagaccccacttaagattcgtcagcatgaacttgagagcttttgtccactgctcctcagagttaaactgggttttgatggaataggagccgccactgcctcctgtgtcttcaatcttgcctttctccacatccatcctg

SEQ ID NO: 26417 - protein, 330 aa, Homo sapiens; identical to SEQ ID NO: 26415

SEQ ID NO: 26418 - DNA, 2656 bp, Homo sapiens
atttagagaaaatgacttcttgaaatgggataatcagcaacattacagtcttgaatttcctccaggctctaggctatctacacactaaagaagaactgctggaatcagagcttgatgttttgaagtccttgaacttccgaattaatctgcccactcccctggcatatgtggagacgctcctagaggttttaggatacaatggctgtttggttccagccatgaggctgcatgcaacctgcctgacactgctcgacctggtctatcttctgcatgaacccatatatgagagcctgttgagggcttcaattgagaactccactcccagtcagctgcaaggggaaaagtttacttcagtgaaggaagacttcatgctgttggcagtaggaatcattgcagcaagtgctttcatccaaaaccatgagtgttggagccaggttgtggggcatttgcagagcatcactggtattgccttggcaagcattgctgagttctcttatgcaatcctgactcacggagtgggagccaacactccggggagacagcagtctattcctccccacctggcagccagagctctgaagactgttgcttcctctaacacatgagggaggctgaatccaccaaatataaacagccatccgtcactgcactcatgcctccctctgtttactttcatactaagggtacaaaaattccaagtctcttttgaactgtattttgtatgccaatttcatgcttatttttcctttatcagagagagttaaggtggacgagcatgccctttttgtcatatcagcctgaaaatgttaaaaagctaggtggagacagattagttgtttcatttttgtttaacaaggtatttatacttttagcttaatttcattaagaggaacatcaggcattgcaatcagtattaatcaggggctcaaatacagactatctgggtgaccttgactaagcatcaaggaggtagcctttatttccccttaaaattagtttaacatctctgttccattattcagatctacacaaacaaggcttcctcaacagctatctatttttactagagtctttttttaaaactaaaactaactctaaagaagtttcaacagaatttccacatacctgcattcattagaacttgattctcccagaatacaaagtactctattttaaagaaaaacccaacagtgcacccctgggcagttttcagactgcagcaaatcttttattacaaataattaaatctctccataatgtctcaaacagtatcaaacaccatttcatatctctaacacagagcagagtcggcattcagtataagaaccaagtgaaaagtgttaaatttcaagcatctgatcacatcacatggtgaccaggtaaagcttagatgtcattttcccacattatccaactgtgcatctcaaacatatcctcatctcagtaaagacaaaagtttctatttcatattgttaagtgcaggaagttgagagagataaaaatccagtgaaaacacatcaatctcaattcaactcagttaaaaaaaagaaaagcaaatttaaattagtttttttcagagaagaaagggaaaggagtccatggggttaagaatcaaaactgaccagggctggcaactatagatggcatgttgtagctctggaaagtatctgtcacatgatattttaaaataaagtggcttttgtggattttttcttttttggtattgtaaacatgtactgtttaatattacccgaatttaatttaaaacatgtttgcaaacaaaacaaaattaaaagcctttaaggcaaacctccccctaaggaaaaaagtcatttgttataaaattgtgaggacacccaagcaagaccccacttaagattcgtcagcatgaacttgagagcttttgtccactgctcctcagagttaaactgggttttgatggaataggagccgccactgcctcctgtgtcttcaatcttgcctttctccacatccatcctgcagatggacagagcaaaactcattagtaactgagatctgagttaagtaagttcggggcagggacttgatcatgggaccattcacgtcattttatctattaaagaacacttggtgaggaatgatagtgtattttggatttgcttgaaagccaaaaatcaagaagactgtcacaagagcctcattgtcattgcagagtacagggacaggacacacacccaaagagaagagaagcctggagtaggggtgagtgagggttacagtacttcttgctgttttcctaggcatccctgaacttggcgggggagaaaggaggcagaagaaaagaaatgctttgttttggggtgatagaagcagccttactctaagtaaaaactagagtttccatccatcaatgggatcctagaaaaatcaaaagaagcattcctgtgtatttccaagggcttcagggaaaaaccttcttgaaactggagaggaggcttgagctctatgccaagaaaaccccctaaaccatctaaggcaacattcttctactccaaggactaggtggtcacattctgtcctgcttgcagtactgggtcagtctctgcccatcaatgtcatgtgattctgtgccatttttttgctttcccaccatttatactgttttgcctccatt

SEQ ID NO: 26419 - protein, 128 aa, Homo sapiens
MRLHATCLTLLDLVYLLHEPIYESLLRASIENSTPSQLQGEKFTSVKEDFMLLAVGIIAASAFIQNHECWSQVVGHLQSITGIALASIAEFSYAILTHGVGANTPGRQQSIPPHLAARALKTVASSNT

SEQ ID NO: 26420 - DNA, 1496 bp, Homo sapiens
cccatgtactcttcctggaaaggttttgtagcaatttggatttttggattaaggatgctcaacctatggtacattttcattgatagtgaaacagttctaagtgcattgttacttgcccaagcttattgtagttgttcaaatctatggaagatagagtccagctacaatacaagtttccagtgggatacagacagaacatgacttgagagattgataggattgggaacaatctctggaagcctttcttggtgccagatccatagccagttttctcttcttgggcaggagctgccgttatactgttctggggggttgcggtttttctgggacaacaagtttgaccatgcaatggtggctttcctggactgtgtgcagcagttcaaagaagaggttgagaaaggcgagacacgtttttgtcttccctacaggatggatgtggagaaaggcaagattgaagacacaggaggcagtggcggctcctattccatcaaaacccagtttaactctgaggagcagtggacaaaagctctcaagttcatgctgacgaatcttaagtggggtcttgcttgggtgtcctcacaattttataacaaatgacttttttccttagggggaggtttgccttaaaggcttttaattttgttttgtttgcaaacatgttttaaattaaattcgggtaatattaaacagtacatgtttacaataccaaaaaagaaaaaatccacaaaagccactttattttaaaatatcatgtgacagatactttccagagctacaacatgccatctatagttgccagccctggtcagttttgattcttaaccccatggactcctttccctttcttctctgaaaaaaactaatttaaatttgcttttcttttttttaactgagttgaattgagattgatgtgttttcactggatttttatctctctcaacttcctgcacttaacaatatgaaatagaaacttttgtctttactgagatgaggatatgtttgagatgcacagttggataatgtgggaaaatgacatctaagctttacctggtcaccatgtgatgtgatcagatgcttgaaatttaacacttttcacttggttcttatactgaatgccgactctgctctgtgttagagatatgaaatggtgtttgatactgtttgagacattatggagagatttaattatttgtaataaaagatttgctgcagtctgaaaactgcccaggggtgcactgttgggtttttctttaaaatagagtactttgtattctgggagaatcaagttctaatgaatgcaggtatgtggaaattctgttgaaacttctttagagttagttttagttttaaaaaaagactctagtaaaaatagatagctgttgaggaagccttgtttgtgtagatctgaataatggaacagagatgttaaactaattttaaggggaaataaaggctacctccttgatgcttagtcaaggtcacccagatagtctgta

SEQ ID NO: 26421 - protein, 82 aa, Homo sapiens
MVAFLDCVQQFKEEVEKGETRFCLPYRMDVEKGKIEDTGGSGGSYSIKTQFNSEEQWTKALKFMLTNLKWGLAWVSSQFYNK

SEQ ID NO: 26422 - DNA, 1162 bp, Homo sapiens
gcaacctccgcctcccgggttcaagcaattcccctgcctcagcctcctgagtatctgggattacaggcatgcaccaccacgcccggctaattaggatggatgtggagaaaggcaagattgaagacacaggaggcagtggcggctcctattccatcaaaacccagtttaactctgaggagcagtggacaaaagctctcaagttcatgctgacgaatcttaagtggggtcttgcttgggtgtcctcacaattttataacaaatgacttttttccttagggggaggtttgccttaaaggcttttaattttgttttgtttgcaaacatgttttaaattaaattcgggtaatattaaacagtacatgtttacaataccaaaaaagaaaaaatccacaaaagccactttattttaaaatatcatgtgacagatactttccagagctacaacatgccatctatagttgccagccctggtcagttttgattcttaaccccatggactcctttccctttcttctctgaaaaaaactaatttaaatttgcttttcttttttttaactgagttgaattgagattgatgtgttttcactggatttttatctctctcaacttcctgcacttaacaatatgaaatagaaacttttgtctttactgagatgaggatatgtttgagatgcacagttggataatgtgggaaaatgacatctaagctttacctggtcaccatgtgatgtgatcagatgcttgaaatttaacacttttcacttggttcttatactgaatgccgactctgctctgtgttagagatatgaaatggtgtttgatactgtttgagacattatggagagatttaattatttgtaataaaagatttgctgcagtctgaaaactgcccaggggtgcactgttgggtttttctttaaaatagagtactttgtattctgggagaatcaagttctaatgaatgcaggtatgtggaaattctgttgaaacttctttagagttagttttagttttaaaaaaagactctagtaaaaatagatagctgttgaggaagccttgtttgtgtagatctgaataatggaacagagatgttaaactaattttaaggggaaataaaggctacctccttgatgcttagtcaaggtcacccagatagtctgta

SEQ ID NO: 26423 - protein, 64 aa, Homo sapiens
MHHHARLIRMDVEKGKIEDTGGSGGSYSIKTQFNSEEQWTKALKFMLTNLKWGLAWVSSQFYNK

SEQ ID NO: 26424 - DNA, 1323 bp, Homo sapiens
gcatgatctcggcttactgcaacctccgcctcccgggttcaagcaattcccctgcctcagcctcctgagtatctgggattacaggcatgcaccaccacgcccggctaattaggagctgccgttatactgttctggggggttgcggtttttctgggacaacaagtttgaccatgcaatggtggctttcctggactgtgtgcagcagttcaaagaagaggttgagaaaggcgagacacgtttttgtcttccctacaggatggatgtggagaaaggcaagattgaagacacaggaggcagtggcggctcctattccatcaaaacccagtttaactctgaggagcagtggacaaaagctctcaagttcatgctgacgaatcttaagtggggtcttgcttgggtgtcctcacaattttataacaaatgacttttttccttagggggaggtttgccttaaaggcttttaattttgttttgtttgcaaacatgttttaaattaaattcgggtaatattaaacagtacatgtttacaataccaaaaaagaaaaaatccacaaaagccactttattttaaaatatcatgtgacagatactttccagagctacaacatgccatctatagttgccagccctggtcagttttgattcttaaccccatggactcctttccctttcttctctgaaaaaaactaatttaaatttgcttttcttttttttaactgagttgaattgagattgatgtgttttcactggatttttatctctctcaacttcctgcacttaacaatatgaaatagaaacttttgtctttactgagatgaggatatgtttgagatgcacagttggataatgtgggaaaatgacatctaagctttacctggtcaccatgtgatgtgatcagatgcttgaaatttaacacttttcacttggttcttatactgaatgccgactctgctctgtgttagagatatgaaatggtgtttgatactgtttgagacattatggagagatttaattatttgtaataaaagatttgctgcagtctgaaaactgcccaggggtgcactgttgggtttttctttaaaatagagtactttgtattctgggagaatcaagttctaatgaatgcaggtatgtggaaattctgttgaaacttctttagagttagttttagttttaaaaaaagactctagtaaaaatagatagctgttgaggaagccttgtttgtgtagatctgaataatggaacagagatgttaaactaattttaaggggaaataaaggctacctccttgatgcttagtcaaggtcacccagatagtctgta

SEQ ID NO: 26425 - protein, 94 aa, Homo sapiens
MHHHARLIRSCRYTVLGGCGFSGTTSLTMQWWLSWTVCSSSKKRLRKARHVFVFPTGWMWRKARLKTQEAVAAPIPSKPSLTLRSSGQKLSSSC

SEQ ID NO: 26426 - DNA, 2405 bp, Homo sapiens
ggattacaggcatgagccaccgtgcctggcctgttttatatatacctgatacatgtagtctgaggtaatttcatacaatattttaaataattttgtgcatgaaacaaagcttgtatacattgaatcatcagaaagcaaagggcgtgagccactgctcctggtctatttatttatttttcttttcccatgtactcttcctggaaaggttttgtagcaatttggatttttggattaaggatgctcaacctatggtacattttcattgatagtgaaacagttctaagtgcattgttacttgcccaagcttattgtagttgttcaaatctatggaagatagagtccagctacaatacaagtttccagtgggatacagacagaacatgacttgagagattgataggattgggaacaatctctggaagcctttcttggtgccagatccatagccagttttctcttcttgggcaggagctgccgttatactgttctggggggttgcggtttttctgggacaacaagtttgaccatgcaatggtggctttcctggactgtgtgcagcagttcaaagaagaggttgagaaaggcgagacacgtttttgtcttccctacaggtcagtatagcgcaatgctgagtgaacttgtataggaccaaattgaacagaattgaagcagcagtaataatggaggcaaaacagtataaatggtgggaaagcaaaaaaatggcacagaatcacatgacattgatgggcagagactgacccagtactgcaagcaggacagaatgtgaccacctagtccttggagtagaagaatgttgccttagatggtttagggggttttcttggcatagagctcaagcctcctctccagtttcaagaaggtttttccctgaagcccttggaaatacacaggaatgcttcttttgatttttctaggatcccattgatggatggaaactctagtttttacttagagtaaggctgcttctatcaccccaaaacaaagcatttcttttcttctgcctcctttctcccccgccaagttcagggatgcctaggaaaacagcaagaagtactgtaaccctcactcacccctactccaggcttctcttctctttgggtgtgtgtcctgtccctgtactctgcaatgacaatgaggctcttgtgacagtcttcttgatttttggctttcaagcaaatccaaaatacactatcattcctcaccaagtgttctttaatagataaaatgacgtgaatggtcccatgatcaagtccctgccccgaacttacttaactcagatctcagttactaatgagttttgctctgtccatctgcaggatggatgtggagaaaggcaagattgaagacacaggaggcagtggcggctcctattccatcaaaacccagtttaactctgaggagcagtggacaaaagctctcaagttcatgctgacgaatcttaagtggggtcttgcttgggtgtcctcacaattttataacaaatgacttttttccttagggggaggtttgccttaaaggcttttaattttgttttgtttgcaaacatgttttaaattaaattcgggtaatattaaacagtacatgtttacaataccaaaaaagaaaaaatccacaaaagccactttattttaaaatatcatgtgacagatactttccagagctacaacatgccatctatagttgccagccctggtcagttttgattcttaaccccatggactcctttccctttcttctctgaaaaaaactaatttaaatttgcttttcttttttttaactgagttgaattgagattgatgtgttttcactggatttttatctctctcaacttcctgcacttaacaatatgaaatagaaacttttgtctttactgagatgaggatatgtttgagatgcacagttggataatgtgggaaaatgacatctaagctttacctggtcaccatgtgatgtgatcagatgcttgaaatttaacacttttcacttggttcttatactgaatgccgactctgctctgtgttagagatatgaaatggtgtttgatactgtttgagacattatggagagatttaattatttgtaataaaagatttgctgcagtctgaaaactgcccaggggtgcactgttgggtttttctttaaaatagagtactttgtattctgggagaatcaagttctaatgaatgcaggtatgtggaaattctgttgaaacttctttagagttagttttagttttaaaaaaagactctagtaaaaatagatagctgttgaggaagccttgtttgtgtagatctgaataatggaacagagatgttaaactaattttaaggggaaataaaggctacctccttgatgcttagtcaaggtcacccagatagtctgta

SEQ ID NO: 26427 - protein, 55 aa, Homo sapiens
MKQSLYTLNHQKAKGVSHCSWSIYLFFFSHVLFLERFCSNLDFWIKDAQPMVHFH

SEQ ID NO: 26428 - DNA, 2390 bp, Homo sapiens
aagttttccggcggctaccgggaagtcgctgaagacagagcgatggtagttctggaggcctcgctccggggccgacccgaggccacagtgcctccgcggtagaccggacttgggtgacgggctccgggctcccgagggatggaagggtctaagacgtccaacaacagcaccatgcaggtgagcttcgtgtgccagcgctgcagccagcccctgaaactggacacgagtttcaagatcctggaccgtgtcaccatccaggaactcacagctccattacttaccacagcccaggcgaaaccaggagagacccaggaggaagagactaactcaggagaggagccatttattgaaactcctcgccaggatggtgtctctcgcagattcatccccccagccaggatgatgtccacagaaagtgccaacagcttcactctgattggggaggcatctgatggcggcaccatggagaacctcagccgaagactgaaggtcactggggacctttttgacatcatgtcgggccagacagatgtggatcacccactctgtgaggaatgcacagatactcttttagaccagctggacactcagctcaacgtcactgaaaatgagtgtcagaactacaaacgctgtttggagatcttagagcaaatgaatgaggatgacagtgaacagttacagatggagctaaaggagctggcactagaggaggagaggctgatccaggagctggaagacgtggaaaagaaccgcaagatagtggcagaaaatctcgagaaggtccaggctgaggctgagagactggatcaggaggaagctcagtatcagagagaatacagtgaatttaaacgacagcagctggagctggatgatgagctgaagagtgttgaaaaccagatgcgttatgcccagacgcagctggataagctgaagaaaaccaacgtctttaatgcaaccttccacatctggcacagtggacagtttggcacaatcaataacttcaggctgggtcgcctgcccagtgttcccgtggaatggaatgagattaatgctgcttggggccagactgtgttgctgctccatgctctggccaataagatgggtctgaaatttcagagataccgacttgttccttacggaaaccattcatatctggagtctctgacagacaaatctaaggagctgccgttatactgttctggggggttgcggtttttctgggacaacaagtttgaccatgcaatggtggctttcctggactgtgtgcagcagttcaaagaagaggttgagaaaggcgagacacgtttttgtcttccctacaggatggatgtggagaaaggcaagattgaagacacaggaggcagtggcggctcctattccatcaaaacccagtttaactctgaggagcagtggacaaaagctctcaagttcatgctgacgaatcttaagtggggtcttgcttgggtgtcctcacaattttataacaaatgacttttttccttagggggaggtttgccttaaaggcttttaattttgttttgtttgcaaacatgttttaaattaaattcgggtaatattaaacagtacatgtttacaataccaaaaaagaaaaaatccacaaaagccactttattttaaaatatcatgtgacagatactttccagagctacaacatgccatctatagttgccagccctggtcagttttgattcttaaccccatggactcctttccctttcttctctgaaaaaaactaatttaaatttgcttttcttttttttaactgagttgaattgagattgatgtgttttcactggatttttatctctctcaacttcctgcacttaacaatatgaaatagaaacttttgtctttactgagatgaggatatgtttgagatgcacagttggataatgtgggaaaatgacatctaagctttacctggtcaccatgtgatgtgatcagatgcttgaaatttaacacttttcacttggttcttatactgaatgccgactctgctctgtgttagagatatgaaatggtgtttgatactgtttgagacattatggagagatttaattatttgtaataaaagatttgctgcagtctgaaaactgcccaggggtgcactgttgggtttttctttaaaatagagtactttgtattctgggagaatcaagttctaatgaatgcaggtatgtggaaattctgttgaaacttctttagagttagttttagttttaaaaaaagactctagtaaaaatagatagctgttgaggaagccttgtttgtgtagatctgaataatggaacagagatgttaaactaattttaaggggaaataaaggctacctccttgatgcttagtcaaggtcacccagatagtctgta

SEQ ID NO: 26429 - protein, 450 aa, Homo sapiens; identical to SEQ ID NO: 3527

SEQ ID NO: 26430 - DNA, 891 bp, Homo sapiens
gcaacctccgcctcccgggttcaagcaattcccctgcctcagcctcctgagtatctgggattacaggcatgcaccaccacgcccggctaattaggatggatgtggagaaaggcaagattgaagacacaggaggcagtggcggctcctattccatcaaaacccagtttaactctgaggagcagtggacaaaagctctcaagttcatgctgacgaatcttaagtggggtcttgcttgggtgtcctcacaattttataacaaatgacttttttccttagggggaggtttgccttaaaggcttttaattttgttttgtttgcaaacatgttttaaattaaattcgggtaatattaaacagtacatgtttacaataccaaaaaagaaaaaatccacaaaagccactttattttaaaatatcatgtgacagatactttccagagctacaacatgccatctatagttgccagccctggtcagttttgattcttaaccccatggactcctttccctttcttctctgaaaaaaactaatttaaatttgcttttcttttttttaactgagttgaattgagattgatgtgttttcactggatttttatctctctcaacttcctgcacttaacaatatgaaatagaaacttttgtctttactgagatgaggatatgtttgagatgcacagttggataatgtgggaaaatgacatctaagctttacctggtcaccatgtgatgtgatcagatgcttgaaatttaacacttttcacttggttcttatactgaatgccgactctgctctgtgttagagatatgaaatggtgtttgatactgtttgagacattatggagagatttaattatttgtaataaaagatttgctgcagtctgaaaactgcc

SEQ ID NO: 26431 - protein, 64 aa, Homo sapiens; identical to SEQ ID NO: 26423

SEQ ID NO: 26432 - DNA, 1052 bp, Homo sapiens
gcatgatctcggcttactgcaacctccgcctcccgggttcaagcaattcccctgcctcagcctcctgagtatctgggattacaggcatgcaccaccacgcccggctaattaggagctgccgttatactgttctggggggttgcggtttttctgggacaacaagtttgaccatgcaatggtggctttcctggactgtgtgcagcagttcaaagaagaggttgagaaaggcgagacacgtttttgtcttccctacaggatggatgtggagaaaggcaagattgaagacacaggaggcagtggcggctcctattccatcaaaacccagtttaactctgaggagcagtggacaaaagctctcaagttcatgctgacgaatcttaagtggggtcttgcttgggtgtcctcacaattttataacaaatgacttttttccttagggggaggtttgccttaaaggcttttaattttgttttgtttgcaaacatgttttaaattaaattcgggtaatattaaacagtacatgtttacaataccaaaaaagaaaaaatccacaaaagccactttattttaaaatatcatgtgacagatactttccagagctacaacatgccatctatagttgccagccctggtcagttttgattcttaaccccatggactcctttccctttcttctctgaaaaaaactaatttaaatttgcttttcttttttttaactgagttgaattgagattgatgtgttttcactggatttttatctctctcaacttcctgcacttaacaatatgaaatagaaacttttgtctttactgagatgaggatatgtttgagatgcacagttggataatgtgggaaaatgacatctaagctttacctggtcaccatgtgatgtgatcagatgcttgaaatttaacacttttcacttggttcttatactgaatgccgactctgctctgtgttagagatatgaaatggtgtttgatactgtttgagacattatggagagatttaattatttgtaataaaagatttgctgcagtctgaaaactgcc

SEQ ID NO: 26433 - protein, 94 aa, Homo sapiens; identical to SEQ ID NO: 26425

SEQ ID NO: 26434 - DNA, 2134 bp, Homo sapiens
ggattacaggcatgagccaccgtgcctggcctgttttatatatacctgatacatgtagtctgaggtaatttcatacaatattttaaataattttgtgcatgaaacaaagcttgtatacattgaatcatcagaaagcaaagggcgtgagccactgctcctggtctatttatttatttttcttttcccatgtactcttcctggaaaggttttgtagcaatttggatttttggattaaggatgctcaacctatggtacattttcattgatagtgaaacagttctaagtgcattgttacttgcccaagcttattgtagttgttcaaatctatggaagatagagtccagctacaatacaagtttccagtgggatacagacagaacatgacttgagagattgataggattgggaacaatctctggaagcctttcttggtgccagatccatagccagttttctcttcttgggcaggagctgccgttatactgttctggggggttgcggtttttctgggacaacaagtttgaccatgcaatggtggctttcctggactgtgtgcagcagttcaaagaagaggttgagaaaggcgagacacgtttttgtcttccctacaggtcagtatagcgcaatgctgagtgaacttgtataggaccaaattgaacagaattgaagcagcagtaataatggaggcaaaacagtataaatggtgggaaagcaaaaaaatggcacagaatcacatgacattgatgggcagagactgacccagtactgcaagcaggacagaatgtgaccacctagtccttggagtagaagaatgttgccttagatggtttagggggttttcttggcatagagctcaagcctcctctccagtttcaagaaggtttttccctgaagcccttggaaatacacaggaatgcttcttttgatttttctaggatcccattgatggatggaaactctagtttttacttagagtaaggctgcttctatcaccccaaaacaaagcatttcttttcttctgcctcctttctcccccgccaagttcagggatgcctaggaaaacagcaagaagtactgtaaccctcactcacccctactccaggcttctcttctctttgggtgtgtgtcctgtccctgtactctgcaatgacaatgaggctcttgtgacagtcttcttgatttttggctttcaagcaaatccaaaatacactatcattcctcaccaagtgttctttaatagataaaatgacgtgaatggtcccatgatcaagtccctgccccgaacttacttaactcagatctcagttactaatgagttttgctctgtccatctgcaggatggatgtggagaaaggcaagattgaagacacaggaggcagtggcggctcctattccatcaaaacccagtttaactctgaggagcagtggacaaaagctctcaagttcatgctgacgaatcttaagtggggtcttgcttgggtgtcctcacaattttataacaaatgacttttttccttagggggaggtttgccttaaaggcttttaattttgttttgtttgcaaacatgttttaaattaaattcgggtaatattaaacagtacatgtttacaataccaaaaaagaaaaaatccacaaaagccactttattttaaaatatcatgtgacagatactttccagagctacaacatgccatctatagttgccagccctggtcagttttgattcttaaccccatggactcctttccctttcttctctgaaaaaaactaatttaaatttgcttttcttttttttaactgagttgaattgagattgatgtgttttcactggatttttatctctctcaacttcctgcacttaacaatatgaaatagaaacttttgtctttactgagatgaggatatgtttgagatgcacagttggataatgtgggaaaatgacatctaagctttacctggtcaccatgtgatgtgatcagatgcttgaaatttaacacttttcacttggttcttatactgaatgccgactctgctctgtgttagagatatgaaatggtgtttgatactgtttgagacattatggagagatttaattatttgtaataaaagatttgctgcagtctgaaaactgcc

SEQ ID NO: 26435 - protein, 55 aa, Homo sapiens; identical to SEQ ID NO: 26427

SEQ ID NO: 26436 - DNA, 4879 bp, Homo sapiens
aagttttccggcggctaccgggaagtcgctgaagacagagcgatggtagttctggaggcctcgctccggggccgacccgaggccacagtgcctccgcggtagaccggacttgggtgacgggctccgggctcccgagggatggaagggtctaagacgtccaacaacagcaccatgcaggtgagcttcgtgtgccagcgctgcagccagcccctgaaactggacacgagtttcaagatcctggaccgtgtcaccatccaggaactcacagctccattacttaccacagcccaggcgaaaccaggagagacccaggaggaagagactaactcaggagaggagccatttattgaaactcctcgccaggatggtgtctctcgcagattcatccccccagccaggtgcctactacttctcagcccccattccttgccaaaggctagtagaattttaattaaatccaggaatcgagacctggagccaggtgatagagatgcatcatcacctagccttttggccctttcagaaaagatgtattcccttatacctggcccgtcaccttccagtatggattttttcctgtagctgttcacagagtgggaaaggatagtagctttaatgatgaagtattgaaaaaaattgagggagtgattgaccaatcaccaagagatgggctcttgagaagtttcaaactagcaaatgttgttagatgttcaggtccttagttctcattgctgcaggtaaagagcttgctggcaaggggtataatattttctaaaatggcctttcctggttctcccttcttttccactgtagacatatgaattttttatgctccctctccctccttagtccaccaaggccaaccttcatgctgagtgtccctgtggaagaccagcatggccttcctttgggagagaggtacccttgggaggtcagtcgggctaggagtgggtatgttccttgaggcccctcagctggtgcttgagagtctctgccactggcattgtagtaggtggaggaagcctctctgttccctcatgtggcccgtgggcggggggctgtctgcaggatgatgtccacagaaagtgccaacagcttcactctgattggggaggcatctgatggcggcaccatggagaacctcagccgaagactgaaggcaagtcggccccattccggtggcaagcagtaggcctggctgggagagtgggtaattgagcaggaagcatgggggaggccctaccctgactctcccacacttccaggtcactggggacctttttgacatcatgtcgggccagacagatgtggatcacccactctgtgaggaatgcacagatactcttttagaccagctggacactcagctcaacgtcactgaaaatgagtgtcagaactacaaacgctgtttggagatcttagagcaaatgaatgaggatgacagtgaacagttacagatggagctaaaggagctggcactagaggaggagaggctgatccaggagctggaagacgtggaaaagaaccgcaagatagtggcagaaaatctcgagaaggtccaggctgaggctgagagactggatcaggaggaagctcagtatcagagagaatacagtgaatttaaacgacagcagctggagctggatgatgagctgaagagtgttgaaaaccagatgcgttatgcccagacgcagctggataagctgaagaaaaccaacgtctttaatgcaaccttccacatctggcacagtggacagtttggcacaatcaataacttcaggctgggtcgcctgcccagtgttcccgtggaatggaatgagattaatgctgcttggggccagactgtgttgctgctccatgctctggccaataagatgggtctgaaatttcagaggtaggaagtgtagccctttcttggggagtgatgtgcattgatataatttgtatctccaacctggtactgctgtccaccatgtcaggagcccttgctgcccacagactgggagttttctgtggctgaagagctgtcagcatctgattttcccctcatcacagggctctctccactgatcacacagtcactgagttgcgtgactatagcatagttcccagcctacagtccccagagccttagtgttcctcaggatattttcagtttttgtttcttaaatttaaaccaaaacataacatttgttcatggaaggcccccaggcaattatataataaatgtagtttgttcattaaacaaaatcttttaaacatggattcaatggggaggtgggagagggagttgagcataataaaagaagcccttggccagaatgaagagtgaaatcattgggttgtaacttcccaataatcactttgggaggagtcctgtatccatctctgtttgtatctctattttagataccgacttgttccttacggaaaccattcatatctggagtctctgacagacaaatctaaggtactctgtgaagctccattttcactggaatacagagttcttatatctcttaagaaaatggatggtttgctttgatattggcattcaatttattttttagacctagatatgaagagccagtatattgttcaatatcttgtctagttcaggtttagttttgggggtcttgtagacagaaatcaggttttgacagtctgttgagaagggatatgggcaggtcagaagagggtgtgtgcactaggctaggaaaagaatcaccgtgagatagatgtttacaggttgagtatcaccagaagtgttttagattttggattttttttttcagattttgggatattggcatatagatactaagatatcttgggaatgggacccaagtctaaacacaaaattcatttatgtttcctctgtctcaaaaaaaaaaaaaaaaaaaaaaaaaagcaaaggtatcaggtatggaattttccccttgtggcatcatatcaatggtcaaaaagtttcaggttttgtagcattttttattatttttatttatttatttattttgagacggagtctcactctgtcacccaggctggagtgcagtggcgtgatctcggctcattgcaggctctgcctcccaggttcacgcagttctcctgcctcagcctcctctcctcccgagtagctgggattacaggcgcccaccacaatgcctggctaattttttgtatttttggtagtgacggggtttcaccatgttatccatgatggtcttgatctcctgacctcatgatccacccgccttggcctcccaaagtgctgggattacagacgtgagccactgtgcctggcatatttttatttttttttcttttctttttgtgggttttttttttttttgaaatggagtttcgctcttgttgcccaggctgaagtgcaatggcatgatctcggcttactgcaacctccgcctcccgggttcaagcaattcccctgcctcagcctcctgagtatctgggattacaggcatgcaccaccacgcccggctaattaggtatttttagtagagacggggtttctccatgttggtcaggctagtctcaaactcccaacctcaggtgatctgcccaccttggcctcccaaagtgctgggattacaggcgtgagccactgctcctggtctatttatttatttttcttttcccatgtactcttcctggaaaggttttgtagcaatttggatttttggattaaggatgctcaacctatggtacattttcattgatagtgaaacagttctaagtgcattgttacttgcccaagcttattgtagttgttcaaatctatggaagatagagtccagctacaatacaagtttccagtgggatacagacagaacatgacttgagagattgataggattgggaacaatctctggaagcctttcttggtgccagatccatagccagttttctcttcttgggcaggagctgccgttatactgttctggggggttgcggtttttctgggacaacaagtttgaccatgcaatggtggctttcctggactgtgtgcagcagttcaaagaagaggttgagaaaggcgagacacgtttttgtcttccctacaggatggatgtggagaaaggcaagattgaagacacaggaggcagtggcggctcctattccatcaaaacccagtttaactctgaggagcagtggacaaaagctctcaagttcatgctgacgaatcttaagtggggtcttgcttgggtgtcctcacaattttataacaaatgacttttttccttagggggaggtttgccttaaaggcttttaattttgttttgtttgcaaacatgttttaaattaaattcgggtaatattaaacagtacatgtttacaataccaaaaaagaaaaaatccacaaaagccactttattttaaaatatcatgtgacagatactttccagagctacaacatgccatctatagttgccagccctggtcagttttgattcttaaccccatggactcctttccctttcttctctgaaaaaaactaatttaaatttgcttttcttttttttaactgagttgaattgagattgatgtgttttcactggatttttatctctctcaacttcctgcacttaacaatatgaaatagaaacttttgtctttactgagatgaggatatgtttgagatgcacagttggataatgtgggaaaatgacatctaagctttacctggtcaccatgtgatgtgatcagatgcttgaaatttaacacttttcacttggttcttatactgaatgccgactctgctctgtgttagagatatgaaatggtgtttgatactgtttgagacattatggagagatttaattatttgtaataaaagatttgctgcagtctgaaaactgcc

SEQ ID NO: 26437 - protein, 202 aa, Homo sapiens
MSGQTDVDHPLCEECTDTLLDQLDTQLNVTENECQNYKRCLEILEQMNEDDSEQLQMELKELALEEERLIQELEDVEKNRKIVAENLEKVQAEAERLDQEEAQYQREYSEFKRQQLELDDELKSVENQMRYAQTQLDKLKKTNVFNATFHIWHSGQFGTINNFRLGRLPSVPVEWNEINAAWGQTVLLLHALANKMGLKFQR

SEQ ID NO: 26438 - DNA, 2119 bp, Homo sapiens
aagttttccggcggctaccgggaagtcgctgaagacagagcgatggtagttctggaggcctcgctccggggccgacccgaggccacagtgcctccgcggtagaccggacttgggtgacgggctccgggctcccgagggatggaagggtctaagacgtccaacaacagcaccatgcaggtgagcttcgtgtgccagcgctgcagccagcccctgaaactggacacgagtttcaagatcctggaccgtgtcaccatccaggaactcacagctccattacttaccacagcccaggcgaaaccaggagagacccaggaggaagagactaactcaggagaggagccatttattgaaactcctcgccaggatggtgtctctcgcagattcatccccccagccaggatgatgtccacagaaagtgccaacagcttcactctgattggggaggcatctgatggcggcaccatggagaacctcagccgaagactgaaggtcactggggacctttttgacatcatgtcgggccagacagatgtggatcacccactctgtgaggaatgcacagatactcttttagaccagctggacactcagctcaacgtcactgaaaatgagtgtcagaactacaaacgctgtttggagatcttagagcaaatgaatgaggatgacagtgaacagttacagatggagctaaaggagctggcactagaggaggagaggctgatccaggagctggaagacgtggaaaagaaccgcaagatagtggcagaaaatctcgagaaggtccaggctgaggctgagagactggatcaggaggaagctcagtatcagagagaatacagtgaatttaaacgacagcagctggagctggatgatgagctgaagagtgttgaaaaccagatgcgttatgcccagacgcagctggataagctgaagaaaaccaacgtctttaatgcaaccttccacatctggcacagtggacagtttggcacaatcaataacttcaggctgggtcgcctgcccagtgttcccgtggaatggaatgagattaatgctgcttggggccagactgtgttgctgctccatgctctggccaataagatgggtctgaaatttcagagataccgacttgttccttacggaaaccattcatatctggagtctctgacagacaaatctaaggagctgccgttatactgttctggggggttgcggtttttctgggacaacaagtttgaccatgcaatggtggctttcctggactgtgtgcagcagttcaaagaagaggttgagaaaggcgagacacgtttttgtcttccctacaggatggatgtggagaaaggcaagattgaagacacaggaggcagtggcggctcctattccatcaaaacccagtttaactctgaggagcagtggacaaaagctctcaagttcatgctgacgaatcttaagtggggtcttgcttgggtgtcctcacaattttataacaaatgacttttttccttagggggaggtttgccttaaaggcttttaattttgttttgtttgcaaacatgttttaaattaaattcgggtaatattaaacagtacatgtttacaataccaaaaaagaaaaaatccacaaaagccactttattttaaaatatcatgtgacagatactttccagagctacaacatgccatctatagttgccagccctggtcagttttgattcttaaccccatggactcctttccctttcttctctgaaaaaaactaatttaaatttgcttttcttttttttaactgagttgaattgagattgatgtgttttcactggatttttatctctctcaacttcctgcacttaacaatatgaaatagaaacttttgtctttactgagatgaggatatgtttgagatgcacagttggataatgtgggaaaatgacatctaagctttacctggtcaccatgtgatgtgatcagatgcttgaaatttaacacttttcacttggttcttatactgaatgccgactctgctctgtgttagagatatgaaatggtgtttgatactgtttgagacattatggagagatttaattatttgtaataaaagatttgctgcagtctgaaaactgcc

SEQ ID NO: 26439 - protein, 450 aa, Homo sapiens; identical to SEQ ID NO: 3527

SEQ ID NO: 26440 - DNA, 546 bp, Homo sapiens
caggcgggacgggctctcccttgggtgcttagccccgcccccgtcccactctgccctgttgctgtcgcgccgctgctggttgctgtccctggacccctaccatggaggagaccatcaaagatccccccacatcagctgtcttgctggatcactgtcatttctctcaggtcatctttaacagtgtggagaagttctacatccctggaggggacgtcacatgtcattataccttcacccagcatttcatccctcgtcgaaaggattggattggcatctttagagtggggtggaagacaacccgtgagtattacaccttcatgtgggttactttgcccattgacctaaacaacaaatcagctaaacagcaggaagtccaattcaaagcttactacctgcccaaggatgatgagtattaccagttctgctatgtggatgaggatggtgtggtccggggagcaagtattcctttccaattccgtccagaaaatgaggaagacatcctggttgttaccactcagttctggcctacagcctgtctgtcatacg

SEQ ID NO: 26441 - protein, 147 aa, Homo sapiens
MEETIKDPPTSAVLLDHCHFSQVIFNSVEKFYIPGGDVTCHYTFTQHFIPRRKDWIGIFRVGWKTTREYYTFMWVTLPIDLNNKSAKQQEVQFKAYYLPKDDEYYQFCYVDEDGVVRGASIPFQFRPENEEDILVVTTQFWPTACLS

SEQ ID NO: 26442 - DNA, 2291 bp, Homo sapiens
caggcgggacgggctctcccttgggtgcttagccccgcccccgtcccactctgccctgttgctgtcgcgccgctgctggttgctgtccctggacccctaccatggaggagaccatcaaagatccccccacatcagctgtcttgctggatcactgtcatttctctcaggtcatctttaacagtgtggagaagttctacatccctggaggggacgtcacatgtcattataccttcacccagcatttcatccctcgtcgaaaggattggattggcatctttagagtggggtggaagacaacccgtgagtattacaccttcatgtgggttactttgcccattgacctaaacaacaaatcagctaaacagcaggaagtccaattcaaagcttactacctgcccaaggatgatgagtattaccagttctgctatgtggatgaggatggtgtggtccggggagcaagtattcctttccaattccgtccagaaaatgaggaagacatcctggttgttaccactcagggagaggtggaagagattgagcagcacaacaaggagctttgcaaagaaaaccaggagctgaaggacagctgtatcagcctccagaagcagaactcagacatgcaggctgagctccaaaagaagcaggaggagctagaaaccctacagagcatcaataagaagttggaactgaaagtgaaagaacagaaggactattgggagacagagctgcttcaactgaaagaacaaaaccagaagatgtcctcagaaaatgagaagatgggaatcagagtggatcagcttcaggcccagctgtcaactcaagagaaagaaatggagaagcttgttcagggagatcaagataagacagagcagttagagcagctgaaaaaggaaaatgaccacctctttctcagtttaactgaacagaggaaggaccagaagaagctcgagcagacagtggagcaaatgaagcagaatgaaactactgcaatgaagaaacaacaggaattaatggatgaaaactttgacctgtcaaaaagactgagtgagaacgaaattatatgtaatgctctgcagagacagaaagagagattggaaggagaaaatgatcttttgaagagggagaacagcagattgctcagttacatgggtctggattttaattctttgccgtatcaagtacctacttcagatgaaggaggcgcaagacaaaatccaggacttgcctatggaaacccatattctggtatccaagaaagttcttcccccagcccgctctccatcaagaaatgccctatctgcaaagcagatgatatttgtgatcacaccttggagcaacagcagatgcagcccctttgtttcaattgtccaatttgtgacaagatcttcccagctacagagaagcagatctttgaagaccacgtgttctgccactctctctgagtatcccaacctcttggatgtatacagagattttatagaatagaacctatagcttctaccatgagttatatgagtcaagatcctgcctaacctgaaattattagggatttactcagccctgctgccgctaacagtggagttatgtcactgatctgaaggtcactgttaagggcttctgctgccatccttgtgggttgctacctttaagtcgcataactctagctgtatcatcctctcacctgtcattcttctgagggtctcagtacaagggccctgggatggagccaacctgggtattcacaacaggcctgacttgatactaagtgattagttttccaagttgtcccactgccattcaaagtcagcccttgagtgtatttgttctcagtcctaaccctggggccagagattggtccgaggttgagaattccttcctcctcatccttggtgttgctttctccaaatgattgttttagactagccaaaaatgccgtggcaaagagctcagaaatccaatttggataccaaaggtttctcatgttaatttctcagcccccaaagaagcatcttactcctgaaccttagacaggaagtattgtttcagtcacagaaagcttttctgggtacctctggttagcactttctactctctgatatttcctatgtacatagcttttattgttgtaaatcctttcttaatggttaaataggattgttagcaactatgggtttgcagttttctgagtaggtgagttttgaatatgggtaaatcagaataatgagacaacttgttaatctctttaatactaaaaataaattactcttctatttcagggacttaggtaattt

SEQ ID NO: 26443 - protein, 446 aa, Homo sapiens; identical to SEQ ID NO: 3529

SEQ ID NO: 26444 - DNA, 3195 bp, Homo sapiens
caggcgggacgggctctcccttgggtgcttagccccgcccccgtcccactctgccctgttgctgtcgcgccgctgctggttgctgtccctggacccctaccatggaggagaccatcaaagatccccccacatcagctgtcttgctggatcactgtcatttctctcaggtcatctttaacagtgtggagaagttctacatccctggaggggacgtcacatgtcattataccttcacccagcatttcatccctcgtcgaaaggattggattggcatctttagagtggggtggaagacaacccgtgagtattacaccttcatgtgggttactttgcccattgacctaaacaacaaatcagctaaacagcaggaagtccaattcaaagcttactacctgcccaaggatgatgagtattaccagttctgctatgtggatgaggatggtgtggtccggggagcaagtattcctttccaattccgtccagaaaatgaggaagacatcctggttgttaccactcagggagaggtggaagagattgagcagcacaacaaggagctttgcaaagaaaaccaggagctgaaggacagctgtatcagcctccagaagcagaactcagacatgcaggctgagctccaaaagaagcaggaggagctagaaaccctacagagcatcaataagaagttggaactgaaagtgaaagaacagaaggactattgggagacagagctgcttcaactgaaagaacaaaaccagaagatgtcctcagaaaatgagaagatgggaatcagagtggatcagcttcaggcccagctgtcaactcaagagaaagaaatggagaagcttgttcagggagatcaagataagacagagcagttagagcagctgaaaaaggaaaatgaccacctctttctcagtttaactgaacagaggaaggaccagaagaagctcgagcagacagtggagcaaatgaagcagaatgaaactactgcaatgaagaaacaacaggaattaatggatgaaaactttgacctgtcaaaaagactgagtgagaacgaaattatatgtaatgctctgcagagacagaaagagagattggaaggagaaaatgatcttttgaagagggagaacagcagattgctcagttacatgggtctggattttaattctttgccgtatcaagtacctacttcagatgaaggaggcgcaagacaaaatccaggacttgcctatggaaacccatattctggtatccaagaaagttcttcccccagcccgctctccatcaagaaatgccctatctgcaaagcagatgatatttgtgatcacaccttggagcaacagcagatgcagcccctttgtttcaattgtccaatttgtgacaagatcttcccagctacagagaagcagatctttgaagaccacgtgttctgccactctctctgagtatcccaacctcttggatgtatacagagattttatagaatagaacctatagcttctaccatgagttatatgagtcaagatcctgcctaacctgaaattattagggatttactcagccctgctgccgctaacagtggagttatgtcactgatctgaaggtcactgttaagggcttctgctgccatccttgtgggttgctacctttaagtcgcataactctagctgtatcatcctctcacctgtcattcttctgagggtctcagtacaagggccctgggatggagccaacctgggtattcacaacaggcctgacttgatactaagtgattagttttccaagttgtcccactgccattcaaagtcagcccttgagtgtatttgttctcagtcctaaccctggggccagagattggtccgaggttgagaattccttcctcctcatccttggtgttgctttctccaaatgattgttttagactagccaaaaatgccgtggcaaagagctcagaaatccaatttggataccaaaggtttctcatgttaatttctcagcccccaaagaagcatcttactcctgaaccttagacaggaagtattgtttcagtcacagaaagcttttctgggtacctctggttagcactttctactctctgatatttcctatgtacatagcttttattgttgtaaatcctttcttaatggttaaataggattgttagcaactatgggtttgcagttttctgagtaggtgagttttgaatatgggtaaatcagaataatgagacaacttgttaatctctttaatactaaaaataaattactcttctatttcagggacttaggtaatttaaaataaaccttcaatttatggtcttctgttttgaagctcatgggaaaattgtgatcaaaagggctatgggaagggcagaccccgccaatgatttctcttcacctgtcttaagattaaataaaaaagagtgtcctggcagttatcttgaggtggggaaggaggtgatgaaacattagtttgtgaaatccaaggccctggcttgctttctttctttttttttttttttttttgaaacagtctctctctgtcacccaggctggcgtgcaatggcgcagttgactcactacagcctctgcctcccaggttcaagcgattctcatgccttagcctcccaagtagctgggattacaggtgtgtgccgcaatgcccagctaatttttgtgtttttagtagagacagggtttcactatgttggccaggctggtctcgaactcctggcctcacgtgatctgtccacttcagccgtccaaagtgctgggattacaagcgtgagccactgtgctgggcccgaggccctgacttcttgctgtaactttccatgcattttttttaaaaggagcagtgtggattttcgcaccctttgtgaactaagttcaatgcgctctatccaaatttgcctaattgaactataagaaagtaataattccattttctatcccctcagggactgaacaaatggaaataactcccaggcagtatcaggtggtcactacagagacttccacaaaaacttttgaatgatgtgaaacacgatgtcatgaataagggttgagccaactatagctctgtgttcctactgggctttccctaatgtggttgggagttatgccctagactaactgtattgtcctagtcacagctccttgctttgatttcatccttgataaaatgaagatgaaactt

SEQ ID NO: 26445 - protein, 446 aa, Homo sapiens; identical to SEQ ID NO: 3529

SEQ ID NO: 26446 - DNA, 3303 bp, Homo sapiens
caggcgggacgggctctcccttgggtgcttagccccgcccccgtcccactctgccctgttgctgtcgcgccgctgctggttgctgtccctggacccctaccatggaggagaccatcaaagatccccccacatcagctgtcttgctggatcactgtcatttctctcaggtcatctttaacagtgtggagaagttctacatccctggaggggacgtcacatgtcattataccttcacccagcatttcatccctcgtcgaaaggattggattggcatctttagagtggggtggaagacaacccgtgagtattacaccttcatgtgggttactttgcccattgacctaaacaacaaatcagctaaacagcaggaagtccaattcaaagcttactacctgcccaaggatgatgagtattaccagttctgctatgtggatgaggatggtgtggtccggggagcaagtattcctttccaattccgtccagaaaatgaggaagacatcctggttgttaccactcagggagaggtggaagagattgagcagcacaacaaggagctttgcaaagaaaaccaggagctgaaggacagctgtatcagcctccagaagcagaactcagacatgcaggctgagctccaaaagaagcaggaggagctagaaaccctacagagcatcaataagaagttggaactgaaagtgaaagaacagaaggactattgggagacagagctgcttcaactgaaagaacaaaaccagaagatgtcctcagaaaatgagaagatgggaatcagagtggatcagcttcaggcccagctgtcaactcaagagaaagaaatggagaagcttgttcagggagatcaagataagacagagcagttagagcagctgaaaaaggaaaatgaccacctctttctcagtttaactgaacagaggaaggaccagaagaagctcgagcagacagtggagcaaatgaagcagaatgaaactactgcaatgaagaaacaacaggaattaatggatgaaaactttgacctgtcaaaaagactgagtgagaacgaaattatatgtaatgctctgcagagacagaaagagagattggaaggagaaaatgatcttttgaagagggagaacagcagattgctcagttacatgggtctggattttaattctttgccgtatcaagtacctacttcagatgaaggaggcgcaagacaaaatccaggacttgcctatggaaacccatattctggtatccaagaaagttcttcccccagcccgctctccatcaagaaatgccctatctgcaaagcagatgatatttgtgatcacaccttggagcaacagcagatgcagcccctttgtttcaattgtccaatttgtgacaagatcttcccagctacagagaagcagatctttgaagaccacgtgttctgccactctctctgagtatcccaacctcttggatgtatacagagattttatagaatagaacctatagcttctaccatgagttatatgagtcaagatcctgcctaacctgaaattattagggatttactcagccctgctgccgctaacagtggagttatgtcactgatctgaaggtcactgttaagggcttctgctgccatccttgtgggttgctacctttaagtcgcataactctagctgtatcatcctctcacctgtcattcttctgagggtctcagtacaagggccctgggatggagccaacctgggtattcacaacaggcctgacttgatactaagtgattagttttccaagttgtcccactgccattcaaagtcagcccttgagtgtatttgttctcagtcctaaccctggggccagagattggtccgaggttgagaattccttcctcctcatccttggtgttgctttctccaaatgattgttttagactagccaaaaatgccgtggcaaagagctcagaaatccaatttggataccaaaggtttctcatgttaatttctcagcccccaaagaagcatcttactcctgaaccttagacaggaagtattgtttcagtcacagaaagcttttctgggtacctctggttagcactttctactctctgatatttcctatgtacatagcttttattgttgtaaatcctttcttaatggttaaataggattgttagcaactatgggtttgcagttttctgagtaggtgagttttgaatatgggtaaatcagaataatgagacaacttgttaatctctttaatactaaaaataaattactcttctatttcagggacttaggtaatttaaaataaaccttcaatttatggtcttctgttttgaagctcatgggaaaattgtgatcaaaagggctatgggaagggcagaccccgccaatgatttctcttcacctgtcttaagattaaataaaaaagagtgtcctggcagttatcttgaggtggggaaggaggtgatgaaacattagtttgtgaaatccaaggccctggcttgctttctttctttttttttttttttttttgaaacagtctctctctgtcacccaggctggcgtgcaatggcgcagttgactcactacagcctctgcctcccaggttcaagcgattctcatgccttagcctcccaagtagctgggattacaggtgtgtgccgcaatgcccagctaatttttgtgtttttagtagagacagggtttcactatgttggccaggctggtctcgaactcctggcctcacgtgatctgtccacttcagccgtccaaagtgctgggattacaagcgtgagccactgtgctgggcccgaggccctgacttcttgctgtaactttccatgcattttttttaaaaggagcagtgtggattttcgcaccctttgtgaactaagttcaatgcgctctatccaaatttgcctaattgaactataagaaagtaataattccattttctatcccctcagggactgaacaaatggaaataactcccaggcagtatcaggtggtcactacagagacttccacaaaaacttttgaatgatgtgaaacacgatgtcatgaataagggttgagccaactatagctctgtgttcctactgggctttccctaatgtggttgggagttatgccctagactaactgtattgtcctagtcacagctccttgctttgatttcatccttgataaaatgaagatgaaacttacactacttctccaagccttttgctgtcttaagaataagacctgagattaacactaaccctagaatagaaatgtaatagggagatggtaataaaggagtttttctggc

SEQ ID NO: 26447 - protein, 446 aa, Homo sapiens; identical to SEQ ID NO: 3529

SEQ ID NO: 26448 - DNA, 3682 bp, Homo sapiens
caggcgggacgggctctcccttgggtgcttagccccgcccccgtcccactctgccctgttgctgtcgcgccgctgctggttgctgtccctggacccctaccatggaggagaccatcaaagatccccccacatcagctgtcttgctggatcactgtcatttctctcaggtcatctttaacagtgtggagaagttctacatccctggaggggacgtcacatgtcattataccttcacccagcatttcatccctcgtcgaaaggattggattggcatctttagagtggggtggaagacaacccgtgagtattacaccttcatgtgggttactttgcccattgacctaaacaacaaatcagctaaacagcaggaagtccaattcaaagcttactacctgcccaaggatgatgagtattaccagttctgctatgtggatgaggatggtgtggtccggggagcaagtattcctttccaattccgtccagaaaatgaggaagacatcctggttgttaccactcagggagaggtggaagagattgagcagcacaacaaggagctttgcaaagaaaaccaggagctgaaggacagctgtatcagcctccagaagcagaactcagacatgcaggctgagctccaaaagaagcaggaggagctagaaaccctacagagcatcaataagaagttggaactgaaagtgaaagaacagaaggactattgggagacagagctgcttcaactgaaagaacaaaaccagaagatgtcctcagaaaatgagaagatgggaatcagagtggatcagcttcaggcccagctgtcaactcaagagaaagaaatggagaagcttgttcagggagatcaagataagacagagcagttagagcagctgaaaaaggaaaatgaccacctctttctcagtttaactgaacagaggaaggaccagaagaagctcgagcagacagtggagcaaatgaagcagaatgaaactactgcaatgaagaaacaacaggaattaatggatgaaaactttgacctgtcaaaaagactgagtgagaacgaaattatatgtaatgctctgcagagacagaaagagagattggaaggagaaaatgatcttttgaagagggagaacagcagattgctcagttacatgggtctggattttaattctttgccgtatcaagtacctacttcagatgaaggaggcgcaagacaaaatccaggacttgcctatggaaacccatattctggtatccaagaaagttcttcccccagcccgctctccatcaagaaatgccctatctgcaaagcagatgatatttgtgatcacaccttggagcaacagcagatgcagcccctttgtttcaattgtccaatttgtgacaagatcttcccagctacagagaagcagatctttgaagaccacgtgttctgccactctctctgagtatcccaacctcttggatgtatacagagattttatagaatagaacctatagcttctaccatgagttatatgagtcaagatcctgcctaacctgaaattattagggatttactcagccctgctgccgctaacagtggagttatgtcactgatctgaaggtcactgttaagggcttctgctgccatccttgtgggttgctacctttaagtcgcataactctagctgtatcatcctctcacctgtcattcttctgagggtctcagtacaagggccctgggatggagccaacctgggtattcacaacaggcctgacttgatactaagtgattagttttccaagttgtcccactgccattcaaagtcagcccttgagtgtatttgttctcagtcctaaccctggggccagagattggtccgaggttgagaattccttcctcctcatccttggtgttgctttctccaaatgattgttttagactagccaaaaatgccgtggcaaagagctcagaaatccaatttggataccaaaggtttctcatgttaatttctcagcccccaaagaagcatcttactcctgaaccttagacaggaagtattgtttcagtcacagaaagcttttctgggtacctctggttagcactttctactctctgatatttcctatgtacatagcttttattgttgtaaatcctttcttaatggttaaataggattgttagcaactatgggtttgcagttttctgagtaggtgagttttgaatatgggtaaatcagaataatgagacaacttgttaatctctttaatactaaaaataaattactcttctatttcagggacttaggtaatttaaaataaaccttcaatttatggtcttctgttttgaagctcatgggaaaattgtgatcaaaagggctatgggaagggcagaccccgccaatgatttctcttcacctgtcttaagattaaataaaaaagagtgtcctggcagttatcttgaggtggggaaggaggtgatgaaacattagtttgtgaaatccaaggccctggcttgctttctttctttttttttttttttttttgaaacagtctctctctgtcacccaggctggcgtgcaatggcgcagttgactcactacagcctctgcctcccaggttcaagcgattctcatgccttagcctcccaagtagctgggattacaggtgtgtgccgcaatgcccagctaatttttgtgtttttagtagagacagggtttcactatgttggccaggctggtctcgaactcctggcctcacgtgatctgtccacttcagccgtccaaagtgctgggattacaagcgtgagccactgtgctgggcccgaggccctgacttcttgctgtaactttccatgcattttttttaaaaggagcagtgtggattttcgcaccctttgtgaactaagttcaatgcgctctatccaaatttgcctaattgaactataagaaagtaataattccattttctatcccctcagggactgaacaaatggaaataactcccaggcagtatcaggtggtcactacagagacttccacaaaaacttttgaatgatgtgaaacacgatgtcatgaataagggttgagccaactatagctctgtgttcctactgggctttccctaatgtggttgggagttatgccctagactaactgtattgtcctagtcacagctccttgctttgatttcatccttgataaaatgaagatgaaacttacactacttctccaagccttttgctgtcttaagaataagacctgagattaacactaaccctagaatagaaatgtaatagggagatggtaataaaggagtttttctggcacataccctccctacagaatttctgttgctccccagatccagtgaagaattgcagtttcatttattttgtaccagtcagctcttaattaagtacatgaatggagaggaacagtggtgcacataatccaaatcagtgaataccattttctggtgaattacccacccctttgcccctgctaccccgagggttaccatgattgtcaacagcagcaggagcccttccacagggcttggtaaaaaaaccagttgaggtgttaatgaccctttttgctgggtgtaaaacaaagcatctttaaccactgttcattatccccagctgctcttaccaaggctttgaagggggaaattatgctctaggcagccactagtagtaaacaat

SEQ ID NO: 26449 - protein, 446 aa, Homo sapiens; identical to SEQ ID NO: 3529

SEQ ID NO: 26450 - DNA, 484 bp, Homo sapiens
gtcccactctgccctgttgctgtcgcgccgctgctggttgctgtccctggacccctaccatggaggagaccatcaaagatccccccacatcagctgtcttgctggatcactgtcatttctctcaggtcatctttaacagtgtggagaagttctacatccctggaggggacgtcacatgtcattataccttcacccagcatttcatccctcgtcgaaaggattggattggcatctttagagtaagtggttaattcagtaccaagtgatcaggaactagaggtgattcttagttacctaactgtgtgactctctgtgtattataagcattttgtataatatgtgttggcagtttttaaattctagccaagctccacagcacttctctcttcacacattaatgtgtgctgtgggactcaaattttcatttcagtgtcaagctaaaataagatggcaaatcatataatcctcaaattttgttatgctt

SEQ ID NO: 26451 - protein, 63 aa, Homo sapiens
MEETIKDPPTSAVLLDHCHFSQVIFNSVEKFYIPGGDVTCHYTFTQHFIPRRKDWIGIFRVSG

SEQ ID NO: 26452 - DNA, 464 bp, Homo sapiens
actctgccctgttgctgtcgcgccgctgctggttgctgtccctgtctcactctgtcccccaggctggagtgcagtggcatgatcttggctcactgcaacctctgcctcctgggttcaagcggttctcctgcctcagcctcctgagtagctgggattacaggtgcctgccatcgtgcccgggacccctaccatggaggagaccatcaaagatccccccacatcagctgtcttgctggatcactgtcatttctctcaggtcatctttaacagtgtggagaagttctacatccctggaggggacgtcacatgtcattataccttcacccagcatttcatccctcgtcgaaaggattggattggcatctttagagctggagtgcaatggcacgatttgtctcactgctacctccacctcccgggttcaagcagttctcctgcctcagcatcccgagtagctgagatta

SEQ ID NO: 26453 - protein, 90 aa, Homo sapiens
MEETIKDPPTSAVLLDHCHFSQVIFNSVEKFYIPGGDVTCHYTFTQHFIPRRKDWIGIFRAGVQWHDLSHCYLHLPGSSSSPASASRVAE

SEQ ID NO: 26454 - DNA, 733 bp, Homo sapiens
actctgccctgttgctgtcgcgccgctgctggttgctgtccctggacccctaccatggaggagaccatcaaagatccccccacatcagctgtcttgctggatcactgtcatttctctcaggtcatctttaacagtgtggagaagttctacatccctggaggggacgtcacatgtcattataccttcacccagcatttcatccctcgtcgaaaggattggattggcatctttagagtggggtggaagacaacccgtgagtattacaccttcatgtgggttactttgcccattgacctaaacaacaaatcagctaaacagcaggaagtccaattcaaaggtgagaaaaatactggatcaaaggtgttgaagacagtagccaagactaattaattcccttcagcttgagctttctggggcagataaaaagatttccagaattttacttttctgaatagatcttattttggatgaaaaattatgttgtgttttcagcttactacctgcccaaggatgatgagtattaccagttctgctatgtggatgaggatggtgtggtccggggagcaagtattcctttccaattccgtccagaaaatgaggaagacatcctggttgttaccactcaggtttgtaaaacttctcacctcaatcccttactgccattacgggtagcaatataggataggatggaatttgagttaataaggctttattgaatatctaacgggtatca

SEQ ID NO: 26455 - protein, 111 aa, Homo sapiens [sequence omitted]

SEQ ID NO: 26456 - DNA, 966 bp, Homo sapiens
acaccataatgacaaatcttcttatttccagagacaagaaataaaggtcaaatttaattaatttacactgccaactcccaacgtcagtgacctttggtttgacacctcagtatgtcatgtgcctatttgccagtgctattcatcctgaaatcagacaccattctcaactgcactgtgaaggagctgttgcttatttatatccttcattgaattccttttccataattgtttggaacatcaagcttattgatgagcaacggaagctggaggtaacaagactggtgtttggagatagggattgtggccaaccagcaggacactggcaagtatcatgacagctgttgagactgcaaggtgttgaatcatcagactaaaaggcgtgccaacccaccagagtgttttctgtcttagaaagaagatggtagttgtttttcttcctcatatgtagcaaagcgtataggtcacattgcctgggcaacagagcgagactccatctcaaaaaaaaaaaaaaaagaaaagaaaagaaagaaaaattctcacagtgcagtagccccctgaggtgggtagtagtatctcttgggcataagtaagtaacatgaatatccctgagagatggtgactttcccaaggcctcacagtgaataagccgtgaagcaggtttggctcccaaacctctggtttttcctcctctactctgctgaattcctttgagcaacagatagtaaattagagaatgaagagttggctgtaaagtttcgtcctttgcagctcacctcaaatgctctccccagtgttctttcagtgtagtcttaatcagactattcaactcctcatcaccccagacactggtagtatctggcaccaggtaggtactcagtaactctttttattttttatttattttttaaaatttattttattttgagacagagtcttgctctgtcacccaggctggagtgcagaggt

SEQ ID NO: 26457 - protein, 72 aa, Homo sapiens
MCLFASAIHPEIRHHSQLHCEGAVAYLYPSLNSFSIIVWNIKLIDEQRKLEVTRLVFGDRDCGQPAGHWQVS

SEQ ID NO: 26458 - DNA, 749 bp, Homo sapiens
atgcctgacatatagtaagtgctcaataaatatttgttgcctgcctaagatactcattcaaaagtcatagaactagtctgtccctttgatgttgtttcaatctataggaggagctagaaaccctacagagcatcaataagaagttggaactgaaagtgaaagaacagaaggactattgggagacagagctgcttcaactgaaagaacaaaaccagaagatgtcctcagaaaatgagaagatgggaatcagagtggatcagcttcaggtaggtaatgccatatgtttgtcaaaggatattttcttagccttaccactgctccaatttggtggcctagaaagatgtatttcattgcagtgagtgcctaatggcatacttttcaaagtatcacactaaagtttcaggttatgtattttccattcttggaccaggtaagcctccaccctacccatgcccctgcttttaaaaaaaaaaaaatcatgattcacagccgggcgcagtggctcatgtctgtaatcccagcactttgggaggccaaggcaggtggatcacctgaggtcaggagttcgagatcagcctggccaatatggcaaaaccccgtctctactaaaaatacaaaaattagctgggcgtgctaatttacaggcgcacgtgtaattccagctactcgggaggctgaggcagaagaatcacttgagccccggaggcaaaggttgcagtgaatagagattgcaccactgcactccagcc

SEQ ID NO: 26459 - protein, 76 aa, Homo sapiens
MYFPFLDQVSLHPTHAPAFKKKKIMIHSRAQWLMSVIPALWEAKAGGSPEVRSSRSAWPIWQNPVSTKNTKISWAC

SEQ ID NO: 26460 - DNA, 1307 bp, Homo sapiens
tttcatccttgataaaatgaagatgaaacttacactacttctccaagccttttgctgtcttaagaataagacctgagattaacactaaccctagaatagaaatgtaatagggagatggtaataaaggagtttttctggcacataccctccctacagaatttctgttgctccccagatccagtgaagaattgcagtttcatttattttgtaccagtcagctcttaattaagtacatgaatggagaggaacagtggtgcacataatccaaatcagtgaataccattttctggtgaattacccacccctttgcccctgctaccccgagggttaccatgattgtcaacagcagcaggagcccttccacagggcttggtaaaaaaaccagttgaggtgttaatgaccctttttgctgggtgtaaaacaaagcatctttaaccactgttcattatccccagctgctcttaccaaggctttgaagggggaaattatgctctaggcagccactagtagtaaacaatagttcttttttttgagacagagtttcactctgtcacccaggctagagttgcagtgagctaagatcgcaccactttactccagcctgagcgacagagcaagactctgtctcaaaaaaaaaaaaaaagagagagagagttggcaagatatttggtaaacctaggccttaacacctatagcttcagctcttttccctggtcttgctaaaaattgggatgaaatgtgactgccttgatgttcaaatatcattctcctgtgatttgattttctacggtggcagtggcttacactgaggtaagcatactctaacctggtctcctaggaacaaatgtggatgaaatgtggatgcagtccattacctgggaaaaaagcaaaatggactctacatagagacaagatccaaagagatattcatctgattgccctgagttaaccaacaataggccataagctcagtgaagttacactggccccagtgctttccttagctgctctcatataaatattcaaaagtcttagtcggtgctcacgcctgtaatcccagcactttgggaggccaaggtgggcagatcacgaggtcaggagatcgagaccatcctggctaacatggtgaaaccccatctctactaaaaatgcaaaaaattagcggggcttggtggcaggcacctgtagtcccagctactcgggaggctgaggcaggagaatggcgtgaacccgggaggtggagcttgcagtgagccaagatcgcaccactgcactccagcctgggagacaaggtgagactctgtctc

SEQ ID NO: 26461 - protein, 36 aa, Homo sapiens
MVIKEFFWHIPSLQNFCCSPDPVKNCSFIYFVPVSS

SEQ ID NO: 26462 - DNA, 603 bp, Homo sapiens
ggcgggtggatcacgaggtcaggagttcaagaccagcctggccaacatggtgaaaccccatctctactaaaactacaaaaaattagccaggtgtggcagcaggcacctgtaatcccagctactcgggaggctgaggcagagaattgcttgaacccgggaggcggaggttgcagtgagctaagatcgcaccactttactccagcctgagcgacagagcaagactctgtctcaaaaaaaaaaaaaaagagagagagagttggcaagatatttggtaaacctaggccttaacacctatagcttcagctcttttccctggtcttgctaaaaattgggatgaaatgtgactgccttgatgttcaaatatcattctcctgtgatttgattttctacggtggcagtggcttacactgaggtaagcatactctaacctggtctcctaggaacaaatgtggatgaaatgtggatgcagtccattacctgggaaaaaagcaaaatggacttccagcctgggagacaaggtgagactctgtctcaaaaaaaaaaaaaaaaaaaaaaaaagtcttggccgagtgcagtggctcatgcccataatcccagcacttt

SEQ ID NO: 26463 - protein, 51 aa, Homo sapiens
MWMKCGCSPLPGKKAKWTSSLGDKVRLCLKKKKKKKKSLGRVQWLMPIIPA

SEQ ID NO: 26464 - DNA, 933 bp, Homo sapiens
agatctcgccttcttctgccgcttctggtgctgcttgtgtgctcatttggtgcggacctggtacctcttttgtgaagcggcagctgaggagacttcagtgctcgccatggccgacgaaaagcccaaggaaggagtcaagacagaacaacgatcatattaatttgaaggtggcggggcaggatggttctatggtgcagtttaagattaagaggcatacaccactcagtaaactaatgaaagcctattgtgaacaacagttggaaatggaggatgaagatacaattgatgtgttccaacagcagacgggaggtgtctactgaaaagggaacctgcttctttactccagaactctgttctttaaagaccaagattacattctcaattagaaaactgcaatttggttccaccacatcctgactactaccgtatagttttctctgttctttcatttcccccttccccattcctttattgtacgtaaagtaactggtatatgtgcacaagcatattgcattttttttttttaactaaacagccaatggtatgttttgactgacatcaaggggagacgggatggggaaaaatactgattctgtgaaaataccccctttctccattagtggcatgctcattcagctcctatctttatattccagtaagttattttgctctcactgttttaacaacaacaacaaaacaacaacaacaacataaaaatccttgcataccttgttcaattggagaattttaatgtttttcatttatcattgtaaaaccaaggacaattttataacttttttgtacgtagctgttacatgtagggtaatctgtctttaagtaaggataaattactctaaaacaaaaaagaatcctacatagttttcccttcaagtcaagcgtcttgttgtttaaataaacttcttgtttaaaatg

SEQ ID NO: 26465 - protein, 43 aa, Homo sapiens
MVQFKIKRHTPLSKLMKAYCEQQLEMEDEDTIDVFQQQTGGVY

SEQ ID NO: 26466 - DNA, 601 bp, Homo sapiens
ccaatgagaatggagaaggtccaggacacgtgggtgggggaagctgagcgctgagaccaagggctaaagctgggagactgaaaaaatgcagaccgccggggcattattcatttctccagctctgatccgctgttgtaccaggggtctaatcaggcctgtgtctgcctccttcttgaatagcccagtgaattcatctaaacagccttcctacagcaacttcccactccaggtggccagacgggagttccagaccagtgttgtctcccgggacattgacacagcagccaagtttattggtgctggggcagccacagttggtgtggctggttcaggggctggcattggaaccgtgtttggcagcttgatcattggctatgccaggaacccgtctctcaagcagcagctcttctcctatgccattcttggctttgccctgtctgaggccatggggcttttctgtttgatggtcgccttcctcatcctcttcgccatgtgaggctccatgggggggtcaccggcctgttgctactgcaactccacaccattcttggtgctggggtgtgttaagctttaccattaaacacaacgtttctctaaaccc

SEQ ID NO: 26467 - protein, 136 aa, Homo sapiens; identical to SEQ ID NO: 3531

SEQ ID NO: 26468 - DNA, 2217 bp, Homo sapiens
aatgagaatggagaaggtccaggacacgtgggtgggggaagctgagcgctgagaccaagggctaaagctgggagactgaaaaaatgcagaccgccggggcattattcatttctccagctctggtaaggtgccgcgccgcagtgctctgtagtaccaggtgtatggtgtggacgccatcagtgtttaatgaatgaacccaggggagcttggcgtcctgatgatgtaggctctttgaggtggctgtaggatgtgatgaaggtaacccctgtttatctgggcctgtgaaccaagctatcttggctttggaatgtggtcagagagtctggatttgatttttatccccagtctgtcctggccatagagacagcccactaaaacagtggttttcaacagtggctgcacgttagaatcatccagggaactttttaaaatcctgatgcctaggctgcaccttagaccatttgcatcagactttgggaatgggggtggaacccaggcatctgtatcttttaagacttctccagatgattccaccgtgcagccaagtttgagaaccactgcactaaaaattatttcaaaaaagccatgttacagatggctctccttggatggctattccagtcggtttccggggctgactggcccactccatttagggtgtgtagctgtgagtgtattttagcagaataaaatttcccccatctgattacttggtgatctgggtataaacctttcctgtacctgctttggtattagtgtgggttcttgttccattctgagaagctgattaaagctgtgcccaaagaagtgaactttggtttggttttgaatggtgaaggttgccactgctgactatatcaagctattgagacagctgtctctggggcaggcctatctgataggaacaggaataaattgaccttgaaatacattgaacttattctgtttatgaaatctgtagtcatttttgacagctcagcaattaggattttttttccttgactgatttggtaggatgtggctttctgattttacagatccgctgttgtaccaggggtctaatcaggcctgtgtctgcctccttcttgaatagcccagtgaattcatctaaacaggtaagggaggaatagctctcttaggaatgttcccaaggcccaggatggtggctcacacctgtaatcccagctctttgagaggctgaggcgagaggatcacttgagcccagttgttcaagaccagcctgggcaacacagtgaaaccccatctctacaaaaaaaataaaaaaattagccatgtgtggtggcatgtggctgtagtcccagttactccagggctgagatgagaggattggttaatcccagaggtcgagactgctgtgactatgccactgcactccagactgggtgacagagcaagaccctgactcataaaaacccattaattaattttttttaaatcaaggaatgttcccagacaggggtccttcagcttaagttgcctttagaccaaagtgggaggagagttggagaatctgtatgctttaatagttctaagtcccccaaggtaagccttgtaggtaagaaacttataaaagtgaggtgtgcctaacccatgaaatttccctagtcctgtctgctgtctgacaacagactctaagactaattcccagcatactctgcaatcagagtattctgcatttaccaggcagtttgccaacagtttcagagctcaggtgggtggggtgaaggaggtagagtcagccacctgtccttatgccatactatctctctgctatctcgcctgccttgcttctctttctagccttcctacagcaacttcccactccaggtggccagacgggagttccagaccagtgttgtctcccgggacattgacacagcagccaagtttattggtgctggggcagccacagttggtgtggctggttcaggggctggcattggaaccgtgtttggcagcttgatcattggctatgccaggaacccgtctctcaagcagcagctcttctcctatgccattcttggctttgccctgtctgaggccatggggcttttctgtttgatggtcgccttcctcatcctcttcgccatgtgaggctccatgggggggtcaccggcctgttgctactgcaactccacaccattcttggtgctggggtgtgttaagctttaccattaaacacaacgtttctctaaa

SEQ ID NO: 26469 - protein, 81 aa, Homo sapiens
MPRLHLRPFASDFGNGGGTQASVSFKTSPDDSTVQPSLRTTALKIISKKPCYRWLSLDGYSSRFPGLTGPLHLGCVAVSVF

SEQ ID NO: 26470 - DNA, 519 bp, Homo sapiens
aggacacgtgggtgggggaagctgagcgctgagaccaagggctaaagctgggaggtgagtctgggtctaatcaggcctgtgtctgcctccttcttgaatagcccagtgaattcatctaaacagccttcctacagcaacttcccactccaggtggccagacgggagttccagaccagtgttgtctcccgggacattgacacagcagccaagtttattggtgctggggcagccacagttggtgtggctggttcaggggctggcattggaaccgtgtttggcagcttgatcattggctatgccaggaacccgtctctcaagcagcagctcttctcctatgccattcttggctttgccctgtctgaggccatggggcttttctgtttgatggtcgccttcctcatcctcttcgccatgtgaggctccatgggggggtcaccggcctgttgctactgcaactccacaccattcttggtgctggggtgtgttaagctttaccattaaacacaacgtttctctaaa

SEQ ID NO: 26471 - protein, 58 aa, Homo sapiens
IHLNSLPTATSHSRWPDGSSRPVLSPGTLTQQPSLLVLGQPQLVWLVQGLALEPCLAA

SEQ ID NO: 26472 - DNA, 637 bp, Homo sapiens
ggggaagctgagcgctgagaccaagggctaaagctgggaggtgagtctgtcaccttgagccgggcgagcgctgtgggccaagcaggggttgcagggtagtaggagtgcagactgaaaaaatgcagaccgccggggcattattcatttctccagctctgatccgctgttgtaccaggggtctaatcaggcctgtgtctgcctccttcttgaatagcccagtgaattcatctaaacagccttcctacagcaacttcccactccaggtggccagacgggagttccagaccagtgttgtctcccgggacattgacacagcagccaagtttattggtgctggggcagccacagttggtgtggctggttcaggggctggcattggaaccgtgtttggcagcttgatcattggctatgccaggaacccgtctctcaagcagcagctcttctcctatgccattcttggctttgccctgtctgaggccatggggcttttctgtttgatggtcgccttcctcatcctcttcgccatgtgaggctccatgggggggtcaccggcctgttgctactgcaactccacaccattcttggtgctggggtgtgttaagctttaccattaaacacaacgtttctctaaacccct

SEQ ID NO: 26473 - protein, 136 aa, Homo sapiens; identical to SEQ ID NO: 3531

SEQ ID NO: 26474 - DNA, 770 bp, Homo sapiens
cttgagccgggcgagcgctgtgggccaagcaggggttgcagggtagtaggagtgcaggtgacttggggccgggagccagcaataggcagggttgtgggctgggcagtgtggaggggtatttccccccagtgctgggagaggctatggcaatctagatatggccttatcaatgaatgttaattaccaacggtaatgaacgattgactgcctcggctggggcgggtcggggactgctgtgtaagatgggcaggatcctgcgcgacacctgcccagatgtggctttctgattttacagatccgctgttgtaccaggggtctaatcaggcctgtgtctgcctccttcttgaatagcccagtgaattcatctaaacagccttcctacagcaacttcccactccaggtggccagacgggagttccagaccagtgttgtctcccgggacattgacacagcagccaagtttattggtgctggggcagccacagttggtgtggctggttcaggggctggcattggaaccgtgtttggcagcttgatcattggctatgccaggaacccgtctctcaagcagcagctcttctcctatgccattcttggctttgccctgtctgaggccatggggcttttctgtttgatggtcgccttcctcatcctcttcgccatgtgaggctccatgggggggtcaccggcctgttgctactgcaactccacaccattcttggtgctggggtgtgttaagctttaccattaaacacaacgtttctctaaac

SEQ ID NO: 26475 - protein, 37 aa, Homo sapiens
MLITNGNERLTASAGAGRGLLCKMGRILRDTCPDVAF

SEQ ID NO: 26476 - DNA, 446 bp, Homo sapiens
agactgaaaaaatgcagaccgccggggcattattcatttctccagctctgccttcctacagcaacttcccactccaggtggccagacgggagttccagaccagtgttgtctcccgggacattgacacagcagccaagtttattggtgctggggcagccacagttggtgtggctggttcaggggctggcattggaaccgtgtttggcagcttgatcattggctatgccaggaacccgtctctcaagcagcagctcttctcctatgccattcttggctttgccctgtctgaggccatggggcttttctgtttgatggtcgccttcctcatcctcttcgccatgtgaggctccatgggggggtcaccggcctgttgctactgcaactccacaccattcttggtgctggggtgtgttaagctttaccattaaacacaacgtttctctaaa

SEQ ID NO: 26477 - protein, 110 aa, Homo sapiens
MQTAGALFISPALPSYSNFPLQVARREFQTSVVSRDIDTAAKFIGAGAATVGVAGSGAGIGTVFGSLIIGYARNPSLKQQLFSYAILGFALSEAMGLFCLMVAFLILFAM

SEQ ID NO: 26478 - DNA, 989 bp, Homo sapiens
agatgattccaccgtgcagccaagtttgagaaccactgcactaaaaattatttcaaaaaagccatgttacagatggctctccttggatggctattccagtcggtttccggggctgactggcccactccatttagggtgtgtagctgtgagtgtattttagcagaataaaatttcccccatctgattacttggtgatctgggtataaacctttcctgtacctgctttggtattagtgtgggttcttgttccattctgagaagctgattaaagctgtgcccaaagaagtgaactttggtttggttttgaatggtgaaggttgccactgctgactatatcaagctattgagacagctgtctctggggcaggcctatctgataggaacaggaataaattgaccttgaaatacattgaacttattctgtttatgaaatctgtagtcatttttgacagctcagcaattaggattttttttccttgactgatttggtaggatgtggctttctgattttacagatccgctgttgtaccaggggtctaatcaggcctgtgtctgcctccttcttgaatagcccagtgaattcatctaaacagccttcctacagcaacttcccactccaggtggccagacgggagttccagaccagtgttgtctcccgggacattgacacagcagccaagtttattggtgctggggcagccacagttggtgtggctggttcaggggctggcattggaaccgtgtttggcagcttgatcattggctatgccaggaacccgtctctcaagcagcagctcttctcctatgccattcttggctttgccctgtctgaggccatggggcttttctgtttgatggtcgccttcctcatcctcttcgccatgtgaggctccatgggggggtcaccggcctgttgctactgcaactccacaccattcttggtgctggggtgtgttaagctttaccattaaacacaacgtttctctaaa

SEQ ID NO: 26479 - protein, 34 aa, Homo sapiens
MLQMALLGWLFQSVSGADWPTPFRVCSCECILAE

SEQ ID NO: 26480 - DNA, 433 bp, Homo sapiens
agaatctgtatgctttaatagttctaagtcccccaagccttcctacagcaacttcccactccaggtggccagacgggagttccagaccagtgttgtctcccgggacattgacacagcagccaagtttattggtgctggggcagccacagttggtgtggctggttcaggggctggcattggaaccgtgtttggcagcttgatcattggctatgccaggaacccgtctctcaagcagcagctcttctcctatgccattcttggctttgccctgtctgaggccatggggcttttctgtttgatggtcgccttcctcatcctcttcgccatgtgaggctccatgggggggtcaccggcctgttgctactgcaactccacaccattcttggtgctggggtgtgttaagctttaccattaaacacaacgtttctctaaa

SEQ ID NO: 26481 - protein, 65 aa, Homo sapiens
NLYALIVLSPPSLPTATSHSRWPDGSSRPVLSPGTLTQQPSLLVLGQPQLVWLVQGLALEPCLAA

SEQ ID NO: 26482 - DNA, 564 bp, Homo sapiens
ccgagaaccgggccagagtgtccccaccccctccgcttccacagcccagacggtgctggtcgtgtgggtcctgcgctgtgcggaagtagcggagagcccaattcaagtgttgaaaggggagaagagaggagggagtgggggaggaagggccatatcattcccgttaatggcggcgaccctcagacgtctgcatggttaggattggggatccagcatcctcatgggaagctcagtagagaagttgactcgctttgggccccttctctcggaaaggctctgcgattgatccctcctgcacacttgtgcacctagggcagggtaccattgcccttgcctgcaacaggaccaagagagaactcaacttggaatgaaaagctacctcttttagagtttattcaacatatatttatgaagggcctactaaatgccagtcactgttgctagttgttgccatggggataatgaaacagaactagagaagcttggtgaaaggaagaaacatcaggcctcctgactccaagcttagtactttttcttcccacaaatcttggaatatacaggaat

SEQ ID NO: 26483 - protein, 103 aa, Homo sapiens
PRTGPECPHPLRFHSPDGAGRVGPALCGSSGEPNSSVERGEERREWGRKGHIIPVNGGDPQTSAWLGLGIQHPHGKLSREVDSLWAPSLGKALRLIPPAHLCT

SEQ ID NO: 26484 - DNA, 2367 bp, Homo sapiens
actctggcccggttctcggtggtgcgggagcgggcgggagcagcggccgctctggtcggcggacgtgctgccgagtagtcccggaagcgaagcagcgatggcggagagtccgactgaggaggcggcaacggcgggcgccggggcggcgggccccggggcgagcagcgttgctggtgttgttggcgttagcggcagcggcggcgggttcgggccgcctttcctgccggatgtgtgggcggcggcggcggcagcgggcggggccgggggcccggggagcggcctggctccgctgcccgggctcccgccctcagccgctgcccacggggccgcgctgcttagccactgggaccccacgctcagctccgactgggacggcgagcgcaccgcgccgcagtgtctactccggatcaagcgggatatcatgtccatttataaggagcctcctccaggaatgttcgttgtacctgatactgttgacatgactaagattcatgcattgatcacaggcccatttgacactccttatgaagggggtttcttcctgttcgtgtttcggtgtccgcccgactatcccatccacccacctcgggtcaaactgatgacaacgggcaataacacagtgaggtttaaccccaacttctaccgcaatgggaaagtctgcttgagtattctaggtacatggactggacctgcctggagcccagcccagagcatctcctcagtgctcatctctatccagtccctgatgactgagaacccctatcacaatgagcccggctttgaacaggagagacatccaggagacagcaaaaactataatgaatgtatccggcacgagaccatcagagttgcagtctgtgacatgatggaaggaaagtgtccctgtcctgaacccctacgaggggtgatggagaagtcctttctggagtattacgacttctacgaggtggcctgcaaagatcgcctgcaccttcaaggccaaactatgcaggacccttttggagagaagcggggccactttgactaccagtccctcttgatgcgcctgggactgatacgtcagaaagtgctggagaggctccataatgagaatgcagaaatggactctgatagcagttcatctgggacagagacagaccttcatgggagcctgagggtttagaccctgctcccatctccccttcccccactcaagagtcccagcagaatcccttccccccaccccagggatggagaggcactgtgtatctccctccagactcgaagtcatcctgcaagatggcaagaaccaagcaagctccgatcccagggtgtgggagtgggggcctgttcccggtctgacctccttggcactggagcatctggggcttcgttcatccattcatcccgtatcaggggccaaggtacctttacaggagcacctagagcgagggcctttggcaaaaacaaaacaaccaacacacctctccacagggccagctccttagggataagtggaagatggaaattgcaattccaagagggagtgtgcccaaatgatttatggggatacctggaagggagcttggggtgggggctgtctgtgacacttaagcagtctgggtggttgtctatttgtctgtcttcagtcttgaagcagggcttcccaatgcccttttcctccctgccttccttcccccattatttcccacaggccagcataattttgtttttcctaatttatagtcactgttctagacagaccaaagagaaggaacagtggtggagtctaggctgctgatcagtaagctttacctagcacctgagcacctttctcccctcccctctttcctcacccttttctagatgtaagacagaaagtaaatgtgactgggacttaaccaaggtcttggtaaagcctgcatggcaccgtaagaagctgaaaatactgtttgttcccgcaatcactgatttgaaaagttcccaacacaggcagctgctgtgtatatgggattagagccactacatagaatagtctcttacagattttcataaatactagtcacaataagggtatttttcttgggggtggagtaagggggagactgatgctagtccttgttgtattttgttgggctgtccttgtgtattttcaccccagcctgtagtcctcctcacttcaaccccagggatttttggggagcaagggtagccaatggcagagggggttggggctgggactctggaggctcctccccttctttctcttccttccgcctcccccgtgcccccagctgctcttgtcactgtctctgatgggtatttgcctggctttgttgcttctctatctgtatttagctgcagtgatcctttagctggttggctcag

SEQ ID NO: 26485 - protein, 354 aa, Homo sapiens
MAESPTEEAATAGAGAAGPGASSVAGVVGVSGSGGGFGPPFLPDVWAAAAAAGGAGGPGSGLAPLPGLPPSAAAHGAALLSHWDPTLSSDWDGERTAPQCLLRIKRDIMSIYKEPPPGMFVVPDTVDMTKIHALITGPFDTPYEGGFFLFVFRCPPDYPIHPPRVKLMTTGNNTVRFNPNFYRNGKVCLSILGTWTGPAWSPAQSISSVLISIQSLMTENPYHNEPGFEQERHPGDSKNYNECIRHETIRVAVCDMMEGKCPCPEPLRGVMEKSFLEYYDFYEVACKDRLHLQGQTMQDPFGEKRGHFDYQSLLMRLGLIRQKVLERLHNENAEMDSDSSSSGTETDLHGSLRV

SEQ ID NO: 26486 - DNA, 3088 bp, Homo sapiens
actctggcccggttctcggtggtgcgggagcgggcgggagcagcggccgctctggtcggcggacgtgctgccgagtagtcccggaagcgaagcagcgatggcggagagtccgactgaggaggcggcaacggcgggcgccggggcggcgggccccggggcgagcagcgttgctggtgttgttggcgttagcggcagcggcggcgggttcgggccgcctttcctgccggatgtgtgggcggcggcggcggcagcgggcggggccgggggcccggggagcggcctggctccgctgcccgggctcccgccctcagccgctgcccacggggccgcgctgcttagccactgggaccccacgctcagctccgactgggacggcgagcgcaccgcgccgcagtgtctactccggatcaagcgggatatcatgtccatttataaggagcctcctccaggaatgttcgttgtacctgatactgttgacatgactaagattcatgcattgatcacaggcccatttgacactccttatgaagggggtttcttcctgttcgtgtttcggtgtccgcccgactatcccatccacccacctcgggtcaaactgatgacaacgggcaataacacagtgaggtttaaccccaacttctaccgcaatgggaaagtctgcttgagtattctaggtacatggactggacctgcctggagcccagcccagagcatctcctcagtgctcatctctatccagtccctgatgactgagaacccctatcacaatgagcccggctttgaacaggagagacatccaggagacagcaaaaactataatgaatgtatccggcacgagaccatcagagttgcagtctgtgacatgatggaaggaaagtgtccctgtcctgaacccctacgaggggtgatggagaagtcctttctggagtattacgacttctacgaggtggcctgcaaagatcgcctgcaccttcaaggccaaactatgcaggacccttttggagagaagcggggccactttgactaccagtccctcttgatgcgcctgggactgatacgtcagaaagtgctggagaggctccataatgagaatgcagaaatggactctgatagcagttcatctgggacagagacagaccttcatgggagcctgagggtttagaccctgctcccatctccccttcccccactcaagagtcccagcagaatcccttccccccaccccagggatggagaggcactgtgtatctccctccagactcgaagtcatcctgcaagatggcaagaaccaagcaagctccgatcccagggtgtgggagtgggggcctgttcccggtctgacctccttggcactggagcatctggggcttcgttcatccattcatcccgtatcaggggccaaggtacctttacaggagcacctagagcgagggcctttggcaaaaacaaaacaaccaacacacctctccacagggccagctccttagggataagtggaagatggaaattgcaattccaagagggagtgtgcccaaatgatttatggggatacctggaagggagcttggggtgggggctgtctgtgacacttaagcagtctgggtggttgtctatttgtctgtcttcagtcttgaagcagggcttcccaatgcccttttcctccctgccttccttcccccattatttcccacaggccagcataattttgtttttcctaatttatagtcactgttctagacagaccaaagagaaggaacagtggtggagtctaggctgctgatcagtaagctttacctagcacctgagcacctttctcccctcccctctttcctcacccttttctagatgtaagacagaaagtaaatgtgactgggacttaaccaaggtcttggtaaagcctgcatggcaccgtaagaagctgaaaatactgtttgttcccgcaatcactgatttgaaaagttcccaacacaggcagctgctgtgtatatgggattagagccactacatagaatagtctcttacagattttcataaatactagtcacaataagggtatttttcttgggggtggagtaagggggagactgatgctagtccttgttgtattttgttgggctgtccttgtgtattttcaccccagcctgtagtcctcctcacttcaaccccagggatttttggggagcaagggtagccaatggcagagggggttggggctgggactctggaggctcctccccttctttctcttccttccgcctcccccgtgcccccagctgctcttgtcactgtctctgatgggtatttgcctggctttgttgcttctctatctgtatttagctgcagtgatcctttagctggttggctcagaaaaaaaaaaatgtgctttaggtgccctgtaatcctgggcatcaagggaatccatccttcccctttttgatatgttctccccgtacttccagatttattgttatggctcccagtgggtattggcgattcttgtgatgcagggcctcagtcagtgtccagccatgcataagggagaggatagtgtgtacctgccctgccctctgctatgaaggtctctgccttgtggatcatgggactccccttggaggatctgtgcaaaggggggctgggcacaaaggagaatgtcctatttgggagggcaggaagcaaaggaactggacagggattggtgggcttggggaacggaagtttatcttggatacccttgaagaggctgggtctcttcacatgaagatcgaaaagggaccctgcttccaatttccctcttccattcctcgagctactccagggcttagaagaatgctcttggtctgtgggtccagtgttgtctgtcatccatttaagtgttcccactttcaagtgacaatcctctccttggccctgccatagggcagagcatgtctggcatagcagcctgacttttatgccctaatcttgagttgaggaaatatatgcacaggagtcaaagagatgtctttatatctgactgtatataaatgaagtttttttgttttttttgttttcctttttggtgcaataaagtttgttttggcagaaggag

SEQ ID NO: 26487 - protein, 354 aa, Homo sapiens; identical to SEQ ID NO: 26485

SEQ ID NO: 26488 - DNA, 4396 bp, Homo sapiens
actctggcccggttctcggtggtgcgggagcgggcgggagcagcggccgctctggtcggcggacgtgctgccgagtagtcccggaagcgaagcagcgatggcggagagtccgactgaggaggcggcaacggcgggcgccggggcggcgggccccggggcgagcagcgttgctggtgttgttggcgttagcggcagcggcggcgggttcgggccgcctttcctgccggatgtgtgggcggcggcggcggcagcgggcggggccgggggcccggggagcggcctggctccgctgcccgggctcccgccctcagccgctgcccacggggccgcgctgcttagccactgggaccccacgctcagctccgactgggacggcgagcgcaccgcgccgcagtgtctactccggatcaagcgggatatcatgtccatttataaggagcctcctccaggaatgttcgttgtacctgatactgttgacatgactaagattcatgcattgatcacaggcccatttgacactccttatgaagggggtttcttcctgttcgtgtttcggtgtccgcccgactatcccatccacccacctcgggtcaaactgatgacaacgggcaataacacagtgaggtttaaccccaacttctaccgcaatgggaaagtctgcttgagtattctaggtacatggactggacctgcctggagcccagcccagagcatctcctcagtgctcatctctatccagtccctgatgactgagaacccctatcacaatgagcccggctttgaacaggagagacatccaggagacagcaaaaactataatgaatgtatccggcacgagaccatcagagttgcagtctgtgacatgatggaaggaaagtgtccctgtcctgaacccctacgaggggtgatggagaagtcctttctggagtattacgacttctacgaggtggcctgcaaagatcgcctgcaccttcaaggccaaactatgcaggacccttttggagagaagcggggccactttgactaccagtccctcttgatgcgcctgggactgatacgtcagaaagtgctggagaggctccataatgagaatgcagaaatggactctgatagcagttcatctgggacagagacagaccttcatgggagcctgagggtttagaccctgctcccatctccccttcccccactcaagagtcccagcagaatcccttccccccaccccagggatggagaggcactgtgtatctccctccagactcgaagtcatcctgcaagatggcaagaaccaagcaagctccgatcccagggtgtgggagtgggggcctgttcccggtctgacctccttggcactggagcatctggggcttcgttcatccattcatcccgtatcaggggccaaggtacctttacaggagcacctagagcgagggcctttggcaaaaacaaaacaaccaacacacctctccacagggccagctccttagggataagtggaagatggaaattgcaattccaagagggagtgtgcccaaatgatttatggggatacctggaagggagcttggggtgggggctgtctgtgacacttaagcagtctgggtggttgtctatttgtctgtcttcagtcttgaagcagggcttcccaatgcccttttcctccctgccttccttcccccattatttcccacaggccagcataattttgtttttcctaatttatagtcactgttctagacagaccaaagagaaggaacagtggtggagtctaggctgctgatcagtaagctttacctagcacctgagcacctttctcccctcccctctttcctcacccttttctagatgtaagacagaaagtaaatgtgactgggacttaaccaaggtcttggtaaagcctgcatggcaccgtaagaagctgaaaatactgtttgttcccgcaatcactgatttgaaaagttcccaacacaggcagctgctgtgtatatgggattagagccactacatagaatagtctcttacagattttcataaatactagtcacaataagggtatttttcttgggggtggagtaagggggagactgatgctagtccttgttgtattttgttgggctgtccttgtgtattttcaccccagcctgtagtcctcctcacttcaaccccagggatttttggggagcaagggtagccaatggcagagggggttggggctgggactctggaggctcctccccttctttctcttccttccgcctcccccgtgcccccagctgctcttgtcactgtctctgatgggtatttgcctggctttgttgcttctctatctgtatttagctgcagtgatcctttagctggttggctcagaaaaaaaaaaatgtgctttaggtgccctgtaatcctgggcatcaagggaatccatccttcccctttttgatatgttctccccgtacttccagatttattgttatggctcccagtgggtattggcgattcttgtgatgcagggcctcagtcagtgtccagccatgcataagggagaggatagtgtgtacctgccctgccctctgctatgaaggtctctgccttgtggatcatgggactccccttggaggatctgtgcaaaggggggctgggcacaaaggagaatgtcctatttgggagggcaggaagcaaaggaactggacagggattggtgggcttggggaacggaagtttatcttggatacccttgaagaggctgggtctcttcacatgaagatcgaaaagggaccctgcttccaatttccctcttccattcctcgagctactccagggcttagaagaatgctcttggtctgtgggtccagtgttgtctgtcatccatttaagtgttcccactttcaagtgacaatcctctccttggccctgccatagggcagagcatgtctggcatagcagcctgacttttatgccctaatcttgagttgaggaaatatatgcacaggagtcaaagagatgtctttatatctgactgtatataaatgaagtttttttgttttttttgttttcctttttggtgcaataaagtttgttttggcagaaggaggaagtgcctgtgggtgtgggagggcttgtgtaaaggacgaatgggatcatcttgtcaaccacacctcacctaggcctggaactgttagggagaaggaaagtgccatgaattgtctggaaaccgaagacttgcataacatggtggaagggcagggctgggtggggagagcaggacaagttttctcattggaaatggggtccatgctctggcagtcagtgacatcttagtttgagtggtttccaaagacagacctattccagagcttggagtgagcatgtcctacaaggataggcagaggaagagatgggcccaggctatatcctgctaaaggaagggtctcagtatggaaaaaccattgagttttcagatttccagtactaaactagcacttttaggatcttagcctttagaccataaggactttgggagccttaaacaactctggcctcttccctcatcaccacttctacttgctataggagattcttgctttctgatgcagaggcttttactcttggctgaccacgtgtgtagaaaaatgtctacacacagtatgtgctgccattctgtactatgcagtgatacatgaaggcatgggctcgggttaataggcctaggcaccagctttagctcggctgaagctggcggcccctggcaaattactttgattgaatcacctgtgatgttgaaggctgcctacttggtgaaatttaagtgagctgtatgtaaaatggcacagggtaggtgttcagtaaatgactccctttcccactactgaggctagagggacctggcaatcactacaggagggtgagaaagctagtagggaatttaagaaaatagaacattccctaactattgtttgattcccctcagattccattgttttctttcctccaatttagccacgattggacattgacttctatttccttcatactcacagctaactctgtcataacctagagcctctacagaggaagccagaagagactgaaagtgaatattatttactggtccattaggaccagctagtttgagataaggaacattttatttaaaaggtttgaattagcataggctgtaatctatgtctcacagctacaaagactagacaggccaggaaacaacccacattctaggcccagctcttccatgaacttgcagatgacctacaaaaatcattttatatgtgcttgccgttctctgtgttaatcagattatgcttactgaacgagcgaggttttcctccaataaaaatgcaacgtgaaggcacttttcaaaaataaaagaatgagggaagaaaga

SEQ ID NO: 26489 - protein, 354 aa, Homo sapiens; identical to SEQ ID NO: 26485

SEQ ID NO: 26490 - DNA, 4602 bp, Homo sapiens
cctcctccaggaatgttcgttgtacctgatactgttgacatgactaaggtatgtaacttgatgggggtttggggggttttgggaaattgggggccataaggttgcaaaagcctaaaagagattattcagctcacctctccgattacacagatgaagaaatcaagaccccaggagagtaagtggcttgtccaaggtcacatagtgaggtggagcagcactttgaagaggtgtctgttattagtgtaccccataggtactgattggcttggaaaatcccagttcatgtctgttgtcgcagcttgactatttatagggcattctttcactctcaaaaatgctcctgtttggataataaattatatggtcaccctatccattgtactacccagctcttcccccatcccgttactcttgacattaactatgctatggtactataaatcagatgtagggaaggttgggaatagggcaagcttgactgaagtgtttgtggttaaaggactttgctcaggatcctgtccttactggttgcgtttaagtatcccttccaccccaaagactatacctctcttgtcctcctctcagagagaaagcttaatacataatgtcacatttctctggcatagatacctaggtttctctgtcactgaatgctctacccacagaagtgcagttgcacttaaactgatgttagaaagaaatcatatttcctaaacctaatgctgtttaagtgaaacacatagttttcttacagtaaatttcttacagtaaaaattcagattttgtattgttggtgtatctttttttgttgttttgaatagatttcccttcatattttttttttatgtagttagaaatgtttttcctaggacatctcgtcctcagtcaagtaccagtgttaatagcctagtacctggggtcccagagttgatgccatgttgagaccagttgagtttactattccaaatgactgagagccagaatatgacgtagggtcttgccaggagggcaaggtgggaactatagacttaggcattggattgccacgtccctttccttttgctgttcaaatgcttagcagacctaaatgcctaggagcctttgtggaagaagaaatataactgagtcagttcaggttttcctcccttcagggggggaaatcctgttgaagaattatggcttgagggggaagagaatttagtgtcgttttcaggacggctgattttttttttttttttttttttaaacagtattggggaaagttctgggactggtctaatggctctgagtggaccctgagtcttccccattttcagtcatgatgtgctgcctgagccacatcctccacaataggtttgatcctctgcagaggaagcaagcagataccctaggcatccatcacaccccctaaccctgctgtgttactggcactgggctgtggcctccaatccctttcttcgtctcctttcatcatactttcccttcgtgccacataaatgtagggtggggttgcatcatatgcatgtttggcctgggcaaatccaaacatatattcagtcaaaatctgtgtcgatttctcaaaattaaaaacgctagggttatattttatagataagcatattatatttttccacagtggtgttttatccattatatgtaacactgatcagggaggtctgcacaaaaaaaaaaaatgctttaagagagttttaggggatactcaagagtgattttgactagattcagttttcgccttgggctctaactttagaagtaacccctgagtaagatgtcattccactgtaatgagatttcttaaaattccaaacctacgtattagtatgagtgaatacaggatgttccttctgcatggtgaggatatagaacatgtgtaccagattatggactctgcttctggtgtgggtagtaggtggagggtagccaggagggcttggggtgggtcatcacctcacaattttgagatggggttttattttgcagattcatgcattgatcacaggcccatttgacactccttatgaagggggtttcttcctgttcgtgtttcggtgtccgcccgactatcccatccacccacctcgggtcaaactgatgacaacgggcaataacacagtgaggtttaaccccaacttctaccgcaatgggaaagtctgcttgagtattctaggtacatggactggacctgcctggagcccagcccagagcatctcctcagtgctcatctctatccagtccctgatgactgagaacccctatcacaatgagcccggctttgaacaggagagacatccaggagacagcaaaaactataatgaatgtatccggcacgagaccatcagagttgcagtctgtgacatgatggaaggaaagtgtccctgtcctgaacccctacgaggggtgatggagaagtcctttctggagtattacgacttctacgaggtggcctgcaaagatcgcctgcaccttcaaggccaaactatgcaggacccttttggagagaagcggggccactttgactaccagtccctcttgatgcgcctgggactgatacgtcagaaagtgctggagaggctccataatgagaatgcagaaatggactctgatagcagttcatctgggacagagacagaccttcatgggagcctgagggtttagaccctgctcccatctccccttcccccactcaagagtcccagcagaatcccttccccccaccccagggatggagaggcactgtgtatctccctccagactcgaagtcatcctgcaagatggcaagaaccaagcaagctccgatcccagggtgtgggagtgggggcctgttcccggtctgacctccttggcactggagcatctggggcttcgttcatccattcatcccgtatcaggggccaaggtacctttacaggagcacctagagcgagggcctttggcaaaaacaaaacaaccaacacacctctccacagggccagctccttagggataagtggaagatggaaattgcaattccaagagggagtgtgcccaaatgatttatggggatacctggaagggagcttggggtgggggctgtctgtgacacttaagcagtctgggtggttgtctatttgtctgtcttcagtcttgaagcagggcttcccaatgcccttttcctccctgccttccttcccccattatttcccacaggccagcataattttgtttttcctaatttatagtcactgttctagacagaccaaagagaaggaacagtggtggagtctaggctgctgatcagtaagctttacctagcacctgagcacctttctcccctcccctctttcctcacccttttctagatgtaagacagaaagtaaatgtgactgggacttaaccaaggtcttggtaaagcctgcatggcaccgtaagaagctgaaaatactgtttgttcccgcaatcactgatttgaaaagttcccaacacaggcagctgctgtgtatatgggattagagccactacatagaatagtctcttacagattttcataaatactagtcacaataagggtatttttcttgggggtggagtaagggggagactgatgctagtccttgttgtattttgttgggctgtccttgtgtattttcaccccagcctgtagtcctcctcacttcaaccccagggatttttggggagcaagggtagccaatggcagagggggttggggctgggactctggaggctcctccccttctttctcttccttccgcctcccccgtgcccccagctgctcttgtcactgtctctgatgggtatttgcctggctttgttgcttctctatctgtatttagctgcagtgatcctttagctggttggctcagaaaaaaaaaaatgtgctttaggtgccctgtaatcctgggcatcaagggaatccatccttcccctttttgatatgttctccccgtacttccagatttattgttatggctcccagtgggtattggcgattcttgtgatgcagggcctcagtcagtgtccagccatgcataagggagaggatagtgtgtacctgccctgccctctgctatgaaggtctctgccttgtggatcatgggactccccttggaggatctgtgcaaaggggggctgggcacaaaggagaatgtcctatttgggagggcaggaagcaaaggaactggacagggattggtgggcttggggaacggaagtttatcttggatacccttgaagaggctgggtctcttcacatgaagatcgaaaagggaccctgcttccaatttccctcttccattcctcgagctactccagggcttagaagaatgctcttggtctgtgggtccagtgttgtctgtcatccatttaagtgttcccactttcaagtgacaatcctctccttggccctgccatagggcagagcatgtctggcatagcagcctgacttttatgccctaatcttgagttgaggaaatatatgcacaggagtcaaagagatgtctttatatctgactgtatataaatgaagtttttttgttttttttgttttcctttttggtgcaataaagtttgttttggcagaaggag

SEQ ID NO: 26491 - protein, 187 aa, Homo sapiens
MTTGNNTVRFNPNFYRNGKVCLSILGTWTGPAWSPAQSISSVLISIQSLMTENPYHNEPGFEQERHPGDSKNYNECIRHETIRVAVCDMMEGKCPCPEPLRGVMEKSFLEYYDFYEVACKDRLHLQGQTMQDPFGEKRGHFDYQSLLMRLGLIRQKVLERLHNENAEMDSDSSSSGTETDLHGSLRV

SEQ ID NO: 26492 - DNA, 5910 bp, Homo sapiens
cctcctccaggaatgttcgttgtacctgatactgttgacatgactaaggtatgtaacttgatgggggtttggggggttttgggaaattgggggccataaggttgcaaaagcctaaaagagattattcagctcacctctccgattacacagatgaagaaatcaagaccccaggagagtaagtggcttgtccaaggtcacatagtgaggtggagcagcactttgaagaggtgtctgttattagtgtaccccataggtactgattggcttggaaaatcccagttcatgtctgttgtcgcagcttgactatttatagggcattctttcactctcaaaaatgctcctgtttggataataaattatatggtcaccctatccattgtactacccagctcttcccccatcccgttactcttgacattaactatgctatggtactataaatcagatgtagggaaggttgggaatagggcaagcttgactgaagtgtttgtggttaaaggactttgctcaggatcctgtccttactggttgcgtttaagtatcccttccaccccaaagactatacctctcttgtcctcctctcagagagaaagcttaatacataatgtcacatttctctggcatagatacctaggtttctctgtcactgaatgctctacccacagaagtgcagttgcacttaaactgatgttagaaagaaatcatatttcctaaacctaatgctgtttaagtgaaacacatagttttcttacagtaaatttcttacagtaaaaattcagattttgtattgttggtgtatctttttttgttgttttgaatagatttcccttcatattttttttttatgtagttagaaatgtttttcctaggacatctcgtcctcagtcaagtaccagtgttaatagcctagtacctggggtcccagagttgatgccatgttgagaccagttgagtttactattccaaatgactgagagccagaatatgacgtagggtcttgccaggagggcaaggtgggaactatagacttaggcattggattgccacgtccctttccttttgctgttcaaatgcttagcagacctaaatgcctaggagcctttgtggaagaagaaatataactgagtcagttcaggttttcctcccttcagggggggaaatcctgttgaagaattatggcttgagggggaagagaatttagtgtcgttttcaggacggctgattttttttttttttttttttttaaacagtattggggaaagttctgggactggtctaatggctctgagtggaccctgagtcttccccattttcagtcatgatgtgctgcctgagccacatcctccacaataggtttgatcctctgcagaggaagcaagcagataccctaggcatccatcacaccccctaaccctgctgtgttactggcactgggctgtggcctccaatccctttcttcgtctcctttcatcatactttcccttcgtgccacataaatgtagggtggggttgcatcatatgcatgtttggcctgggcaaatccaaacatatattcagtcaaaatctgtgtcgatttctcaaaattaaaaacgctagggttatattttatagataagcatattatatttttccacagtggtgttttatccattatatgtaacactgatcagggaggtctgcacaaaaaaaaaaaatgctttaagagagttttaggggatactcaagagtgattttgactagattcagttttcgccttgggctctaactttagaagtaacccctgagtaagatgtcattccactgtaatgagatttcttaaaattccaaacctacgtattagtatgagtgaatacaggatgttccttctgcatggtgaggatatagaacatgtgtaccagattatggactctgcttctggtgtgggtagtaggtggagggtagccaggagggcttggggtgggtcatcacctcacaattttgagatggggttttattttgcagattcatgcattgatcacaggcccatttgacactccttatgaagggggtttcttcctgttcgtgtttcggtgtccgcccgactatcccatccacccacctcgggtcaaactgatgacaacgggcaataacacagtgaggtttaaccccaacttctaccgcaatgggaaagtctgcttgagtattctaggtacatggactggacctgcctggagcccagcccagagcatctcctcagtgctcatctctatccagtccctgatgactgagaacccctatcacaatgagcccggctttgaacaggagagacatccaggagacagcaaaaactataatgaatgtatccggcacgagaccatcagagttgcagtctgtgacatgatggaaggaaagtgtccctgtcctgaacccctacgaggggtgatggagaagtcctttctggagtattacgacttctacgaggtggcctgcaaagatcgcctgcaccttcaaggccaaactatgcaggacccttttggagagaagcggggccactttgactaccagtccctcttgatgcgcctgggactgatacgtcagaaagtgctggagaggctccataatgagaatgcagaaatggactctgatagcagttcatctgggacagagacagaccttcatgggagcctgagggtttagaccctgctcccatctccccttcccccactcaagagtcccagcagaatcccttccccccaccccagggatggagaggcactgtgtatctccctccagactcgaagtcatcctgcaagatggcaagaaccaagcaagctccgatcccagggtgtgggagtgggggcctgttcccggtctgacctccttggcactggagcatctggggcttcgttcatccattcatcccgtatcaggggccaaggtacctttacaggagcacctagagcgagggcctttggcaaaaacaaaacaaccaacacacctctccacagggccagctccttagggataagtggaagatggaaattgcaattccaagagggagtgtgcccaaatgatttatggggatacctggaagggagcttggggtgggggctgtctgtgacacttaagcagtctgggtggttgtctatttgtctgtcttcagtcttgaagcagggcttcccaatgcccttttcctccctgccttccttcccccattatttcccacaggccagcataattttgtttttcctaatttatagtcactgttctagacagaccaaagagaaggaacagtggtggagtctaggctgctgatcagtaagctttacctagcacctgagcacctttctcccctcccctctttcctcacccttttctagatgtaagacagaaagtaaatgtgactgggacttaaccaaggtcttggtaaagcctgcatggcaccgtaagaagctgaaaatactgtttgttcccgcaatcactgatttgaaaagttcccaacacaggcagctgctgtgtatatgggattagagccactacatagaatagtctcttacagattttcataaatactagtcacaataagggtatttttcttgggggtggagtaagggggagactgatgctagtccttgttgtattttgttgggctgtccttgtgtattttcaccccagcctgtagtcctcctcacttcaaccccagggatttttggggagcaagggtagccaatggcagagggggttggggctgggactctggaggctcctccccttctttctcttccttccgcctcccccgtgcccccagctgctcttgtcactgtctctgatgggtatttgcctggctttgttgcttctctatctgtatttagctgcagtgatcctttagctggttggctcagaaaaaaaaaaatgtgctttaggtgccctgtaatcctgggcatcaagggaatccatccttcccctttttgatatgttctccccgtacttccagatttattgttatggctcccagtgggtattggcgattcttgtgatgcagggcctcagtcagtgtccagccatgcataagggagaggatagtgtgtacctgccctgccctctgctatgaaggtctctgccttgtggatcatgggactccccttggaggatctgtgcaaaggggggctgggcacaaaggagaatgtcctatttgggagggcaggaagcaaaggaactggacagggattggtgggcttggggaacggaagtttatcttggatacccttgaagaggctgggtctcttcacatgaagatcgaaaagggaccctgcttccaatttccctcttccattcctcgagctactccagggcttagaagaatgctcttggtctgtgggtccagtgttgtctgtcatccatttaagtgttcccactttcaagtgacaatcctctccttggccctgccatagggcagagcatgtctggcatagcagcctgacttttatgccctaatcttgagttgaggaaatatatgcacaggagtcaaagagatgtctttatatctgactgtatataaatgaagtttttttgttttttttgttttcctttttggtgcaataaagtttgttttggcagaaggaggaagtgcctgtgggtgtgggagggcttgtgtaaaggacgaatgggatcatcttgtcaaccacacctcacctaggcctggaactgttagggagaaggaaagtgccatgaattgtctggaaaccgaagacttgcataacatggtggaagggcagggctgggtggggagagcaggacaagttttctcattggaaatggggtccatgctctggcagtcagtgacatcttagtttgagtggtttccaaagacagacctattccagagcttggagtgagcatgtcctacaaggataggcagaggaagagatgggcccaggctatatcctgctaaaggaagggtctcagtatggaaaaaccattgagttttcagatttccagtactaaactagcacttttaggatcttagcctttagaccataaggactttgggagccttaaacaactctggcctcttccctcatcaccacttctacttgctataggagattcttgctttctgatgcagaggcttttactcttggctgaccacgtgtgtagaaaaatgtctacacacagtatgtgctgccattctgtactatgcagtgatacatgaaggcatgggctcgggttaataggcctaggcaccagctttagctcggctgaagctggcggcccctggcaaattactttgattgaatcacctgtgatgttgaaggctgcctacttggtgaaatttaagtgagctgtatgtaaaatggcacagggtaggtgttcagtaaatgactccctttcccactactgaggctagagggacctggcaatcactacaggagggtgagaaagctagtagggaatttaagaaaatagaacattccctaactattgtttgattcccctcagattccattgttttctttcctccaatttagccacgattggacattgacttctatttccttcatactcacagctaactctgtcataacctagagcctctacagaggaagccagaagagactgaaagtgaatattatttactggtccattaggaccagctagtttgagataaggaacattttatttaaaaggtttgaattagcataggctgtaatctatgtctcacagctacaaagactagacaggccaggaaacaacccacattctaggcccagctcttccatgaacttgcagatgacctacaaaaatcattttatatgtgcttgccgttctctgtgttaatcagattatgcttactgaacgagcgaggttttcctccaataaaaatgcaacgtgaaggcacttttcaaaaataaaagaatgagggaagaaaga

SEQ ID NO: 26493 - protein, 187 aa, Homo sapiens; identical to SEQ ID NO: 26491

SEQ ID NO: 26494 - DNA, 467 bp, Homo sapiens
cagtaagtcagcccaacattgttttctaggtaaagaggaaaaaaaaaacatggctgataaagctaatacagtcaactaggaacacctaagaattttcttttctttcttttttgagacaaagtaaaaaacaacaaccaaaaaaaccagatttttggccccaaccccagagtttcttttgtaggtctaagatagggccccagaaactgctcggctacaagttcccagatgctcagggccacactcttaagagaaccacttctcaaaggttaccactgtaataaattaacttctcccctctgcatctagaatgatactagtcacataccatcctgaggagatttgagaagagtcactcaatcattttctgtgttctgtagttcagatgagggactccggttgataaaggctgacctagagtaattatctgctaacaaccgacttggctacttaaaagtctcctcttaccc

SEQ ID NO: 26495 - protein, 62 aa, Homo sapiens
EFSFLSFLRQSKKQQPKKPDFWPQPQSFFCRSKIGPQKLLGYKFPDAQGHTLKRTTSQRLPL

SEQ ID NO: 26496 - DNA, 2019 bp, Homo sapiens
tagacaactttggagctaattgcttacctaatttcttttgttttgattgtcgtaactgtttctagtacaaagaaaatcccttcaaagttacatagcttgctattacctgttcttttgccccccccccttgatttgaggattaggcaattgactgatttctggtgaaatcagaacatgagcatgagacagaggctgggaaattccagagtattaatagtgaaagagaaacttatggtgagtcacttatggtggtgttgccgggccccagggtacttgttccctattctttctctgcctcaccctccattccttctgatgtgtttacagtacatggactggacctgcctggagcccagcccagagcatctcctcagtgctcatctctatccagtccctgatgactgagaacccctatcacaatgagcccggctttgaacaggagagacatccaggagacagcaaaaactataatgaatgtatccggcacgagaccatcagagttgcagtctgtgacatgatggaaggaaagtgtccctgtcctgaacccctacgaggggtgatggagaagtcctttctggagtattacgacttctacgaggtggcctgcaaagatcgcctgcaccttcaaggccaaactatgcaggacccttttggagagaagcggggccactttgactaccagtccctcttgatgcgcctgggactgatacgtcagaaagtgctggagaggctccataatgagaatgcagaaatggactctgatagcagttcatctgggacagagacagaccttcatgggagcctgagggtttagaccctgctcccatctccccttcccccactcaagagtcccagcagaatcccttccccccaccccagggatggagaggcactgtgtatctccctccagactcgaagtcatcctgcaagatggcaagaaccaagcaagctccgatcccagggtgtgggagtgggggcctgttcccggtctgacctccttggcactggagcatctggggcttcgttcatccattcatcccgtatcaggggccaaggtacctttacaggagcacctagagcgagggcctttggcaaaaacaaaacaaccaacacacctctccacagggccagctccttagggataagtggaagatggaaattgcaattccaagagggagtgtgcccaaatgatttatggggatacctggaagggagcttggggtgggggctgtctgtgacacttaagcagtctgggtggttgtctatttgtctgtcttcagtcttgaagcagggcttcccaatgcccttttcctccctgccttccttcccccattatttcccacaggccagcataattttgtttttcctaatttatagtcactgttctagacagaccaaagagaaggaacagtggtggagtctaggctgctgatcagtaagctttacctagcacctgagcacctttctcccctcccctctttcctcacccttttctagatgtaagacagaaagtaaatgtgactgggacttaaccaaggtcttggtaaagcctgcatggcaccgtaagaagctgaaaatactgtttgttcccgcaatcactgatttgaaaagttcccaacacaggcagctgctgtgtatatgggattagagccactacatagaatagtctcttacagattttcataaatactagtcacaataagggtatttttcttgggggtggagtaagggggagactgatgctagtccttgttgtattttgttgggctgtccttgtgtattttcaccccagcctgtagtcctcctcacttcaaccccagggatttttggggagcaagggtagccaatggcagagggggttggggctgggactctggaggctcctccccttctttctcttccttccgcctcccccgtgcccccagctgctcttgtcactgtctctgatgggtatttgcctggctttgttgcttctctatctgtatttagctgcagtgatcctttagctggttggctcag

SEQ ID NO: 26497 - protein, 138 aa, Homo sapiens
MTENPYHNEPGFEQERHPGDSKNYNECIRHETIRVAVCDMMEGKCPCPEPLRGVMEKSFLEYYDFYEVACKDRLHLQGQTMQDPFGEKRGHFDYQSLLMRLGLIRQKVLERLHNENAEMDSDSSSSGTETDLHGSLRV

SEQ ID NO: 26498 - DNA, 2740 bp, Homo sapiens
tagacaactttggagctaattgcttacctaatttcttttgttttgattgtcgtaactgtttctagtacaaagaaaatcccttcaaagttacatagcttgctattacctgttcttttgccccccccccttgatttgaggattaggcaattgactgatttctggtgaaatcagaacatgagcatgagacagaggctgggaaattccagagtattaatagtgaaagagaaacttatggtgagtcacttatggtggtgttgccgggccccagggtacttgttccctattctttctctgcctcaccctccattccttctgatgtgtttacagtacatggactggacctgcctggagcccagcccagagcatctcctcagtgctcatctctatccagtccctgatgactgagaacccctatcacaatgagcccggctttgaacaggagagacatccaggagacagcaaaaactataatgaatgtatccggcacgagaccatcagagttgcagtctgtgacatgatggaaggaaagtgtccctgtcctgaacccctacgaggggtgatggagaagtcctttctggagtattacgacttctacgaggtggcctgcaaagatcgcctgcaccttcaaggccaaactatgcaggacccttttggagagaagcggggccactttgactaccagtccctcttgatgcgcctgggactgatacgtcagaaagtgctggagaggctccataatgagaatgcagaaatggactctgatagcagttcatctgggacagagacagaccttcatgggagcctgagggtttagaccctgctcccatctccccttcccccactcaagagtcccagcagaatcccttccccccaccccagggatggagaggcactgtgtatctccctccagactcgaagtcatcctgcaagatggcaagaaccaagcaagctccgatcccagggtgtgggagtgggggcctgttcccggtctgacctccttggcactggagcatctggggcttcgttcatccattcatcccgtatcaggggccaaggtacctttacaggagcacctagagcgagggcctttggcaaaaacaaaacaaccaacacacctctccacagggccagctccttagggataagtggaagatggaaattgcaattccaagagggagtgtgcccaaatgatttatggggatacctggaagggagcttggggtgggggctgtctgtgacacttaagcagtctgggtggttgtctatttgtctgtcttcagtcttgaagcagggcttcccaatgcccttttcctccctgccttccttcccccattatttcccacaggccagcataattttgtttttcctaatttatagtcactgttctagacagaccaaagagaaggaacagtggtggagtctaggctgctgatcagtaagctttacctagcacctgagcacctttctcccctcccctctttcctcacccttttctagatgtaagacagaaagtaaatgtgactgggacttaaccaaggtcttggtaaagcctgcatggcaccgtaagaagctgaaaatactgtttgttcccgcaatcactgatttgaaaagttcccaacacaggcagctgctgtgtatatgggattagagccactacatagaatagtctcttacagattttcataaatactagtcacaataagggtatttttcttgggggtggagtaagggggagactgatgctagtccttgttgtattttgttgggctgtccttgtgtattttcaccccagcctgtagtcctcctcacttcaaccccagggatttttggggagcaagggtagccaatggcagagggggttggggctgggactctggaggctcctccccttctttctcttccttccgcctcccccgtgcccccagctgctcttgtcactgtctctgatgggtatttgcctggctttgttgcttctctatctgtatttagctgcagtgatcctttagctggttggctcagaaaaaaaaaaatgtgctttaggtgccctgtaatcctgggcatcaagggaatccatccttcccctttttgatatgttctccccgtacttccagatttattgttatggctcccagtgggtattggcgattcttgtgatgcagggcctcagtcagtgtccagccatgcataagggagaggatagtgtgtacctgccctgccctctgctatgaaggtctctgccttgtggatcatgggactccccttggaggatctgtgcaaaggggggctgggcacaaaggagaatgtcctatttgggagggcaggaagcaaaggaactggacagggattggtgggcttggggaacggaagtttatcttggatacccttgaagaggctgggtctcttcacatgaagatcgaaaagggaccctgcttccaatttccctcttccattcctcgagctactccagggcttagaagaatgctcttggtctgtgggtccagtgttgtctgtcatccatttaagtgttcccactttcaagtgacaatcctctccttggccctgccatagggcagagcatgtctggcatagcagcctgacttttatgccctaatcttgagttgaggaaatatatgcacaggagtcaaagagatgtctttatatctgactgtatataaatgaagtttttttgttttttttgttttcctttttggtgcaataaagtttgttttggcagaaggag

SEQ ID NO: 26499 - protein, 138 aa, Homo sapiens; identical to SEQ ID NO: 26497

SEQ ID NO: 26500 - DNA, 4048 bp, Homo sapiens
tagacaactttggagctaattgcttacctaatttcttttgttttgattgtcgtaactgtttctagtacaaagaaaatcccttcaaagttacatagcttgctattacctgttcttttgccccccccccttgatttgaggattaggcaattgactgatttctggtgaaatcagaacatgagcatgagacagaggctgggaaattccagagtattaatagtgaaagagaaacttatggtgagtcacttatggtggtgttgccgggccccagggtacttgttccctattctttctctgcctcaccctccattccttctgatgtgtttacagtacatggactggacctgcctggagcccagcccagagcatctcctcagtgctcatctctatccagtccctgatgactgagaacccctatcacaatgagcccggctttgaacaggagagacatccaggagacagcaaaaactataatgaatgtatccggcacgagaccatcagagttgcagtctgtgacatgatggaaggaaagtgtccctgtcctgaacccctacgaggggtgatggagaagtcctttctggagtattacgacttctacgaggtggcctgcaaagatcgcctgcaccttcaaggccaaactatgcaggacccttttggagagaagcggggccactttgactaccagtccctcttgatgcgcctgggactgatacgtcagaaagtgctggagaggctccataatgagaatgcagaaatggactctgatagcagttcatctgggacagagacagaccttcatgggagcctgagggtttagaccctgctcccatctccccttcccccactcaagagtcccagcagaatcccttccccccaccccagggatggagaggcactgtgtatctccctccagactcgaagtcatcctgcaagatggcaagaaccaagcaagctccgatcccagggtgtgggagtgggggcctgttcccggtctgacctccttggcactggagcatctggggcttcgttcatccattcatcccgtatcaggggccaaggtacctttacaggagcacctagagcgagggcctttggcaaaaacaaaacaaccaacacacctctccacagggccagctccttagggataagtggaagatggaaattgcaattccaagagggagtgtgcccaaatgatttatggggatacctggaagggagcttggggtgggggctgtctgtgacacttaagcagtctgggtggttgtctatttgtctgtcttcagtcttgaagcagggcttcccaatgcccttttcctccctgccttccttcccccattatttcccacaggccagcataattttgtttttcctaatttatagtcactgttctagacagaccaaagagaaggaacagtggtggagtctaggctgctgatcagtaagctttacctagcacctgagcacctttctcccctcccctctttcctcacccttttctagatgtaagacagaaagtaaatgtgactgggacttaaccaaggtcttggtaaagcctgcatggcaccgtaagaagctgaaaatactgtttgttcccgcaatcactgatttgaaaagttcccaacacaggcagctgctgtgtatatgggattagagccactacatagaatagtctcttacagattttcataaatactagtcacaataagggtatttttcttgggggtggagtaagggggagactgatgctagtccttgttgtattttgttgggctgtccttgtgtattttcaccccagcctgtagtcctcctcacttcaaccccagggatttttggggagcaagggtagccaatggcagagggggttggggctgggactctggaggctcctccccttctttctcttccttccgcctcccccgtgcccccagctgctcttgtcactgtctctgatgggtatttgcctggctttgttgcttctctatctgtatttagctgcagtgatcctttagctggttggctcagaaaaaaaaaaatgtgctttaggtgccctgtaatcctgggcatcaagggaatccatccttcccctttttgatatgttctccccgtacttccagatttattgttatggctcccagtgggtattggcgattcttgtgatgcagggcctcagtcagtgtccagccatgcataagggagaggatagtgtgtacctgccctgccctctgctatgaaggtctctgccttgtggatcatgggactccccttggaggatctgtgcaaaggggggctgggcacaaaggagaatgtcctatttgggagggcaggaagcaaaggaactggacagggattggtgggcttggggaacggaagtttatcttggatacccttgaagaggctgggtctcttcacatgaagatcgaaaagggaccctgcttccaatttccctcttccattcctcgagctactccagggcttagaagaatgctcttggtctgtgggtccagtgttgtctgtcatccatttaagtgttcccactttcaagtgacaatcctctccttggccctgccatagggcagagcatgtctggcatagcagcctgacttttatgccctaatcttgagttgaggaaatatatgcacaggagtcaaagagatgtctttatatctgactgtatataaatgaagtttttttgttttttttgttttcctttttggtgcaataaagtttgttttggcagaaggaggaagtgcctgtgggtgtgggagggcttgtgtaaaggacgaatgggatcatcttgtcaaccacacctcacctaggcctggaactgttagggagaaggaaagtgccatgaattgtctggaaaccgaagacttgcataacatggtggaagggcagggctgggtggggagagcaggacaagttttctcattggaaatggggtccatgctctggcagtcagtgacatcttagtttgagtggtttccaaagacagacctattccagagcttggagtgagcatgtcctacaaggataggcagaggaagagatgggcccaggctatatcctgctaaaggaagggtctcagtatggaaaaaccattgagttttcagatttccagtactaaactagcacttttaggatcttagcctttagaccataaggactttgggagccttaaacaactctggcctcttccctcatcaccacttctacttgctataggagattcttgctttctgatgcagaggcttttactcttggctgaccacgtgtgtagaaaaatgtctacacacagtatgtgctgccattctgtactatgcagtgatacatgaaggcatgggctcgggttaataggcctaggcaccagctttagctcggctgaagctggcggcccctggcaaattactttgattgaatcacctgtgatgttgaaggctgcctacttggtgaaatttaagtgagctgtatgtaaaatggcacagggtaggtgttcagtaaatgactccctttcccactactgaggctagagggacctggcaatcactacaggagggtgagaaagctagtagggaatttaagaaaatagaacattccctaactattgtttgattcccctcagattccattgttttctttcctccaatttagccacgattggacattgacttctatttccttcatactcacagctaactctgtcataacctagagcctctacagaggaagccagaagagactgaaagtgaatattatttactggtccattaggaccagctagtttgagataaggaacattttatttaaaaggtttgaattagcataggctgtaatctatgtctcacagctacaaagactagacaggccaggaaacaacccacattctaggcccagctcttccatgaacttgcagatgacctacaaaaatcattttatatgtgcttgccgttctctgtgttaatcagattatgcttactgaacgagcgaggttttcctccaataaaaatgcaacgtgaaggcacttttcaaaaataaaagaatgagggaagaaaga

SEQ ID NO: 26501 - protein, 138 aa, Homo sapiens; identical to SEQ ID NO: 26497

SEQ ID NO: 26502 - DNA, 1616 bp, Homo sapiens
ttctgccaaaacaaactttattgcaccaaaaaggaaaacaaaaaaaacaaaaaaacttcatttatatacagtcagatataaagacatctctttgactcctgtgcataagaatcgccaatacccactgggagccataacaataaatctggaagtacggggagaacatatcaaaaaggggaaggatggattcccttgatgcccaggattacagggcacctaaagcacatttttttttttctgagccaaccagctaaaggatcactgcagctaaatacagatagagaagcaacaaagccaggcaaatacccatcagagacagtgacaagagcagctgggggcacgggggaggcggaaggaagagaaagaaggggaggagcctccagagtcccagccccaaccccctctgccattggctacccttgctccccaaaaatccctggggttgaagtgaggaggactacaggctggggtgaaaatacacaaggacagcccaacaaaatacaacaaggactagcatcagtctcccccttactccacccccaagaaaaatacccttattgtgactagtatttatgaaaatctgtaagagactattctatgtagtggctctaatcccatatacacagcagctgcctgtgttgggaacttttcaaatcagtgattgcgggaacaaacagtattttcagcttcttacggtgccatgcaggctttaccaagaccttggttaagtcccagtcacatttactttctgtcttacatctagaaaagggtgaggaaagaggggaggggagaaaggtgctcaggtgctaggtaaagcttactgatcagcagcctagactccaccactgttccttctctttggtctgtctagaacagtgactataaattaggaaaaacaaaattatgctggcctgtgggaaataatgggggaaggaaggcagggaggaaaagggcattgggaagccctgcttcaagactgaagacagacaaatagacaaccacccagactgcttaagtgtcacagacagcccccaccccaagctcccttccaggtatccccataaatcatttgggcacactccctcttggaattgcaatttccatcttccacttatccctaaggagctggccctgtggagaggtgtgttggttgttttgtttttgccaaaggccctcgctctaggtgctcctgtaaaggtaccttggcccctgatacgggatgaatggatgaacgaagccccagatgctccagtgccaaggaggtcagaccgggaacaggcccccactcccacaccctgggatcggagcttgcttggttcttgccatcttgcaggatgacttcgagtctggagggagatacacagtgcctctccatccctggggtggggggaagggattctgctgggactcttgagtgggggaaggggagatgggagcagggtctaaaccctcaggctcccatgaaggtctgtctctgtcccagatgaactgctatcagagtccatttctgcattctcattatggagcctctccagcactttctgacgtatcagtcccaggcgcatcaagagggactggtagtcaaagtggccccgcttctctccaaaagggtcctg

SEQ ID NO: 26503 - protein, 123 aa, Homo sapiens [sequence omitted]

SEQ ID NO: 26504 - DNA, 1689 bp, Homo sapiens
caggacccttttggagagaagcggggccactttgactaccagtccctcttgatgcgcctgggactgatacgtcagaaagtgctggagaggctccataatgagaatgcagaaatggactctgatagcagttcatctgggacagagacagaccttcatgggagcctgagggtttagaccctgctcccatctccccttcccccactcaagagtcccagcagaatcccttccccccaccccagggatggagaggcactgtgtatctccctccagactcgaagtcatcctgcaagatggcaagaaccaagcaagctccgatcccagggtgtgggagtgggggcctgttcccggtctgacctccttggcactggagcatctggggcttcgttcatccattcatcccgtatcaggggccaaggtacctttacaggagcacctagagcgagggcctttggcaaaaacaaaacaaccaacacacctctccacagggccagctccttagggataagtggaagatggaaattgcaattccaagagggagtgtgcccaaatgatttatggggatacctggaagggagcttggggtgggggctgtctgtgacacttaagcagtctgggtggttgtctatttgtctgtcttcagtcttgaagcagggcttcccaatgcccttttcctccctgccttccttcccccattatttcccacaggccagcataattttgtttttcctaatttatagtcactgttctagacagaccaaagagaaggaacagtggtggagtctaggctgctgatcagtaagctttacctagcacctgagcacctttctccctcctccccttctttctcttccttccgcctcccccgtgcccccagctgctcttgtcactgtctctgatgggtatttgcctggctttgttgcttctctatctgtatttagctgcagtgatcctttagctggttggctcagaaaaaaaaaaatgtgctttaggtgccctgtaatcctgggcatcaagggaatccatccttcccctttttgatatgttctccccgtacttccagatttattgttatggctcccagtgggtattggcgattcttgtgatgcagggcctcagtcagtgtccagccatgcataagggagaggatagtgtgtacctgccctgccctctgctatgaaggtctctgccttgtggatcatgggactccccttggaggatctgtgcaaaggggggctgggcacaaaggagaatgtcctatttgggagggcaggaagcaaaggaactggacagggattggtgggcttggggaacggaagtttatcttggatacccttgaagaggctgggtctcttcacatgaagatcgaaaagggaccctgcttccaatttccctcttccattcctcgagctactccagggcttagaagaatgctcttggtctgtgggtccagtgttgtctgtcatccatttaagtgttcccactttcaagtgacaatcctctccttggccctgccatagggcagagcatgtctggcatagcagcctgacttttatgccctaatcttgagttgaggaaatatatgcacaggagtcaaagagatgtctttatatctgactgtatataaatgaagtttttttgttttttttgttttcctttttggtgcaataaagtttgttttggcagaaggag

SEQ ID NO: 26505 - protein, 85 aa, Homo sapiens [sequence omitted]

SEQ ID NO: 26506 - DNA, 2997 bp, Homo sapiens
caggacccttttggagagaagcggggccactttgactaccagtccctcttgatgcgcctgggactgatacgtcagaaagtgctggagaggctccataatgagaatgcagaaatggactctgatagcagttcatctgggacagagacagaccttcatgggagcctgagggtttagaccctgctcccatctccccttcccccactcaagagtcccagcagaatcccttccccccaccccagggatggagaggcactgtgtatctccctccagactcgaagtcatcctgcaagatggcaagaaccaagcaagctccgatcccagggtgtgggagtgggggcctgttcccggtctgacctccttggcactggagcatctggggcttcgttcatccattcatcccgtatcaggggccaaggtacctttacaggagcacctagagcgagggcctttggcaaaaacaaaacaaccaacacacctctccacagggccagctccttagggataagtggaagatggaaattgcaattccaagagggagtgtgcccaaatgatttatggggatacctggaagggagcttggggtgggggctgtctgtgacacttaagcagtctgggtggttgtctatttgtctgtcttcagtcttgaagcagggcttcccaatgcccttttcctccctgccttccttcccccattatttcccacaggccagcataattttgtttttcctaatttatagtcactgttctagacagaccaaagagaaggaacagtggtggagtctaggctgctgatcagtaagctttacctagcacctgagcacctttctccctcctccccttctttctcttccttccgcctcccccgtgcccccagctgctcttgtcactgtctctgatgggtatttgcctggctttgttgcttctctatctgtatttagctgcagtgatcctttagctggttggctcagaaaaaaaaaaatgtgctttaggtgccctgtaatcctgggcatcaagggaatccatccttcccctttttgatatgttctccccgtacttccagatttattgttatggctcccagtgggtattggcgattcttgtgatgcagggcctcagtcagtgtccagccatgcataagggagaggatagtgtgtacctgccctgccctctgctatgaaggtctctgccttgtggatcatgggactccccttggaggatctgtgcaaaggggggctgggcacaaaggagaatgtcctatttgggagggcaggaagcaaaggaactggacagggattggtgggcttggggaacggaagtttatcttggatacccttgaagaggctgggtctcttcacatgaagatcgaaaagggaccctgcttccaatttccctcttccattcctcgagctactccagggcttagaagaatgctcttggtctgtgggtccagtgttgtctgtcatccatttaagtgttcccactttcaagtgacaatcctctccttggccctgccatagggcagagcatgtctggcatagcagcctgacttttatgccctaatcttgagttgaggaaatatatgcacaggagtcaaagagatgtctttatatctgactgtatataaatgaagtttttttgttttttttgttttcctttttggtgcaataaagtttgttttggcagaaggaggaagtgcctgtgggtgtgggagggcttgtgtaaaggacgaatgggatcatcttgtcaaccacacctcacctaggcctggaactgttagggagaaggaaagtgccatgaattgtctggaaaccgaagacttgcataacatggtggaagggcagggctgggtggggagagcaggacaagttttctcattggaaatggggtccatgctctggcagtcagtgacatcttagtttgagtggtttccaaagacagacctattccagagcttggagtgagcatgtcctacaaggataggcagaggaagagatgggcccaggctatatcctgctaaaggaagggtctcagtatggaaaaaccattgagttttcagatttccagtactaaactagcacttttaggatcttagcctttagaccataaggactttgggagccttaaacaactctggcctcttccctcatcaccacttctacttgctataggagattcttgctttctgatgcagaggcttttactcttggctgaccacgtgtgtagaaaaatgtctacacacagtatgtgctgccattctgtactatgcagtgatacatgaaggcatgggctcgggttaataggcctaggcaccagctttagctcggctgaagctggcggcccctggcaaattactttgattgaatcacctgtgatgttgaaggctgcctacttggtgaaatttaagtgagctgtatgtaaaatggcacagggtaggtgttcagtaaatgactccctttcccactactgaggctagagggacctggcaatcactacaggagggtgagaaagctagtagggaatttaagaaaatagaacattccctaactattgtttgattcccctcagattccattgttttctttcctccaatttagccacgattggacattgacttctatttccttcatactcacagctaactctgtcataacctagagcctctacagaggaagccagaagagactgaaagtgaatattatttactggtccattaggaccagctagtttgagataaggaacattttatttaaaaggtttgaattagcataggctgtaatctatgtctcacagctacaaagactagacaggccaggaaacaacccacattctaggcccagctcttccatgaacttgcagatgacctacaaaaatcattttatatgtgcttgccgttctctgtgttaatcagattatgcttactgaacgagcgaggttttcctccaataaaaatgcaacgtgaaggcacttttcaaaaataaaagaatgagggaagaaaga

SEQ ID NO: 26507 - protein, 85 aa, Homo sapiens [sequence omitted]

SEQ ID NO: 26508 - DNA, 2624 bp, Homo sapiens
atgacttcgtagcatttttcaaattcaggcaaaggccaaggccaaacagctcgtttagttggttgtgtaaaggtttgaaggcacttagtagatttagtttgaaaacctcactgaagccaaaataggtgtgggggttgcttacctaccctttgtctatggaacctccctgttctcaaactgctcttcttcccttttccctccaggatatagcctgggcccatctcttcctctgcctatccttgtaggacatgctcactccaagctctggaataggtctgtctttggaaaccactcaaactaagatgtcactgactgccagagcatggaccccatttccaatgagaaaacttgtcctgctctccccacccagccctgcccttccaccatgttatgcaagtcttcggtttccagacaattcatggcactttccttctccctaacagttccaggcctaggtgaggtgtggttgacaagatgatcccattcgtcctttacacaagccctcccacacccacaggcacttcctccttctgccaaaacaaactttattgcaccaaaaaggaaaacaaaaaaaacaaaaaaacttcatttatatacagtcagatataaagacatctctttgactcctgtgcatatatttcctcaactcaagattagggcataaaagtcaggctgctatgccagacatgctctgccctatggcagggccaaggagaggattgtcacttgaaagtgggaacacttaaatggatgacagacaacactggacccacagaccaagagcattcttctaagccctggagtagctcgaggaatggaagagggaaattggaagcagggtcccttttcgatcttcatgtgaagagacccagcctcttcaagggtatccaagataaacttccgttccccaagcccaccaatccctgtccagttcctttgcttcctgccctcccaaataggacattctcctttgtgcccagcccccctttgcacagatcctccaaggggagtcccatgatccacaaggcagagaccttcatagcagagggcagggcaggtacacactatcctctcccttatgcatggctggacactgactgaggccctgcatcacaagaatcgccaatacccactgggagccataacaataaatctggaagtacggggagaacatatcaaaaaggggaaggatggattcccttgatgcccaggattacagggcacctaaagcacatttttttttttctgagccaaccagctaaaggatcactgcagctaaatacagatagagaagcaacaaagccaggcaaatacccatcagagacagtgacaagagcagctgggggcacgggggaggcggaaggaagagaaagaaggggaggagcctccagagtcccagccccaaccccctctgccattggctacccttgctccccaaaaatccctggggttgaagtgaggaggactacaggctggggtgaaaatacacaaggacagcccaacaaaatacaacaaggactagcatcagtctcccccttactccacccccaagaaaaatacccttattgtgactagtatttatgaaaatctgtaagagactattctatgtagtggctctaatcccatatacacagcagctgcctgtgttgggaacttttcaaatcagtgattgcgggaacaaacagtattttcagcttcttacggtgccatgcaggctttaccaagaccttggttaagtcccagtcacatttactttctgtcttacatctagaaaagggtgaggaaagaggggaggggagaaaggtgctcaggtgctaggtaaagcttactgatcagcagcctagactccaccactgttccttctctttggtctgtctagaacagtgactataaattaggaaaaacaaaattatgctggcctgtgggaaataatgggggaaggaaggcagggaggaaaagggcattgggaagccctgcttcaagactgaagacagacaaatagacaaccacccagactgcttaagtgtcacagacagcccccaccccaagctcccttccaggtatccccataaatcatttgggcacactccctcttggaattgcaatttccatcttccacttatccctaaggagctggccctgtggagaggtgtgttggttgttttgtttttgccaaaggccctcgctctaggtgctcctgtaaaggtaccttggcccctgatacgggatgaatggatgaacgaagccccagatgctccagtgccaaggaggtcagaccgggaacaggcccccactcccacaccctgggatcggagcttgcttggttcttgccatcttgcaggatgacttcgagtctggagggagatacacagtgcctctccatccctggggtggggggaagggattctgctgggactcttgagtgggggaaggggagatgggagcagggtctaaaccctcaggctcccatgaaggtctgtctctgtcccagatgaactgctatcagagtccatttctgcattctcattatggagcctctccagcactttctgacgtatcagtcccaggcgcatcaagagggactggtagtcaaagtggccccgcttctctccaaaagggtcctg

SEQ ID NO: 26509 - protein, 123 aa, Homo sapiens [sequence omitted]

SEQ ID NO: 26510 - DNA, 1020 bp, Homo sapiens
accagtccctcttgatgcgcctgggactgatacgtcagaaagtgctggagaggctccataatgagaatgcagaaatggactctgatagcagttcatctgggacagagacagaccttcatgggagcctgagggtttagaccctgctcccatctccccttcccccatccccttctttctcttccttccgcctcccccgtgcccccagctgctcttgtcactgtctctgatgggtatttgcctggctttgttgcttctctatctgtatttagctgcagtgatcctttagctggttggctcagaaaaaaaaaaatgtgctttaggtgccctgtaatcctgggcatcaagggaatccatccttcccctttttgatatgttctccccgtacttccagatttattgttatggctcccagtgggtattggcgattcttgtgatgcagggcctcagtcagtgtccagccatgcataagggagaggatagtgtgtacctgccctgccctctgctatgaaggtctctgccttgtggatcatgggactccccttggaggatctgtgcaaaggggggctgggcacaaaggagaatgtcctatttgggagggcaggaagcaaaggaactggacagggattggtgggcttggggaacggaagtttatcttggatacccttgaagaggctgggtctcttcacatgaagatcgaaaagggaccctgcttccaatttccctcttccattcctcgagctactccagggcttagaagaatgctcttggtctgtgggtccagtgttgtctgtcatccatttaagtgttcccactttcaagtgacaatcctctccttggccctgccatagggcagagcatgtctggcatagcagcctgacttttatgccctaatcttgagttgaggaaatatatgcacaggagtcaaagagatgtctttatatctgactgtatataaatgaagtttttttgttttttttgttttcctttttggtgcaataaagtttgttttggcagaaggag

SEQ ID NO: 26511 - protein, 61 aa, Homo sapiens [sequence omitted]

SEQ ID NO: 26512 - DNA, 2328 bp, Homo sapiens
accagtccctcttgatgcgcctgggactgatacgtcagaaagtgctggagaggctccataatgagaatgcagaaatggactctgatagcagttcatctgggacagagacagaccttcatgggagcctgagggtttagaccctgctcccatctccccttcccccatccccttctttctcttccttccgcctcccccgtgcccccagctgctcttgtcactgtctctgatgggtatttgcctggctttgttgcttctctatctgtatttagctgcagtgatcctttagctggttggctcagaaaaaaaaaaatgtgctttaggtgccctgtaatcctgggcatcaagggaatccatccttcccctttttgatatgttctccccgtacttccagatttattgttatggctcccagtgggtattggcgattcttgtgatgcagggcctcagtcagtgtccagccatgcataagggagaggatagtgtgtacctgccctgccctctgctatgaaggtctctgccttgtggatcatgggactccccttggaggatctgtgcaaaggggggctgggcacaaaggagaatgtcctatttgggagggcaggaagcaaaggaactggacagggattggtgggcttggggaacggaagtttatcttggatacccttgaagaggctgggtctcttcacatgaagatcgaaaagggaccctgcttccaatttccctcttccattcctcgagctactccagggcttagaagaatgctcttggtctgtgggtccagtgttgtctgtcatccatttaagtgttcccactttcaagtgacaatcctctccttggccctgccatagggcagagcatgtctggcatagcagcctgacttttatgccctaatcttgagttgaggaaatatatgcacaggagtcaaagagatgtctttatatctgactgtatataaatgaagtttttttgttttttttgttttcctttttggtgcaataaagtttgttttggcagaaggaggaagtgcctgtgggtgtgggagggcttgtgtaaaggacgaatgggatcatcttgtcaaccacacctcacctaggcctggaactgttagggagaaggaaagtgccatgaattgtctggaaaccgaagacttgcataacatggtggaagggcagggctgggtggggagagcaggacaagttttctcattggaaatggggtccatgctctggcagtcagtgacatcttagtttgagtggtttccaaagacagacctattccagagcttggagtgagcatgtcctacaaggataggcagaggaagagatgggcccaggctatatcctgctaaaggaagggtctcagtatggaaaaaccattgagttttcagatttccagtactaaactagcacttttaggatcttagcctttagaccataaggactttgggagccttaaacaactctggcctcttccctcatcaccacttctacttgctataggagattcttgctttctgatgcagaggcttttactcttggctgaccacgtgtgtagaaaaatgtctacacacagtatgtgctgccattctgtactatgcagtgatacatgaaggcatgggctcgggttaataggcctaggcaccagctttagctcggctgaagctggcggcccctggcaaattactttgattgaatcacctgtgatgttgaaggctgcctacttggtgaaatttaagtgagctgtatgtaaaatggcacagggtaggtgttcagtaaatgactccctttcccactactgaggctagagggacctggcaatcactacaggagggtgagaaagctagtagggaatttaagaaaatagaacattccctaactattgtttgattcccctcagattccattgttttctttcctccaatttagccacgattggacattgacttctatttccttcatactcacagctaactctgtcataacctagagcctctacagaggaagccagaagagactgaaagtgaatattatttactggtccattaggaccagctagtttgagataaggaacattttatttaaaaggtttgaattagcataggctgtaatctatgtctcacagctacaaagactagacaggccaggaaacaacccacattctaggcccagctcttccatgaacttgcagatgacctacaaaaatcattttatatgtgcttgccgttctctgtgttaatcagattatgcttactgaacgagcgaggttttcctccaataaaaatgcaacgtgaaggcacttttcaaaaataaaagaatgagggaagaaaga

SEQ ID NO: 26513 - protein, 61 aa, Homo sapiens [sequence omitted]

SEQ ID NO: 26514 - DNA, 1527 bp, Homo sapiens
gagaggctccataatgagaatgcagaaatggactctgatagcagttcatctgggacagagacagaccttcatgggagcctgagggtttagaccctgctcccatctccccttcccccactcaagagtcccagcagaatcccttccccccaccccagggatggagaggcactgtgtatctccctccagactcgaagtcatcctgcaagatggcaagaaccaagcaagctccgatcccagggtgtgggagtgggggcctgttcccggtctgacctccttggcactggagcatctggggcttcgttcatccattcatcccgtatcaggggccaaggtacctttacaggagcacctagagcgagggcctttggcaaaaacaaaacaaccaacacacctctccacagggccagctccttagggataagtggaagatggaaattgcaattccaagagggagtgtgcccaaatgatttatggggatacctggaagggagcttggggtgggggctgtctgtgacacttaagcagtctgggtggttgtctatttgtctgtcttcagtcttgaagcagggcttcccaatgcccttttcctccctgccttccttcccccattatttcccacaggccagcataattttgtttttcctaatttatagtcactgttctagacagaccaaagagaaggaacagtggtggagtctaggctgctgatcagtaagctttacctagcacctgagcacctttctcccctcccctctttcctcacccttttctagatgtaagacagaaagtaaatgtgactgggacttaaccaaggtcttggtaaagcctgcatggcaccgtaagaagctgaaaatactgtttgttcccgcaatcactgatttgaaaagttcccaacacaggcagctgctgtgtatatgggattagagccactacatagaatagtctcttacagattttcataaatactagtcacaataagggtatttttcttgggggtggagtaagggggagactgatgctagtccttgttgtattttgttgggctgtccttgtgtattttcaccccagcctgtagtcctcctcacttcaaccccagggatttttggggagcaagggtagccaatggcagaggggggattggtgggcttggggaacggaagtttatcttggatacccttgaagaggctgggtctcttcacatgaagatcgaaaagggaccctgcttccaatttccctcttccattcctcgagctactccagggcttagaagaatgctcttggtctgtgggtccagtgttgtctgtcatccatttaagtgttcccactttcaagtgacaatcctctccttggccctgccatagggcagagcatgtctggcatagcagcctgacttttatgccctaatcttgagttgaggaaatatatgcacaggagtcaaagagatgtctttatatctgactgtatataaatgaagtttttttgttttttttgttttcctttttggtgcaataaagtttgttttggcag

SEQ ID NO: 26515 - protein, 85 aa, Homo sapiens [sequence omitted]

SEQ ID NO: 26516 - DNA, 2841 bp, Homo sapiens
gagaggctccataatgagaatgcagaaatggactctgatagcagttcatctgggacagagacagaccttcatgggagcctgagggtttagaccctgctcccatctccccttcccccactcaagagtcccagcagaatcccttccccccaccccagggatggagaggcactgtgtatctccctccagactcgaagtcatcctgcaagatggcaagaaccaagcaagctccgatcccagggtgtgggagtgggggcctgttcccggtctgacctccttggcactggagcatctggggcttcgttcatccattcatcccgtatcaggggccaaggtacctttacaggagcacctagagcgagggcctttggcaaaaacaaaacaaccaacacacctctccacagggccagctccttagggataagtggaagatggaaattgcaattccaagagggagtgtgcccaaatgatttatggggatacctggaagggagcttggggtgggggctgtctgtgacacttaagcagtctgggtggttgtctatttgtctgtcttcagtcttgaagcagggcttcccaatgcccttttcctccctgccttccttcccccattatttcccacaggccagcataattttgtttttcctaatttatagtcactgttctagacagaccaaagagaaggaacagtggtggagtctaggctgctgatcagtaagctttacctagcacctgagcacctttctcccctcccctctttcctcacccttttctagatgtaagacagaaagtaaatgtgactgggacttaaccaaggtcttggtaaagcctgcatggcaccgtaagaagctgaaaatactgtttgttcccgcaatcactgatttgaaaagttcccaacacaggcagctgctgtgtatatgggattagagccactacatagaatagtctcttacagattttcataaatactagtcacaataagggtatttttcttgggggtggagtaagggggagactgatgctagtccttgttgtattttgttgggctgtccttgtgtattttcaccccagcctgtagtcctcctcacttcaaccccagggatttttggggagcaagggtagccaatggcagaggggggattggtgggcttggggaacggaagtttatcttggatacccttgaagaggctgggtctcttcacatgaagatcgaaaagggaccctgcttccaatttccctcttccattcctcgagctactccagggcttagaagaatgctcttggtctgtgggtccagtgttgtctgtcatccatttaagtgttcccactttcaagtgacaatcctctccttggccctgccatagggcagagcatgtctggcatagcagcctgacttttatgccctaatcttgagttgaggaaatatatgcacaggagtcaaagagatgtctttatatctgactgtatataaatgaagtttttttgttttttttgttttcctttttggtgcaataaagtttgttttggcagaaggaggaagtgcctgtgggtgtgggagggcttgtgtaaaggacgaatgggatcatcttgtcaaccacacctcacctaggcctggaactgttagggagaaggaaagtgccatgaattgtctggaaaccgaagacttgcataacatggtggaagggcagggctgggtggggagagcaggacaagttttctcattggaaatggggtccatgctctggcagtcagtgacatcttagtttgagtggtttccaaagacagacctattccagagcttggagtgagcatgtcctacaaggataggcagaggaagagatgggcccaggctatatcctgctaaaggaagggtctcagtatggaaaaaccattgagttttcagatttccagtactaaactagcacttttaggatcttagcctttagaccataaggactttgggagccttaaacaactctggcctcttccctcatcaccacttctacttgctataggagattcttgctttctgatgcagaggcttttactcttggctgaccacgtgtgtagaaaaatgtctacacacagtatgtgctgccattctgtactatgcagtgatacatgaaggcatgggctcgggttaataggcctaggcaccagctttagctcggctgaagctggcggcccctggcaaattactttgattgaatcacctgtgatgttgaaggctgcctacttggtgaaatttaagtgagctgtatgtaaaatggcacagggtaggtgttcagtaaatgactccctttcccactactgaggctagagggacctggcaatcactacaggagggtgagaaagctagtagggaatttaagaaaatagaacattccctaactattgtttgattcccctcagattccattgttttctttcctccaatttagccacgattggacattgacttctatttccttcatactcacagctaactctgtcataacctagagcctctacagaggaagccagaagagactgaaagtgaatattatttactggtccattaggaccagctagtttgagataaggaacattttatttaaaaggtttgaattagcataggctgtaatctatgtctcacagctacaaagactagacaggccaggaaacaacccacattctaggcccagctcttccatgaacttgcagatgacctacaaaaatcattttatatgtgcttgccgttctctgtgttaatcagattatgcttactgaacgagcgaggttttcctccaataaaaatgcaacgtgaaggcacttttcaaaaataaaagaatgagggaagaaaga

SEQ ID NO: 26517 - protein, 85 aa, Homo sapiens [sequence omitted]

SEQ ID NO: 26518 - DNA, 937 bp, Homo sapiens
ctagacagaccaaagagaaggaacagtggtggagtctaggctgctgatcagtaagctttacctagcacctgagcacctttctcccctcccctctttcctcacccttttctagatgtaagacagaaagtaaatgtgactgggacttaaccaaggtcttggtaaagcctgcatggcaccgtaagaagctgaaaatactgtttgttcccgcaatcactgatttgaaaagttcccaacacaggcagctgctgtgtatatgggattagagccactacatagaatagtctcttacagattttcataaatactagtcacaataagggtatttttcttgggggtggagtaagggggagactgatgctagtccttgttgtattttgttgggctgtccttgtgtattttcaccccagcctgtagtcctcctcacttcaaccccagggatttttggggagcaagggtagccaatggcagagggggttggggctgggactctggaggctcctccccttctttctcttccttccgcctcccccgtgcccccagctgctcttgtcactgtctctgatgggtatttgcctggctttgttgcttctctatctgtatttagctgcagtgatcctttagctggttggctcagaaaaaaaaaaatgtgctttaggtgccctgtaatcctgggcatcaagggaatccatccttcccctttttgatatgttctccccgtacttccagatttattgttatggctcccagtgggtattggcgattcttgtgatggcagagcatgtctggcatagcagcctgacttttatgccctaatcttgagttgaggaaatatatgcacaggagtcaaagagatgtctttatatctgactgtatataaatgaagtttttttgttttttttgttttcctttttggtgcaataaagtttgttttggcaga

SEQ ID NO: 26519 - protein, 35 aa, Homo sapiens
MFSPYFQIYCYGSQWVLAILVMAEHVWHSSLTFMP

SEQ ID NO: 26520 - DNA, 964 bp, Homo sapiens
agtaaagataaggtcttgctgtgttgcccaggctggtctctaacccctgggctcaagcagtcttctcaatgtgggcatcccaaaagtgttgcgattatgggtatgagccattgcgcctggcagttgtgcagtcttctaaattttctgtcagtatcctgcccagggcagagctgaaactgtgttgttaggtctgattctgccaagggtcgttaagcaactcttccttacctcagagatgacctgatcagagccatcaagaaactaaaggcacttggcactggcttcggcatcatccctgtgggcggcacttacctcattcagtctgttccagctgagctcaatatggatcacaccgtggtgctgcagctggcagagaagaatggctacgtgactgtcagtgagatcaaagccagtcttaaatgggagaccgagcgagcgcggcaagtgctggaacacctgctgaaggaagggttggcgtggctggacttacaggccccaggggaggcccactactggctgccagctctcttcactgacctctactcccaggagattacagctgaggaggccagagaagccctcccctgactgcatgtggaagggcacacagcagcaggcagggaggaggcggaggtggcaaataaacctgggcaattttgtttatacaaaaaatagaaaaaaagttccaagtttttctttcttccctcattcttttatttttgaaaagtgccttcacgttgcatttttattggaggaaaacctcgctcgttcagtaagcataatctgattaacacagagaacggcaagcacatataaaatgatttttgtaggtcatctgcaagttcatggaagagctgggcctagaatgtgggttgtttcctggcctgtctagtctttgtagctgtgagacatagattacagcctatgctaattcaaaccttttaaataaaatgttccttatctc

SEQ ID NO: 26521 - protein, 81 aa, Homo sapiens [sequence omitted]

SEQ ID NO: 26522 - DNA, 1004 bp, Homo sapiens
cgaagtgtgcctggcgctgaagcatcggaatggaggtgagggtggctaggtcctgtgaactggactctggacttctctgagagggagaaaaccgtaaaagattatcgtttccatcctgcagtctacaggcctctaaggacttgagagacatcttagctgtttcatgcagttgaatccatggcaagtctccatggccaagggtctgataactttggaggaactacatcaacaggtgttgaagggaaggggcaagttcgcccaggatgtcagtcaagatgacctgatcagagccatcaagaaactaaaggcacttggcactggcttcggcatcatccctgtgggcggcacttacctcattcagtctgttccagctgagctcaatatggatcacaccgtggtgctgcagctggcagagaagaatggctacgtgactgtcagtgagatcaaagccagtcttaaatgggagaccgagcgagcgcggcaagtgctggaacacctgctgaaggaagggttggcgtggctggacttacaggccccaggggaggcccactactggctgccagctctcttcactgacctctactcccaggagattacagctgaggaggccagagaagccctcccctgactgcatgtggaagggcacacagcagcaggcagggaggaggcggaggtggcaaataaacctgggcaattttgtttatacaaaaaatagaaaaaaagttccaagtttttctttcttccctcattcttttatttttgaaaagtgccttcacgttgcatttttattggaggaaaacctcgctcgttcagtaagcataatctgattaacacagagaacggcaagcacatataaaatgatttttgtaggtcatctgcaagttcatggaagagctgggcctagaatgtgggttgtttcctggcctgtctagtctttgtagctgtgagacatagattacagcctatgctaattcaaaccttttaaataaaatgttccttatctc

SEQ ID NO: 26523 - protein, 154 aa, Homo sapiens
MQLNPWQVSMAKGLITLEELHQQVLKGRGKFAQDVSQDDLIRAIKKLKALGTGFGIIPVGGTYLIQSVPAELNMDHTVVLQLAEKNGYVTVSEIKASLKWETERARQVLEHLLKEGLAWLDLQAPGEAHYWLPALFTDLYSQEITAEEAREALP

SEQ ID NO: 26524 - DNA, 915 bp, Homo sapiens
gccttggggagccggcggcggagtccgggacgtggagacccggggtcccggcagccgggcggcccgcgggcccagggtggggatgcaccgccgcggggtgggagctggcgccatcgccaagaagaaacttgcagaggccaagtataaggagcgagggacggtcttggctgaggaccagctagcccagatgtcaaagcagttggacatgttcaagaccaacctggaggaatttgccagcaaacacaagcaggagatccggaagaatcctgagttccgtgtgcagttccaggacatgtgtgcaaccattggcgtggatccgctggcctaagaatggctacgtgactgtcagtgagatcaaagccagtcttaaatgggagaccgagcgagcgcggcaagtgctggaacacctgctgaaggaagggttggcgtggctggacttacaggccccaggggaggcccactactggctgccagctctcttcactgacctctactcccaggagattacagctgaggaggccagagaagccctcccctgactgcatgtggaagggcacacagcagcaggcagggaggaggcggaggtggcaaataaacctgggcaattttgtttatacaaaaaatagaaaaaaagttccaagtttttctttcttccctcattcttttatttttgaaaagtgccttcacgttgcatttttattggaggaaaacctcgctcgttcagtaagcataatctgattaacacagagaacggcaagcacatataaaatgatttttgtaggtcatctgcaagttcatggaagagctgggcctagaatgtgggttgtttcctggcctgtctagtctttgtagctgtgagacatagattacagcctatgctaattcaaaccttttaaataaaatgttccttatctc

SEQ ID NO: 26525 - protein, 81 aa, Homo sapiens
MHRRGVGAGAIAKKKLAEAKYKERGTVLAEDQLAQMSKQLDMFKTNLEEFASKHKQEIRKNPEFRVQFQDMCATIGVDPLA

SEQ ID NO: 26526 - DNA, 1252 bp, Homo sapiens
gcgcggctcgggcttccgccttggggagccggcggcggagtccgggacgtggagacccggggtcccggcagccgggcggcccgcgggcccagggtggggatgcaccgccgcggggtgggagctggcgccatcgccaagaagaaacttgcagaggccaagtataaggagcgagggacggtcttggctgaggaccagctagcccagatgtcaaagcagttggacatgttcaagaccaacctggaggaatttgccagcaaacacaagcaggagatccggaagaatcctgagttccgtgtgcagttccaggacatgtgtgcaaccattggcgtggatccgctggcctctggaaaaggattttggtctgagatgctgggcgtgggggacttctattacgaactaggtgtccaaattatcgaagtgtgcctggcgctgaagcatcggaatggaggtctgataactttggaggaactacatcaacaggtgttgaagggaaggggcaagttcgcccaggatgtcagtcaagatgacctgatcagagccatcaagaaactaaaggcacttggcactggcttcggcatcatccctgtgggcggcacttacctcattcagtctgttccagctgagctcaatatggatcacaccgtggtgctgcagctggcagagaagaatggctacgtgactgtcagtgagatcaaagccagtcttaaatgggagaccgagcgagcgcggcaagtgctggaacacctgctgaaggaagggttggcgtggctggacttacaggccccaggggaggcccactactggctgccagctctcttcactgacctctactcccaggagattacagctgaggaggccagagaagccctcccctgactgcatgtggaagggcacacagcagcaggcagggaggaggcggaggtggcaaataaacctgggcaattttgtttatacaaaaaatagaaaaaaagttccaagtttttctttcttccctcattcttttatttttgaaaagtgccttcacgttgcatttttattggaggaaaacctcgctcgttcagtaagcataatctgattaacacagagaacggcaagcacatataaaatgatttttgtaggtcatctgcaagttcatggaagagctgggcctagaatgtgggttgtttcctggcctgtctagtctttgtagctgtgagacatagattacagcctatgctaattcaaaccttttaaataaaatgttccttatctc

SEQ ID NO: 26527 - protein, 258 aa, Homo sapiens; identical to SEQ ID NO: 3537

SEQ ID NO: 26528 - DNA, 1918 bp, Homo sapiens
ctaaaggcacttggcactggcttcggcatcatccctgtgggcggcacttacctcattcagtctgttccagctgagctcaatatggatcacaccgtggtgctgcagctggcagaggtactggtgcaccttcgagtgtgtgtgtgtgcaagggacagtctgtgaggcaagtctggagcagttctcagctcgtgctccccattatgcaggtcttttgctgagactatccagtggatgaactactcaggcctgtgcttgttcagcagacatttattgagcagctacagtgcaaagcactgggccaggctgtggggcatataaagatgataaaattcctgctctcaaggagcttacagtctagtcaggtagacagacatgcagacaactaactagatttctttgggtagccagactctttgatgtcttttgaaactactttatggattcttcaaaaacagattttaaaaaatcttgtttgccatgcccccatccctcatcatgccttaagcatatgccatcttcccccaaatccccatcaggtatttagatgtgttcagttttattatttttgagatggagtttcactcgttgcctaggccagagtgcaatggcgtgatctcagctcactacaatgtcagcctcccgggttcaagtgattctcctgcctcagcctcccgagtagctgggattacaggtgtgtgccaccacgcccagctaattttgtatttttagtagagatggggtttctccatgttggccaggcctgagtttggtctcgaactcccgacctcaggtgatccacccaccttagcctctctaagtgctgggattacaggggtgagccaccgcacccggcccagtttcctttatgacgtaaaacagaactaaataagggaggggcttttctgtattggaggatgagtagaatgaggcagggcaagggctgaatatttaaataatggaggttattagcagtttatgattatcatcatttcttcccatcaattaattgtccagaatcttcccttgtcatgctctagagtgctttgcagaagtctaactcagtatgttagtacaagggaccccacttttttgttttttgagatggagtctcgctctgtcacccaggctggtgtgcagtggtgcaatctccggctcactgcagcctccatctcccaggttccagtgattcttctgcctcagcctcccgagtagctgggattacaggcgtgtgccaccatgcctggctaatttttgtatttttagtagagatggggtttcaccatgttggccaggctggtctcgaactcctgacgtcaggtgatccacccacctcggcctcccaaaaagtgctaggattacaggcatgagctgccgtgcctggccggtaccccagttttaggattgaacccaccaacctacctctgtcatgctgaaagtcacttctctctctccccgctggaacctttaaacattttctgtgttctctcatgcttgacagcttttcctcctgtctgggtaagtctcttgttcctgggcagatcctgggttctaagggaaggtgcactcttaactgattcaatccccattcctccttccttcagaagaatggctacgtgactgtcagtgagatcaaagccagtcttaaatgggagaccgagcgagcgcggcaagtgctggaacacctgctgaaggaagggttggcgtggctggacttacaggccccaggggaggcccactactggctgccagctctcttcactgacctctactcccaggagattacagctgaggaggccagagaagccctcccctgactgcatgtggaagggcacacagcagcaggcagggaggaggcggaggtggcaaataaacctgggcaattttgtttatacaaaaaatagaaaaaaagttccaagtt

SEQ ID NO: 26529 - protein, 38 aa, Homo sapiens
MGDRASAASAGTPAEGRVGVAGLTGPRGGPLLAASSLH

SEQ ID NO: 26530 - DNA, 692 bp, Homo sapiens
agtaaagataaggtcttgctgtgttgcccaggctggtctctaacccctgggctcaagcagtcttctcaatgtgggcatcccaaaagtgttgcgattatgggtatgagccattgcgcctggcagttgtgcagtcttctaaattttctgtcagtatcctgcccagggcagagctgaaactgtgttgttaggtctgattctgccaagggtcgttaagcaactcttccttacctcagagatgacctgatcagagccatcaagaaactaaaggcacttggcactggcttcggcatcatccctgtgggcggcacttacctcattcagtctgttccagctgagctcaatatggatcacaccgtggtgctgcagctggcagagaagaatggctacgtgactgtcagtgagatcaaagccagtcttaaatgggagaccgagcgagcgcggcaagtgctggaacacctgctgaaggaagggttggcgtggctggacttacaggccccaggggaggcccactactggctgccagctctcttcactgacctctactcccaggagattacagctgaggaggccagagaagccctcccctgactgcatgtggaagggcacacagcagcaggcagggaggaggcggaggtggcaaataaacctgggcaattttgtttatacaaaaaatagaaaaaaagttccaagtt

SEQ ID NO: 26531 - protein, 81 aa, Homo sapiens [sequence omitted]

SEQ ID NO: 26532 - DNA, 497 bp, Homo sapiens
ctgcctcagcctcccaaggattataggcgattgccaccagatgacctgatcagagccatcaagaaactaaaggcacttggcactggcttcggcatcatccctgtgggcggcacttacctcattcagtctgttccagctgagctcaatatggatcacaccgtggtgctgcagctggcagagaagaatggctacgtgactgtcagtgagatcaaagccagtcttaaatgggagaccgagcgagcgcggcaagtgctggaacacctgctgaaggaagggttggcgtggctggacttacaggccccaggggaggcccactactggctgccagctctcttcactgacctctactcccaggagattacagctgaggaggccagagaagccctcccctgactgcatgtggaagggcacacagcagcaggcagggaggaggcggaggtggcaaataaacctgggcaattttgtttatacaaaaaatagaaaaaaagttccaagtt

SEQ ID NO: 26533 - protein, 81 aa, Homo sapiens [sequence omitted]

SEQ ID NO: 26534 - DNA, 732 bp, Homo sapiens
cgaagtgtgcctggcgctgaagcatcggaatggaggtgagggtggctaggtcctgtgaactggactctggacttctctgagagggagaaaaccgtaaaagattatcgtttccatcctgcagtctacaggcctctaaggacttgagagacatcttagctgtttcatgcagttgaatccatggcaagtctccatggccaagggtctgataactttggaggaactacatcaacaggtgttgaagggaaggggcaagttcgcccaggatgtcagtcaagatgacctgatcagagccatcaagaaactaaaggcacttggcactggcttcggcatcatccctgtgggcggcacttacctcattcagtctgttccagctgagctcaatatggatcacaccgtggtgctgcagctggcagagaagaatggctacgtgactgtcagtgagatcaaagccagtcttaaatgggagaccgagcgagcgcggcaagtgctggaacacctgctgaaggaagggttggcgtggctggacttacaggccccaggggaggcccactactggctgccagctctcttcactgacctctactcccaggagattacagctgaggaggccagagaagccctcccctgactgcatgtggaagggcacacagcagcaggcagggaggaggcggaggtggcaaataaacctgggcaattttgtttatacaaaaaatagaaaaaaagttccaagtt

SEQ ID NO: 26535 - protein, 154 aa, Homo sapiens; identical to SEQ ID NO: 26523

SEQ ID NO: 26536 - DNA, 643 bp, Homo sapiens
gccttggggagccggcggcggagtccgggacgtggagacccggggtcccggcagccgggcggcccgcgggcccagggtggggatgcaccgccgcggggtgggagctggcgccatcgccaagaagaaacttgcagaggccaagtataaggagcgagggacggtcttggctgaggaccagctagcccagatgtcaaagcagttggacatgttcaagaccaacctggaggaatttgccagcaaacacaagcaggagatccggaagaatcctgagttccgtgtgcagttccaggacatgtgtgcaaccattggcgtggatccgctggcctaagaatggctacgtgactgtcagtgagatcaaagccagtcttaaatgggagaccgagcgagcgcggcaagtgctggaacacctgctgaaggaagggttggcgtggctggacttacaggccccaggggaggcccactactggctgccagctctcttcactgacctctactcccaggagattacagctgaggaggccagagaagccctcccctgactgcatgtggaagggcacacagcagcaggcagggaggaggcggaggtggcaaataaacctgggcaattttgtttatacaaaaaatagaaaaaaagttccaagtt

SEQ ID NO: 26537 - protein, 81 aa, Homo sapiens; identical to SEQ ID NO: 26525

SEQ ID NO: 26538 - DNA, 980 bp, Homo sapiens
gcgcggctcgggcttccgccttggggagccggcggcggagtccgggacgtggagacccggggtcccggcagccgggcggcccgcgggcccagggtggggatgcaccgccgcggggtgggagctggcgccatcgccaagaagaaacttgcagaggccaagtataaggagcgagggacggtcttggctgaggaccagctagcccagatgtcaaagcagttggacatgttcaagaccaacctggaggaatttgccagcaaacacaagcaggagatccggaagaatcctgagttccgtgtgcagttccaggacatgtgtgcaaccattggcgtggatccgctggcctctggaaaaggattttggtctgagatgctgggcgtgggggacttctattacgaactaggtgtccaaattatcgaagtgtgcctggcgctgaagcatcggaatggaggtctgataactttggaggaactacatcaacaggtgttgaagggaaggggcaagttcgcccaggatgtcagtcaagatgacctgatcagagccatcaagaaactaaaggcacttggcactggcttcggcatcatccctgtgggcggcacttacctcattcagtctgttccagctgagctcaatatggatcacaccgtggtgctgcagctggcagagaagaatggctacgtgactgtcagtgagatcaaagccagtcttaaatgggagaccgagcgagcgcggcaagtgctggaacacctgctgaaggaagggttggcgtggctggacttacaggccccaggggaggcccactactggctgccagctctcttcactgacctctactcccaggagattacagctgaggaggccagagaagccctcccctgactgcatgtggaagggcacacagcagcaggcagggaggaggcggaggtggcaaataaacctgggcaattttgtttatacaaaaaatagaaaaaaagttccaagtt

SEQ ID NO: 26539 - protein, 258 aa, Homo sapiens; identical to SEQ ID NO: 3537

SEQ ID NO: 26540 - DNA, 814 bp, Homo sapiens
ggtcttgaactcttggtctcgagcgatccacctagctcgatgtcccaaagtgttggaattacaggcgtgagccactgcgcccggccagaaatgacttttagattgcctgccctctggagccgtctgaccctgttcttcagcaggagttaccgtgagtccgattgtttcctgagtagcagatggagcagaagaacttcatgccatgcagggaagacttcccatatgatagatgttttaatgcaggtttgaaagaaaagaagggatgtaaattaatcaataaccgagattttgtttttctgtcttgtagctggaaaaggattttggtctgagatgctgggcgtgggggacttctattacgaactaggtgtccaaattatcgaagtgtgcctggcgctgaagcatcggaatggaggtgagggtggctaggtcctgtgaactggactctggacttctctcattcagtctgttccagctgagctcaatatggatcacaccgtggtgctgcagctggcagaggtactggtgcaccttcgagtgtgtgtgtgtgcaagggacagtctgtgaggcaagtctggagcagttctcagctcgtgctccccattatgcaggtcttttgctgagactatccagtggatgaactactcaggcctgtgcttgttcagcagacatttattgagcagctacagtgcaaagcactgggccaggctctgtcatgctgaaagtcacttctctctctccccgctggaacctttaaacattttctgtgttctctcatgcttgacagcttttcctcctgtctgggtaagtctcttgt

SEQ ID NO: 26541 - protein, 76 aa, Homo sapiens
MEVRVARSCELDSGLLSFSLFQLSSIWITPWCCSWQRYWCTFECVCVQGTVCEASLEQFSARAPHYAGLLLRLSSG

SEQ ID NO: 26542 - DNA, 809 bp, Homo sapiens
gccttggggagccggcggcggagtccgggacgtggagacccggggtcccggcagccgggcggcccgcgggcccagggtggggatgcaccgccgcggggtgggagctggcgccatcgccaagaagaaacttgcagaggccaagtataaggagcgagggacggtcttggctgaggaccagctagcccagatgtcaaagcagttggacatgttcaagaccaacctggaggaatttgccagcaaacacaagcaggagatccggaagaatcctgagttccgtgtgcagttccaggacatgtgtgcaaccattggcgtggatccgctggcctctggaaaaggattttggtctgagatgctgggcgtgggggacttctattacgaactaggtgtccaaattatcgaagtgtgcctggcgctgaagcatcggaatggaggtctgataactttggaggaactacatcaacaggtgttgaagggaaggggcaagttcgcccaggatgtcagtcagtaggtcttgtcttccaatcccttggagtacagaaagaggtctttaaaattcagatggaactcttttctccctattcctcatgtctaggctagcttagaaatctgtatgatctccatatcatacaggaaaaaaaaaaacaaaaaacaaacaaaaaataagagatagggtctcacttttgcccgggctggagtacagtggcatgatcacagcttactgctaccaagatcattgcttactgcagcctcaaactcttgggctcaagtaatcctcccacctcagcctcccaagtagttgggattatagg

SEQ ID NO: 26543 - protein, 141 aa, Homo sapiens
MHRRGVGAGAIAKKKLAEAKYKERGTVLAEDQLAQMSKQLDMFKTNLEEFASKHKQEIRKNPEFRVQFQDMCATIGVDPLASGKGFWSEMLGVGDFYYELGVQIIEVCLALKHRNGGLITLEELHQQVLKGRGKFAQDVSQ

SEQ ID NO: 26544 - DNA, 779 bp, Homo sapiens
ggtcttgaactcttggtctcgagcgatccacctagctcgatgtcccaaagtgttggaattacaggcgtgagccactgcgcccggccagaaatgacttttagattgcctgccctctggagccgtctgaccctgttcttcagcaggagttaccgtgagtccgattgtttcctgagtagcagatggagcagaagaacttcatgccatgcagggaagacttcccatatgatagatgttttaatgcaggtttgaaagaaaagaagggatgtaaattaatcaataaccgagattttgtttttctgtcttgtagctggaaaaggattttggtctgagatgctgggcgtgggggacttctattacgaactaggtgtccaaattatcgaagtgtgcctggcgctgaagcatcggaatggaggtgagggtggctaggtcctgtgaactggactctggacttctctgagagggagaaaaccgtaaaagattatcgtttccatcctgcagtctacaggcctctaaggacttgagagacatcttagctgtttcatgcagttgaatccatggcaagtctccatggccaagggtctgataactttggaggaactacatcaacaggtgttgaagggaaggggcaagttcgcccaggatgtcagtcagtaggtcttgtcttccaatcccttggagtacagaaagaggtctttaaaattcagatggaactcttttctccctattcctcatgtctaggctagcttagaaatctgtatgatctccatatcatacaggaa

SEQ ID NO: 26545 - protein, 62 aa, Homo sapiens
MASLHGQGSDNFGGTTSTGVEGKGQVRPGCQSVGLVFQSLGVQKEVFKIQMELFSPYSSCLG

SEQ ID NO: 26546 - DNA, 612 bp, Homo sapiens
ggtcttgaactcttggtctcgagcgatccacctagctcgatgtcccaaagtgttggaattacaggcgtgagccactgcgcccggccagaaatgacttttagattgcctgccctctggagccgtctgaccctgttcttcagcaggagttaccgtgagtccgattgtttcctgagtagcagatggagcagaagaacttcatgccatgcagggaagacttcccatatgatagatgttttaatgcaggtttgaaagaaaagaagggatgtaaattaatcaataaccgagattttgtttttctgtcttgtagctggaaaaggattttggtctgagatgctgggcgtgggggacttctattacgaactaggtgtccaaattatcgaagtgtgcctggcgctgaagcatcggaatggaggtctgataactttggaggaactacatcaacaggtgttgaagggaaggggcaagttcgcccaggatgtcagtcagtaggtcttgtcttccaatcccttggagtacagaaagaggtctttaaaattcagatggaactcttttctccctattcctcatgtctaggctagcttagaaatctgtatgatctccatatcatacagg

SEQ ID NO: 26547 - protein, 52 aa, Homo sapiens
MLGVGDFYYELGVQIIEVCLALKHRNGGLITLEELHQQVLKGRGKFAQDVSQ

SEQ ID NO: 26548 - DNA, 714 bp, Homo sapiens
agcaggctcagaaggtccagaaatcaggggaaggagacccctatctgtccttcttctggaagagctggaaaggaagtctgctcaggaaataaccttggaagatggtggccacgaagacctttgctctgctgctgctgtccctgttcctggcagtgggactaggagagaagaaagagggtcacttcagcgctctcccctccctgcctgttggatctcatgctaaggtgagcagccctcaacctcgaggccccaggtacgcggaagggactttcatcagtgactacagtattgccatggacaagattcaccaacaagactttgtgaactggctgctggcccaaaaggggaagaagaatgactggaaacacaacatcacccagagggaggctcgggcgctggagctggccagtcaagctaataggaaggaggaggaggcagtggagccacagagctccccagccaagaaccccagcgatgaagatttgctgcgggacttgctgattcaagagctgttggcctgcttgctggatcagacaaacctctgcaggctcaggtctcggtgactctgaccacacccagctcaggactggattctgcccttcacttagcacctgcctcagccccactccagaatagccaagagaacccaaaccaataaagtttatgctaagtcgagcccattgtgaaaatttattaaaatgactactgagcact

SEQ ID NO: 26549 - protein, 153 aa, Homo sapiens; identical to SEQ ID NO: 3539

SEQ ID NO: 26550 - DNA, 431 bp, Homo sapiens
agcttcttcccttcggtccgaaacccctccgagagggctgagtcggggacagacaggtggagtttccagagcctgcaccacccgggacactgctggcagctctctaggccctagagtctgagctgactccgactttggctcaccgctctgcggccggacgattgtatgccattcaaaaagtcgggagttgaaagacagcacgcagcacctttgtccccctccccgttttcccggcgcgctgaaaagaaatggggctgggacttaggggcgggggagggcttccaactcggtttctctatatcctccaccaccttagagcccaccctccccaatgagcgttttgttctacccagccacgtgtttgtcggatttttgtttttgtgatttttttttcccatggaacaacaagaattaaagtactaggagctatt

SEQ ID NO: 26551 - protein, 72 aa, Homo sapiens [sequence omitted]

SEQ ID NO: 26552 - DNA, 2384 bp, Homo sapiens
gcggagaaacgtgacacaccagccctctcggaggggtttcggaccgaagggaagaagctgcgccgtgtcgtccgtctccctgcgcgccgcgggcacttctcctgggctctccccgaactctcccgcgacctctgcgcgccctcaggccgccttccccgccctgggctcgggacaacttctggggtggggtgcaaagaaagtttgcggctcctgccgccggcctctccgcctcttggcctaggaggctcgccgcccgcgcccgctcgttcggccttgcccgggaccgcgtcctgccccgagaccgccaccatgaacaagctttacatcggcaacctcaacgagagcgtgacccccgcggacttggagaaagtgtttgcggagcacaagatctcctacagcggccagttcttggtcaaatccggctacgccttcgtggactgcccggacgagcactgggcgatgaaggccatcgaaactttctccgggaaagtagaattacaaggaaaacgcttagagattgaacattcggtgcccaaaaaacaaaggagccggaaaattcaaatccgaaatattccaccccagctccgatgggaagtactggacagcctgctggctcagtatggtacagtagagaactgtgagcaagtgaacaccgagagtgagacggcagtggtgaatgtcacctattccaaccgggagcagaccaggcaagccatcatgaagctgaatggccaccagttggagaaccatgccctgaaggtctcctacatccccgatgagcagatagcacagggacctgagaatgggcgccgagggggctttggctctcggggtcagccccgccagggctcacctgtggcagcgggggccccagccaagcagcagcaagtggacatcccccttcggctcctggtgcccacccagtatgtgggtgccattattggcaaggagggggccaccatccgcaacatcacaaaacagacccagtccaagatagacgtgcataggaaggagaacgcaggtgcagctgaaaaagccatcagtgtgcactccacccctgagggctgctcctccgcttgtaagatgatcttggagattatgcataaagaggctaaggacaccaaaacggctgacgaggttcccctgaagatcctggcccataataactttgtagggcgtctcattggcaaggaaggacggaacctgaagaaggtagagcaagataccgagacaaaaatcaccatctcctcgttgcaagaccttaccctttacaaccctgagaggaccatcactgtgaagggggccatcgagaattgttgcagggccgagcaggaaataatgaagaaagttcgggaggcctatgagaatgatgtggctgccatgagcctgcagtctcacctgatccctggcctgaacctggctgctgtaggtcttttcccagcttcatccagcgcagtcccgccgcctcccagcagcgttactggggctgctccctatagctcctttatgcaggctcccgagcaggagatggtgcaggtgtttatccccgcccaggcagtgggcgccatcatcggcaagaaggggcagcacatcaaacagctctcccggtttgccagcgcctccatcaagattgcaccacccgaaacacctgactccaaagttcgtatggttatcatcactggaccgccagaggcccaattcaaggctcagggaagaatctatggcaaactcaaggaggagaacttctttggtcccaaggaggaagtgaagctggagacccacatacgtgtgccagcatcagcagctggccgggtcattggcaaaggtggaaaaacggtgaacgagttgcagaatttgacggcagctgaggtggtagtaccaagagaccagacccctgatgagaacgaccaggtcatcgtgaaaatcatcggacatttctatgccagtcagatggctcaacggaagatccgagacatcctggcccaggttaagcagcagcatcagaagggacagagtaaccaggcccaggcacggaggaagtgaccagcccctccctgtcccttcgagtccaggacaacaacgggcagaaatcgagagtgtgctctccccggcaggcctgagaatgagtgggaatccgggacacctgggccgggctgtagatcaggtttgcccacttgattgagaaagatgttccagtgaggaaccctgatctctcagccccaaacacccacccaattggcccaacactgtctgcccctcggggtgtcagaaattctagcgcaaggcacttttaaacgtggattgtttaaagaagctctccaggccccaccaagagggtggatcacacctcagtgggaagaaaaataaaatttccttcaggtttt

SEQ ID NO: 26553 - protein, 577 aa, Homo sapiens; identical to SEQ ID NO: 3541

SEQ ID NO: 26554 - DNA, 8192 bp, Homo sapiens
gcggagaaacgtgacacaccagccctctcggaggggtttcggaccgaagggaagaagctgcgccgtgtcgtccgtctccctgcgcgccgcgggcacttctcctgggctctccccgaactctcccgcgacctctgcgcgccctcaggccgccttccccgccctgggctcgggacaacttctggggtggggtgcaaagaaagtttgcggctcctgccgccggcctctccgcctcttggcctaggaggctcgccgcccgcgcccgctcgttcggccttgcccgggaccgcgtcctgccccgagaccgccaccatgaacaagctttacatcggcaacctcaacgagagcgtgacccccgcggacttggagaaagtgtttgcggagcacaagatctcctacagcggccagttcttggtcaaatccggctacgccttcgtggactgcccggacgagcactgggcgatgaaggccatcgaaactttctccgggaaagtagaattacaaggaaaacgcttagagattgaacattcggtgcccaaaaaacaaaggagccggaaaattcaaatccgaaatattccaccccagctccgatgggaagtactggacagcctgctggctcagtatggtacagtagagaactgtgagcaagtgaacaccgagagtgagacggcagtggtgaatgtcacctattccaaccgggagcagaccaggcaagccatcatgaagctgaatggccaccagttggagaaccatgccctgaaggtctcctacatccccgatgagcagatagcacagggacctgagaatgggcgccgagggggctttggctctcggggtcagccccgccagggctcacctgtggcagcgggggccccagccaagcagcagcaagtggacatcccccttcggctcctggtgcccacccagtatgtgggtgccattattggcaaggagggggccaccatccgcaacatcacaaaacagacccagtccaagatagacgtgcataggaaggagaacgcaggtgcagctgaaaaagccatcagtgtgcactccacccctgagggctgctcctccgcttgtaagatgatcttggagattatgcataaagaggctaaggacaccaaaacggctgacgaggttcccctgaagatcctggcccataataactttgtagggcgtctcattggcaaggaaggacggaacctgaagaaggtagagcaagataccgagacaaaaatcaccatctcctcgttgcaagaccttaccctttacaaccctgagaggaccatcactgtgaagggggccatcgagaattgttgcagggccgagcaggaaataatgaagaaagttcgggaggcctatgagaatgatgtggctgccatgagcctgcagtctcacctgatccctggcctgaacctggctgctgtaggtcttttcccagcttcatccagcgcagtcccgccgcctcccagcagcgttactggggctgctccctatagctcctttatgcaggctcccgagcaggagatggtgcaggtgtttatccccgcccaggcagtgggcgccatcatcggcaagaaggggcagcacatcaaacagctctcccggtttgccagcgcctccatcaagattgcaccacccgaaacacctgactccaaagttcgtatggttatcatcactggaccgccagaggcccaattcaaggctcagggaagaatctatggcaaactcaaggaggagaacttctttggtcccaaggaggaagtgaagctggagacccacatacgtgtgccagcatcagcagctggccgggtcattggcaaaggtggaaaaacggtgaacgagttgcagaatttgacggcagctgaggtggtagtaccaagagaccagacccctgatgagaacgaccaggtcatcgtgaaaatcatcggacatttctatgccagtcagatggctcaacggaagatccgagacatcctggcccaggttaagcagcagcatcagaagggacagagtaaccaggcccaggcacggaggaagtgaccagcccctccctgtcccttcgagtccaggacaacaacgggcagaaatcgagagtgtgctctccccggcaggcctgagaatgagtgggaatccgggacacctgggccgggctgtagatcaggtttgcccacttgattgagaaagatgttccagtgaggaaccctgatctctcagccccaaacacccacccaattggcccaacactgtctgcccctcggggtgtcagaaattctagcgcaaggcacttttaaacgtggattgtttaaagaagctctccaggccccaccaagagggtggatcacacctcagtgggaagaaaaataaaatttccttcaggttttaaaaacatgcagagaggtgttttaatcagccttaaaggatggttcatttcttgaccttaatgtttttccaatcttcttccccctacttgggtaattgattaaaatacctccatttacggcctctttctatatttacactaatttttttatctttattgctaccagaaaaaaatgcgaacgaatgcattgctttgcttacagtattgactcaagggaaaagaactgtcagtatctgtagattaattccaatcactccctaaccaataggtacaatacggaatgaagaagaggggaaaatggggagaaagatggttaaaatacataataatccacgtttaaaaggagcgcacttgtggctgatctatgccagatcaccatcttcaaattggcacaactgaaatttccccactctgttggggcttccccaccacattcatgtccctctcccgtgtaggtttcacattatgtccaggtgcacataggtggtattgaatgctcagcagggtaggggctgaccactgtccctgattcccatcgttctcaggcggattttatatttttttaaagtctattttaatgattggatatgagcactgggaaggggacgctaactccccttgataaagtctcggttccatggaggacttgagtggccccaaaggctgccacggtgccctcaccccagcccatgtgctcccataagggctggttcctagaggcaggggttgtggggcactcccagccacggcactgttaccttggtggtgggacttggaacccaaccctgagctcccgataaagctaaagtccatcatctggcaaattcagtaaattggagagtacttgcttctgtttgtatctgagaggaatttttaactgacggcttctgtctccatgaatcattatcagcatgatgaaaggtgtgtctaaaaaacaattcagaataccagcagcattgtacagcaaggggtaaataagcttaatttattaatttaccaggcttaattaagatcccatggagtgtttagcccttgtgggagacagaagccatcagttaaatgaggttaggcctctcctcctaatatactgattgacaatgcatattagccaggtaatgcactttagctaccctggacaatgctatcaagtgtgctgggaagggaggaaggcctctctacatatggaaaagcccatgcgtggagttcccctcctttcaacattgcaacaacagtaacaacaagacaaccgcaacatgtgggcgtagtcaggcaatgctgtgtgcgaagtaaactacctcaaggtatgaagttacctcagcaattattttcctttttgttccccccaaccccattaaaaaaatttttttttgatttttgtttttttgcagcttgctgatattttatataaaaaagaaaagcaaagcaaaagagaagctgatagtcttgaatattttatttttttaatgaaaagaaaaaacaagaaagttatgtttcataatttcttacaacatgagccagtaaccctttaggaactctctatggagaacaggcctggtgggaaaggctttgggggctgcccccttaggaggaggctagtgctaagagggaaggcccaggtttgagagagcccagaggggcagagcccagagccttgtttggccctgatctctgacttctagagccccagctgctggcggctgctggaatatcctacctgataggattaaaaggcctagtggagctgggggctctcagtggttaaacaatgcccaacaaccaaccagctggcccttggtctcctctctttcctcctttggttaaagagcatctcagccagcttttcccaccagtggtgctgttgagatattttaaaatattgcctccgttttatcgaggagagaaataataactaaaaaatataccctttaaaaaaacctatatttctctgtctaaaaatatgggagctgagattccgttcgtggaaaaaagacaaggccaccctctcgccctcagagaggtccacctggtttgtcattgcaatgcttttcattttttttttttgttattgtttcatttcagttccgtcttgctattcttcctaatctatatccatagatctaaggggcaaacagatactagttaactgcccccacctctgtctccctgtcttctttagatcggtctgattgattttaaaagtggacccaaacttagggaattcttgatttagggtggctggtggcaaggaggggcaggggatatggggacgtgactgggacaggttcctgccttatcattttctccctaggacattcccttgtagcccccagaattgtctggcccaaattgaatagaagcagaaaaacatttagggataacatcaggccagtagaattaagcctctccacctgtcccaaccataaaaagggtctcccagctttccatctctggctctatatgctttatcccaaaacaaagcagataacgttcagacgtcggccatttagtaatttaaagcgaatttccagcagcaagcatgctttgatatctggttcagactatcatcaggaagaaaaaaaaatcccacagtacctgaaatgtgattgttgcagtgttcagtttccttgggggcctgctcccttcacaccttgagcccaagtccttttccgttggctgattcagctcccagaagagacgaggaagtgtgtggcaagggactggaaaacttcacttgcttggattaggcaaggctccactcattgttgatatttgcccagcaggaaaatcatgtaagttataccaccagaaagcaaaaggagcatggtttggtggttaaggtttagtgggatgaaggacctgtcttggtgggccgggccctcttgtgccccgtaggctaggtcttagggcaactccttgccctcctgctcagcacctccatttccccatccttggtgagataacaagctatcgcgaaaagcacttgggagatttggatgatttgagaagagtgacttaaaaaaaatgcttctgtgctctaagatatatatgtgtgtgtgtgtgctacatatatatttttaagaaaggaccatctctttaggatatatttttaaattctttgaaacacataaccaaaatggtttgattcactgactgactttgaagctgcatctgccagttacaccccaaatggctttaatcccctctcgggtctggttgccttttgcagtttgggttgtggactcagctcctgtgaggggtctggttaggagagagccatttttaaggacagggagttttatagcccttttctactttcctcccctcctcccagtccttatcaatcttttttcctttttcctgaccccctccttctggaggcagttgggagctatccttgtttatgcctcactattggcagaaaagaccccatttaaaacccagagaacactggagggggatgctctagttggttctgtgtccattttcctctgtgccaaagacagacagacagaggctgagagaggctgttcctgaatcaaagcaatagccagctttcgacacatacctggctgtctgaggaggaaggcctcctggaaactgggagctaagggcgaggcccttcccttcagaggctcctgggggattagggtgtggtgtttgccaagccaaggggtagggagccgagaaattggtctgtcggctcctggttgcactttggggaaggagaggaagtttggggctccaggtagctccctgttgtgggactgctctgtcccctgcccctactgcagagatagcactgccgagttcccttcaggcctggcagacgggcagtgaggaggggcctcagttagctctcaagggtgccttcccctcctcccaacccagacataccctctgccaaactgggaaccagcagtgctagtaactacctcacagagccccagagggcctgcttgagccttcttgctccacaggagaagctggtgcctctaggcaaccccttcctcccacctctcatcaggggtgggggttctcctttctttcccctgaagtgtttatggggagatcctagtggctttgccattcaaaccactcgactgtttgcctgtttcttgaaaaccagtagaagggaaacagcacagcctgtcacagtaattgcaggaagattgaagaaaaatcctcatcaatgccaggggacataaaagccatttcccttccaaatactcgacaatttagatgcagaacatttctctgtattcagacttagagtaacaccagctgaaaactgcagtttctttcctttggatacataaggcttctctatcggggtacgggacagggaggaggcctcatgtctgaagggggatttaggggcgagagccccagccctgaccctcggtcctgtgcaccgctttggggcacagtctgatggcgcctttgctggcgccttagtatggttgactccggatggacaaaagaaaaaaaattttttttcttgaatgaaatagcaggaagctcctcgggagcatgtgttttgattaaccgcaggtgatggatgctacgagtataaatggattaactacctcaatccttacagtaagattggaactaagggcagggactcatgcataagggtatgaatcccagccaggacaagtgagttgaggcttgtgccacaaaaggtttgtccttggggaacaggcaggcctgccaggatcccccccatatcgattgggctgggagggctggccatgaggtccccactttctgctttccttgcccatgtgtcacccctttggcctccagcttgtccctctctcactttctatagctttgttggaccagatggtgaggaaaggaatggcctcttcccttctagagggggctggctggagtgagacctggggcttggcctggaacccaccacacagccccaaagtcaggaagcctggggaaaccagagctgagacctcttcaacagggtttctttgagatcctacacctccattgggccctttttcagtcttcaatgggggcccagttggctctagaaggagaagaggtgaagcaggatcctttgccctgggggagtctgagggcgcggtccttggactcattcaggccgtctttgtagttgggggagttccactgggcgatcccagcccctccccacccaccctctaatggacctcctcatagaagccccatttcacttttgttttatctacctcttagcaaaacaatagataaattaggtagtggcagctccacttgcttaggttagggggggaaaaagatttctttttccaaaggaaaaaaatattaccttgagaatactttccaaaaaataaaattaaaaaaaaaaaaaccaaaaaaaaaaatttttttttaaaagggagacattttccagtgaccactggattgttttaatttcccaagcttttttttcccccataaataagtttcactctttggcgattttcttcacttgtttaagataacgtgctagctattccaacaggtaacagctttcacagtctgcccctggcctgtctcaccccatcccccaccctattcctgccagtgagtccttcctgtgcttctctcccttctcccctcccagccagctgacttcagtcacccctgtcccccctcccctgccaataagctcccccaggaataaaggctttgttttggggatgcttaaatcttgactggcacttcccggctgtgggggctggggagccacttgtaacatttctgtgcagattttatgttagccactgctatgtaaaagcacgttcaa

SEQ ID NO: 26555 - protein, 577 aa, Homo sapiens; identical to SEQ ID NO: 3541

SEQ ID NO: 26556 - DNA, 705 bp, Homo sapiens
ggaagaagctgcgccgtgtcgtccgtctccctgcgcgccgcgggcacttctcctgggctctccccgaactctcccgcgacctctgcgcgccctcaggccgccttccccgccctgggctcgggacaacttctggggtggggtgcaaagaaagtttgcggctcctgccgccggcctctccgcctcttggcctaggaggctcgccgcccgcgcccgctcgttcggccttgcccgggaccgcgtcctgccccgagaccgccaccatgaacaagctttacatcggcaacctcaacgagagcgtgacccccgcggacttggagaaagtgtttgcggagcacaagatctcctacagcggccagttcttggtcaaatccggctacgccttcgtggactgcccggacgagcactgggcgatgaaggccatcgaaactttctccgggaaagtagaattacaaggaaaacgcttagagattgaacattcggtgcccaaaaaacaaaggtcctgaaggctgaccgaaacaataacagaggcagtaatagtagtcagaggttctatccatggattttgtttatcttgtaaaagagagacaacaggccttccagttgtccagggtctcagccagtcttcgactccatgttagtgtaaaacttctgcaccccatccatttccacctttcctctcctcccctatacctttttaaatgcctg

SEQ ID NO: 26557 - protein, 80 aa, Homo sapiens
MNKLYIGNLNESVTPADLEKVFAEHKISYSGQFLVKSGYAFVDCPDEHWAMKAIETFSGKVELQGKRLEIEHSVPKKQRS

SEQ ID NO: 26558 - DNA, 671 bp, Homo sapiens
agggtctccagtatgatagctaagcagaaggaatgctgacaagctgcccacctgagccttgcccttcacctgccttagatggctcagggaagaatctatggcaaactcaaggaggagaacttctttggtcccaaggaggaagtgaagctggagacccacatacgtgtgccagcatcagcagctggccgggtcattggcaaaggtggaaaaacggtgaacgagttgcagaatttgacggcagctgaggtggtagtaccaagagaccagacccctgatgagaacgaccaggtcatcgtgaaaatcatcggacatttctatgccagtcagatggctcaacggaagatccgagacatcctggcccaggttaagcagcaaaatcgagagtgtgctctccccggcaggcctgagaatgagtgggaatccgggacacctgggccgggctgtagatcaggtttgcccacttgattgagaaagatgttccagtgaggaaccctgatctctcagccccaaacacccacccaattggcccaacactgtctgcccctcggggtgtcagaaattctagcgcaaggcacttttaaacgtggattgtttaaagaagctctccaggccccaccaagagggtggatcacacctcagtgggaagaaaaataaaatttccttcaggtttt

SEQ ID NO: 26559 - protein, 128 aa, Homo sapiens
MAQGRIYGKLKEENFFGPKEEVKLETHIRVPASAAGRVIGKGGKTVNELQNLTAAEVVVPRDQTPDENDQVIVKIIGHFYASQMAQRKIRDILAQVKQQNRECALPGRPENEWESGTPGPGCRSGLPT

SEQ ID NO: 26560 - DNA, 1490 bp, Homo sapiens
ctagagccccagctgctggcggctgctggaatatcctacctgataggattaaaaggcctagtggagctgggggctctcagtggttaaacaatgcccaacaaccaaccagctggcccttggtctcctctctttcctcctttggttaaagagcatctcagccagcttttcccaccagtggtgctgttgagatattttaaaatattgcctccgttttatcgaggagagaaataataactaaaaaatataccctttaaaaaaacctatatttctctgtctaaaaatatgggagctgagattccgttcgtggaaaaaagacaaggccaccctctcgccctcagagaggtccacctggtttgtcattgcaatgcttttcattttttttttttgttattgtttcatttcagttccgtcttgctattcttcctaatctatatccatagatctaaggggcaaacagatactagttaactgcccccacctctgtctccctgtcttctttagatcggtctgattgattttaaaagtggacccaaacttagggaattcttgatttagggtggctggtggcaaggaggggcaggggatatggggacgtgactgggacaggttcctgccttatcattttctccctaggacattcccttgtagcccccagaattgtctggcccaaattgaatagaagcagaaaaacatttagggataacatcaggccagtagaattaagcctctccacctgtcccaaccataaaaagggtctcccagctttccatctctggctctatatgctttatcccaataagctcccccaggaataaaggctttgttttggggatgcttaaatcttgactggcacttcccggctgtgggggctggggagccacttgtaacatttctgtgcagattttatgttagccactgctatgtaaaagcacgttcaaaatgaatttcagcagattatgtgttaccataatgaataaacgtcctctatcaccatttggagtctcccttttctccaggatcttgatcctggtccccaaaaccagagtgaatcaaaagagcttcctcccctgaggcaaagtggatttgtaagcagttctgaaacatcacttactcagaagagggaacgatgtattttgatgagtgcaaattgggaagagctggaggcctactgcttgggacagttttttttttttttttttttttaaatatgagtgctagcttattctgtaattgcggcaactttgaaaattgtattttactggaaatctgccagccatcaccacccgattttgattgtatccttcctcccatcctttaatctgttcattgctttgggggaggtggggcagctggctcacacgttggagtttgttctttgatggatgaacgaacactccagttttctttcccgtgaaggttgtttcagccacaaaccacttcattttgctgtttcaatttcaaaataaaaggaaacttatattgaaagacaa

SEQ ID NO: 26561 - protein, 63 aa, Homo sapiens
MYFDECKLGRAGGLLLGTVFFFFFFLNMSASLFCNCGNFENCILLEICQPSPPDFDCILPPIL

SEQ ID NO: 26562 - DNA, 1573 bp, Homo sapiens
tgccacaaaaggtttgtccttggggaacaggcaggcctgccaggatcccccccatatcgattgggctgggagggctggccatgaggtccccactttctgctttccttgcccatgtgtcacccctttggcctccagcttgtccctctctcactttctatagctttgttggaccagatggtgaggaaaggaatggcctcttcccttctagagggggctggctggagtgagacctggggcttggcctggaacccaccacacagccccaaagtcaggaagcctggggaaaccagagctgagacctcttcaacagggtttctttgagatcctacacctccattgggccctttttcagtcttcaatgggggcccagttggctctagaaggagaagaggtgaagcaggatcctttgccctgggggagtctgagggcgcggtccttggactcattcaggccgtctttgtagttgggggagttccactgggcgatcccagcccctccccacccaccctctaatggacctcctcatagaagccccatttcacttttgttttatctacctcttagcaaaacaatagataaattaggtagtggcagctccacttgcttaggttagggggggaaaaagatttctttttccaaaggaaaaaaatattaccttgagaatactttccaaaaaataaaattaaaaaaaaaaaaaccaaaaaaaaaaatttttttttaaaagggagacattttccagtgaccactggattgttttaatttcccaagcttttttttcccccataaataagtttcactctttggcgattttcttcacttgtttaagataacgtgctagctattccaacaggtaacagctttcacagtctgcccctggcctgtctcaccccatcccccaccctattcctgccagtgagtccttcctgtgcttctctcccttctcccctcccagccagctgacttcagtcacccctgtcccccctcccctgccaataagctcccccaggaataaaggctttgttttggggatgcttaaattatgtgttaccataatgaataaacgtcctctatcaccatttggagtctcccttttctccaggatcttgatcctggtccccaaaaccagagtgaatcaaaagagcttcctcccctgaggcaaagtggatttgtaagcagttctgaaacatcacttactcagaagagggaacgatgtattttgatgagtgcaaattgggaagagctggaggcctactgcttgggacagttttttttttttttttttttttaaatatgagtgctagcttattctgtaattgcggcaactttgaaaattgtattttactggaaatctgccagccatcaccacccgattttgattgtatccttcctcccatcctttaatctgttcattgctttgggggaggtggggcagctggctcacacgttggagtttgttctttgatggatgaacgaacactccagttttctttcccgtgaaggttgtttcagccacaaaccacttcattttgctgtttcaatttcaaaataaaaggaaacttatattgaaagacaa

SEQ ID NO: 26563 - protein, 41 aa, Homo sapiens
MLKLCVTIMNKRPLSPFGVSLFSRILILVPKTRVNQKSFLP

SEQ ID NO: 26564 - DNA, 402 bp, Homo sapiens
tgcctgcttgttctcaagggcattattgtgtattttaggttttcatttgttgacctaaaaggaagaagctcaggtaaaattaatataagtagagagtgtatttgggccaagactgaggattgcaacctgggagcataaattcaagttgtcctgaatatatatgctccatctagcaacagttacaagtagcgttttttggtttgtttgtttgtttgtttgtttgtttgttttttttttgagaggggacactgtctaaaaaaaaaagaaaaaagaaaaaatatctgacaattttctgcaggtaaaatatgtttttgcctaaaatgaagctgaagatatatgcacatatttattgttattttatacaatttgtacttctatgaataaagtcagacattcacttgc

SEQ ID NO: 26565 - protein, 31 aa, Homo sapiens [sequence omitted]

SEQ ID NO: 26566 - DNA, 1906 bp, Homo sapiens
ataggtggctgcagaggcgaggtgacggcgcgtgcggaacgaactctgcacccccaggaatggggagcgctggcttttccgtgggaaaattccacgtggaagtggcctctcgcggccgggaatgtgtctcggggacgcccgagtgtgggaatcggctcgggagtgcgggcttcggggctctctgcttggaactcagaggcgctgacccagcctggggcccgtttgctgcccacgggaggagccgccgtcagggctcgagatttctgtggctcctcaagatattggtcataatcctggtacttggcattgttggatttatgttcggaagcatgttccttcaagcagtgttcagcagccccaagccagaactcccaagtcctgccccgggtgtccagaagctgaagcttctgcctgaggaacgtctcaggaacctcttttcctacgatggaatctggctgttcccgaaaaatcagtgcaaatgtgaagccaacaaagagcagggaggttacaactttcaggatgcctatggccagagcgacctcccagcggtgaaagcgaggagacaggctgaatttgaacactttcagaggagagaagggctgccccgcccactgcccctgctggtccagcccaacctcccctttgggtacccagtccacggagtggaggtgatgcccctgcacacggttcccatcccaggcctccagtttgaaggacccgatgcccccgtctatgaggtcaccctgacagcttctctggggacactgaacacccttgctgatgtcccagacagtgtggtgcagggcagaggccagaagcagctgatcatttctaccagtgaccggaagctgttgaagttcattcttcagcacgtgacatacaccagcacggggtaccagcaccagaaggtagacatagtgagtctggagtccaggtcctcagtggccaagtttccagtgaccatccgccatcctgtcatacccaagctatacgaccctggaccagagaggaagctcagaaacctggttaccattgctaccaagactttcctccgcccccacaagctcatgatcatgctccggagtattcgagagtattacccagacttgaccgtaatagtggctgatgacagccagaagcccctggaaattaaagacaatcacgtggagtattacactatgccctttgggaagggttggtttgctggtaggaacctggccatatctcaggtcaccaccaaatacgttctctgggtggacgatgattttctcttcaacgaggagaccaagattgaggtgctggtggatgtcctggagaaaacagaactggacgtggtaggcggcagtgtgctgggaaatgtgttccagtttaagttgttgctggaacagagtgagaatggggcctgccttcacaagaggatgggatttttccaacccctggatggcttccccagctgcgtggtgaccagtggcgtggtcaacttcttcctggcccacacggagcgactccaaagagttggctttgatccccgcctgcaacgagtggctcactcagaattcttcattgatgggctagggaccctactcgtggggtcatgcccagaagtgattataggtcaccagtctcggtctccagtggtggactcagaactggctgccctagagaagacctacaatacataccggtccaacaccctcacccgggtccagttcaagctggccctccactacttcaagaaccatctccaatgtgccgcataaaggtgtgagggcataggagaaacactaggctggctggttatggtatctatagcaggccaccaaaaactggactcctgataggtgaacgttgtaccaaaccagctggtgggtagggaaaagggaaatggctcagttactggaagtac

SEQ ID NO: 26567 - protein, 566 aa, Homo sapiens
MGSAGFSVGKFHVEVASRGRECVSGTPECGNRLGSAGFGALCLELRGADPAWGPFAAHGRSRRQGSRFLWLLKILVIILVLGIVGFMFGSMFLQAVFSSPKPELPSPAPGVQKLKLLPEERLRNLFSYDGIWLFPKNQCKCEANKEQGGYNFQDAYGQSDLPAVKARRQAEFEHFQRREGLPRPLPLLVQPNLPFGYPVHGVEVMPLHTVPIPGLQFEGPDAPVYEVTLTASLGTLNTLADVPDSVVQGRGQKQLIISTSDRKLLKFILQHVTYTSTGYQHQKVDIVSLESRSSVAKFPVTIRHPVIPKLYDPGPERKLRNLVTIATKTFLRPHKLMIMLRSIREYYPDLTVIVADDSQKPLEIKDNHVEYYTMPFGKGWFAGRNLAISQVTTKYVLWVDDDFLFNEETKIEVLVDVLEKTELDVVGGSVLGNVFQFKLLLEQSENGACLHKRMGFFQPLDGFPSCVVTSGVVNFFLAHTERLQRVGFDPRLQRVAHSEFFIDGLGTLLVGSCPEVIIGHQSRSPVVDSELAALEKTYNTYRSNTLTRVQFKLALHYFKNHLQCAA

SEQ ID NO: 26568 - DNA, 536 bp, Homo sapiens
ctgatgaagaactaggaggctcaaacactatcttacctgagtccaggacaagtgacttggagagtgtgctcttctgtggcaggatcaggtctgtctagggcaggatggcccaggatctcagcgagaaggacctgttgaagatggaggtggagcagctgaagaaagaagtgaaaaacacaagaattccgatttccaaagcgggaaaggaaatcaaggagtacgtggaggcccaagcaggaaacgatccttttctcaaaggcatccctgaggacaagaatcccttcaaggagaaaggacccacatttaacgccttacttcttttgctgggaagagcttcttggttggagctaacctggtctaggacaccgtagctgcctagaagacatcacatgaatccatagatggtggtgttggcagggaatacaaactcaattcctgaataagtgcctattccagtgaggacaattctgtgtcccttccattgacctgccaccagagaactggatggttgccttgaggtctggtactgtatgagg

SEQ ID NO: 26569 - protein, 88 aa, Homo sapiens
MAQDLSEKDLLKMEVEQLKKEVKNTRIPISKAGKEIKEYVEAQAGNDPFLKGIPEDKNPFKEKGPTFNALLLLLGRASWLELTWSRTP

SEQ ID NO: 26570 - DNA, 1127 bp, Homo sapiens
ggcgaagcggggtaagtggggctgcagggtggaggtggagaaatagaagcgctgcgggctctaagctagtgaggtcaccaaaagtgtgaggctaacgcaaggcaaggtggtgaaaaggtggcttctgttttcgcgtttgtttttgtggggagaatgtctgtctctctgctctgctgtagtgagggcttgaaggctcaagcgggtgatgggcttagaactttgagcctatgatcagcttaggcatcagagattttggtttccaggccatctgctttatctgaagattttcagctgatgaagaactaggaggctcaaacactatcttacctgagtccaggacaagtgacttggagagtgtgctcttctgtggcaggatcaggtctgtctagggcaggatggcccaggatctcagcgagaaggacctgttgaagatggaggtggagcagctgaagaaagaagtgaaaaacacaagaattccgatttccaaagcgggaaaggaaatcaaggagtacgtggaggcccaagcaggaaacgatccttttctcaaaggcatccctgaggacaagaatcccttcaaggagaaaggtggctgtctgataagctgatggcatggagccctgccctgagtgtctgtccctcttcagccaagcccaagtctcctagacccccagggagccagtgaactgtcaccttctcttcatcacagaatgagtaaagatccctgaacaaatgcattgtgaacccattccccactcccaccttcaactcttttctcccattatttcctccacctgctgggtctctgctgaccttgctgggaacactctgaggacagtgtggctggccgagcggttggccccatgggtggtggggtgtgagaagcctgcaataccccaagaccccagagggcagtccttaggaagcacttacaccacctgggaacccctccgtcttttccctctactctcatcctaggaataaagcatttccacgccagagtagtttgggctgggggccagggttgggtggtcctgtccctccatatcatgtcctaccctatggtcctgttcctagtcatttagatcaccccagatggcctgatgacaacaagagtttgtgaagttatg

SEQ ID NO: 26571 - protein, 69 aa, Homo sapiens; identical to SEQ ID NO: 3545

SEQ ID NO: 26572 - DNA, 1043 bp, Homo sapiens
tggatgaagagtgagctaggagaacttcgtaaggtgaaactgtggggatccaatgggcaacacaaagcatcttggttaaggaggttaggggccggtctaggacttgcctcaggaggaaggacagcctcagagcatgctcagaggtgggaagggaaggaggagaaagcaggcgaagcggggccatctgctttatctgaagattttcagctgatgaagaactaggaggctcaaacactatcttacctgagtccaggacaagtgacttggagagtgtgctcttctgtggcaggatcaggtctgtctagggcaggatggcccaggatctcagcgagaaggacctgttgaagatggaggtggagcagctgaagaaagaagtgaaaaacacaagaattccgatttccaaagcgggaaaggaaatcaaggagtacgtggaggcccaagcaggaaacgatccttttctcaaaggcatccctgaggacaagaatcccttcaaggagaaaggtggctgtctgataagctgatggcatggagccctgccctgagtgtctgtccctcttcagccaagcccaagtctcctagacccccagggagccagtgaactgtcaccttctcttcatcacagaatgagtaaagatccctgaacaaatgcattgtgaacccattccccactcccaccttcaactcttttctcccattatttcctccacctgctgggtctctgctgaccttgctgggaacactctgaggacagtgtggctggccgagcggttggccccatgggtggtggggtgtgagaagcctgcaataccccaagaccccagagggcagtccttaggaagcacttacaccacctgggaacccctccgtcttttccctctactctcatcctaggaataaagcatttccacgccagagtagtttgggctgggggccagggttgggtggtcctgtccctccatatcatgtcctaccctatggtcctgttcctagtcatttagatcaccccagatggcctgatgacaacaagagtttgtgaagttatg

SEQ ID NO: 26573 - protein, 72 aa, Homo sapiens
MKSELGELRKVKLWGSNGQHKASWLRRLGAGLGLASGGRTASEHAQRWEGKEEKAGEAGPSALSEDFQLMKN

SEQ ID NO: 26574 - DNA, 907 bp, Homo sapiens
attgaatgagtggatgaagagtgagctaggagaacttcgtaaggccatctgctttatctgaagattttcagctgatgaagaactaggaggctcaaacactatcttacctgagtccaggacaagtgacttggagagtgtgctcttctgtggcaggatcaggtctgtctagggcaggatggcccaggatctcagcgagaaggacctgttgaagatggaggtggagcagctgaagaaagaagtgaaaaacacaagaattccgatttccaaagcgggaaaggaaatcaaggagtacgtggaggcccaagcaggaaacgatccttttctcaaaggcatccctgaggacaagaatcccttcaaggagaaaggtggctgtctgataagctgatggcatggagccctgccctgagtgtctgtccctcttcagccaagcccaagtctcctagacccccagggagccagtgaactgtcaccttctcttcatcacagaatgagtaaagatccctgaacaaatgcattgtgaacccattccccactcccaccttcaactcttttctcccattatttcctccacctgctgggtctctgctgaccttgctgggaacactctgaggacagtgtggctggccgagcggttggccccatgggtggtggggtgtgagaagcctgcaataccccaagaccccagagggcagtccttaggaagcacttacaccacctgggaacccctccgtcttttccctctactctcatcctaggaataaagcatttccacgccagagtagtttgggctgggggccagggttgggtggtcctgtccctccatatcatgtcctaccctatggtcctgttcctagtcatttagatcaccccagatggcctgatgacaacaagagtttgtgaagttatg

SEQ ID NO: 26575 - protein, 69 aa, Homo sapiens; identical to SEQ ID NO: 3545

SEQ ID NO: 26576 - DNA, 645 bp, Homo sapiens
tgaagagtgagctaggagaacttcgtaaggtgaaactgtggggatccaatgggcaacacaaagcatcttggttaaggaggttaggggccggtctaggacttgcctcaggaggaaggacagcctcagagcatgctcagaggtgggaagggaaggaggagaaagcaggcgaagcggggccatctgctttatctgaagattttcagctgatgaagaactaggaggctcaaacactatcttacctgagtccaggacaagtgacttggagagtgtgctcttctgtggcaggatcaggtctgtctagggcaggatggcccaggatctcagcgagaaggacctgttgaagatggaggtggagcagctgaagaaagaagtgaaaaacacaagaattccgatttccaaagcgggaaaggaaatcaaggagtacgtggaggcccaagcaggaaacgatccttttctcaaaggcatccctgaggacaagaatcccttcaaggagaaaggtggctgtctgataagctgatggcatggagccctgccctgagtgtctgtccctcttcagccaagcccaagtctcctagacccccagggagccagtgaactgtcaccttctcttcatcacagaatgagtaaagatccctgaacaaatgc

SEQ ID NO: 26577 - protein, 69 aa, Homo sapiens; identical to SEQ ID NO: 3545

SEQ ID NO: 26578 - DNA, 2110 bp, Homo sapiens
tcctatccaccctccactcccctgtcccttggtgactcatccctgagcttcccaaggaagcccccaccctctgccctttcctcccgccttccatgagtggaaaatccacctccgccccctatagcaggccagcccccttcctccccagtctccgaccccatcccccagccgaccagtttcctctccaggaccagggagcaatcacagctgccccgaccttggcttcctctgctgggtgggattgggggctgggcccccaaatgggcccctggcttcccccttcctctgggcaggggacagagagacacaggctcggggagcaggactgacttcctcttgtcccggaatgagcatgcctgccctttgcaagcaggtttgggtctcacgcagaggaaaccaaaagcaataagagggagggaaggcagagcaaccaatcaagggcagggtgagactcaaaacgagcgggctccctggggagccagacagaggctgggggtgatggcggagctacagcagctgcaggagtttgagatccccactggccgggaggctctgaggggcaaccacagtgccctgctgcgggtcgctgactactgcgaggacaactatgtgcaggccacagacaagcggaaggcgctggaggagaccatggccttcactacccaggcactggccagcgtggcctaccaggtgggcaacctggccgggcacactctgcgcatgttggacctgcagggggccgccctgcggcaggtggaagcccgtgtaagcacgctgggccagatggtgaacatgcatatggagaaggtggcccgaagggagatcggcaccttagccactgtccagcggctgccccccggccagaaggtcatcgccccagagaacctaccccctctcacgccctactgcaggagacccctcaactttggctgcctggacgacattggccatgggatcaaggacctcagcacgcagctgtcaagaacaggcaccctgtctcgaaagagcatcaaggcccctgccacacccgcctccgccaccttggggagaccaccccggattcccgagccagtgcacctgccggtggtgcccgacggcagactctccgccgcctcctctgcgttttccctggcctcggccggcagcgccgaaggtgtcggtggggcccccacgcccaaggggcaggcagcacctccagccccacctctccccagctccttggacccacctcctccaccagcagccgtcgaggtgttccagcggcctcccacgctggaggagttgtccccacccccaccggacgaagagctgcccctgccactggacctgcctcctcctccacccctggatggagatgaattggggctgcctccacccccaccaggatttgggcctgatgagcccagctgggtgcctgcctcatacttggagaaagtggtgacactgtacccatacaccagccagaaggacaatgagctctccttctctgagggcactgtcatctgtgtcactcgccgctactccgatggctggtgcgagggcgtcagctcagaggggactggattcttccctgggaactatgtggagcccagctgctgacagcccagggctctctgggcagctgatgtctgcactgagtgggtttcatgagccccaagccaaaaccagctccagtcacagctggactgggtctgcccacctcttgggctgtgagctgtgttctgtccttcctcccatcggagggagaaggggtcctggggagagagaatttatccagaggcctgctgcagatggggaagagctggaaaccaagaagtttgtcaacagaggacccctactccatgcaggacagggtctcctgctgcaagtcccaactttgaataaaacagatgatgtcctgtgactgccccacagagataaggggccaggagggattgaaaggcatcccagttctaaggctgctgctaattacagcccccaacctccaacccaccagctgacctagaagcagcatcttcccatttcctcagtacccacaaagtgcagcccacattggaccccagacacccctctgcagccattgactgcaacttgttcttttgcccattgc

SEQ ID NO: 26579 - protein, 366 aa, Homo sapiens
MAELQQLQEFEIPTGREALRGNHSALLRVADYCEDNYVQATDKRKALEETMAFTTQALASVAYQVGNLAGHTLRMLDLQGAALRQVEARVSTLGQMVNMHMEKVARREIGTLATVQRLPPGQKVIAPENLPPLTPYCRRPLNFGCLDDIGHGIKDLSTQLSRTGTLSRKSIKAPATPASATLGRPPRIPEPVHLPVVPDGRLSAASSAFSLASAGSAEGVGGAPTPKGQAAPPAPPLPSSLDPPPPPAAVEVFQRPPTLEELSPPPPDEELPLPLDLPPPPPLDGDELGLPPPPPGFGPDEPSWVPASYLEKVVTLYPYTSQKDNELSFSEGTVICVTRRYSDGWCEGVSSEGTGFFPGNYVEPSC

SEQ ID NO: 26580 - DNA, 1708 bp, Homo sapiens
ccagggagcaatcacagctgccccgaccttggcttcctctgctgggtgggattgggggctgggcccccaaatgggcccctggcttcccccttcctctgggcaggggacagagagacacaggctcggggagcaggactgacttcctcttgtcccggaatgagcatgcctgccctttgcaagcaggtttgggtctcacgcagaggaaaccaaaagcaataagagggagggaaggcagagcaaccaatcaagggcagggtgagactcaaaacgagcgggctccctggggagccagacagaggctgggggtgatggcggagctacagcagctgcaggagtttgagatccccactggccgggaggctctgaggggcaaccacagtgccctgctgcgggtcgctgactactgcgaggacaactatgtgcaggccacagacaagcggaaggcgctggaggagaccatggccttcactacccaggcactggccagcgtggcctaccaggtgggcaacctggccgggcacactctgcgcatgttggacctgcagggggccgccctgcggcaggtggaagcccgtgtaagcacgctgggccagatggtgaacatgcatatggagaaggtggcccgaagggagatcggcaccttagccactgtccagcggctgccccccggccagaaggtcatcgccccagagaacctaccccctctcacgccctactgcaggagacccctcaactttggctgcctggacgacattggccatgggatcaaggacctcagcacgcagctgtcaagaacaggcaccctgtctcgaaagagcatcaaggcccctgccacacccgcctccgccaccttggggagaccaccccggattcccgagccagtgcacctgccggtggtgcccgacggcagactctccgccgcctcctctgcgttttccctggcctcggccggcagcgccgaaggtgtcggtggggcccccacgcccaaggggcaggcagcacctccagccccacctctccccagctccttggacccacctcctccaccagcagccgtcgaggtgttccagcggcctcccacgctggaggagttgtccccacccccaccggacgaagagctgcccctgccactggacctgcctcctcctccacccctggatggagatgaattggggctgcctccacccccaccaggatttgggcctgatgagcccagctgggtgcctgcctcatacttggagaaagtggtgacactgtacccatacaccagccagaaggacaatgagctctccttctctgagggcactgtcatctgtgtcactcgccgctactccgatggctggtgcgagggcgtcagctcagaggggactggattcttccctgggaactatgtggagcccagctgctgacagcccagggctctctgggcagctgatgtctgcactgagtgggtttcatgagccccaagccaaaaccagctccagtcacagctggactgggtctgcccacctcttgggctgtgagctgtgttctgtccttcctcccatcggagggagaaggggtcctggggagagagaatttatccagaggcctgctgcagatggggaagagctggaaaccaagaagtttgtcaacagaggacccctactccatgcaggacagggtctcctgctgcaagtcccaactttgaataaaacagatgatgtcc

SEQ ID NO: 26581 - protein, 366 aa, Homo sapiens; identical to SEQ ID NO: 26579

SEQ ID NO: 26582 - DNA, 1817 bp, Homo sapiens
gggaagaaacccaagatgcctgactttctgccttggagactgaaagaaacaagggcaactcaccaaacagtgtgacgacggctggaggccaacagagtccctacaggtggtgctcacggtaatgcaccgacaatgagtggctgttttccagtttctggcctccgctgcctatctagggacggcaggatggccgcgcagggcgcgccgcgcttcctcctgaccttcgacttcgacgagactatcgtggacgaaaacagcgacgattcgatcgtgcgcgccgcgccgggccagcggctcccggagagcctgcgagccacctaccgcgagggcttctacaacgagtacatgcagcgcgtcttcaagtacctgggcgagcagggcgtgcggccgcgggacctgagcgccatctacgaagccatccctttgtcgccaggcatgagcgacctgctgcagtttgtggcaaaacagggcgcctgcttcgaggtgattctcatctccgatgccaacacctttggcgtggagagctcgctgcgcgccgccggccaccacagcctgttccgccgcatcctcagcaacccgtcggggccggatgcgcggggactgctggctctgcggccgttccacacacacagctgcgcgcgctgccccgccaacatgtgcaagcacaaggtgctcagcgactacctgcgcgagcgggcccacgacggcgtgcacttcgagcgcctcttctacgtgggcgacggcgccaacgacttctgccccatggggctgctggcgggcggcgacgtggccttcccgcgccgcggctaccccatgcaccgcctcattcaggaggcccagaaggccgagcccagctcgttccgcgccagcgtggtgccctgggaaacggctgcagatgtgcgcctccacctgcaacaggtgctgaagtcgtgctgagtctggccgcctgcaggggggtacccgggccaacggcggagggggcggggaagggagattcggcaaagacagctttactactcccttttccctttggctttgttatgtccctctgggaatttctggaatctcgtatttgggggcttggggaagggggctcagagccgtccctatctattcagttaacccacctcggctgcctcccccactccactgtgcacggttgagttctggagtctgacccatcgcggggtggcgcgcaaaccttggaaggcagcagtatttcctggtcctcccaactgggaggaaggggcccccccggcaggtgagagaaggaacatctcccgccgctgtaacttgttgcctcgggctgcgtgaccgcccctcctccagtctactgtggagggaacccaggatcctgaaattctcctggccgcaagaactccccacagaggcagaagagggtctccacctatggccccaggcctttgcgatcttgcttcacccaccgcgaccccacactatttctgtgctgtccacactctcttgcctcccgacccccgcactcccttctagcacccccaaaggaaaagccagaggaacaatcgcctcctggtggtggtacgaggtagcgcaccgtccggctcgggtccggacagccagtaacctcgcagagagtgacggtgtctccttgcatcccagcctcgtctatgcagcaagagaccagggacttcaccaaagtcaccctcgcgggctgggccttccacgcatcccccccaccccccatggaacagaaagccatgtttttaagcagaaccagcgaaacccaagcccctccttcctctggtgttttacaactataaaggaggtgaagggggaag

SEQ ID NO: 26583 - protein, 267 aa, Homo sapiens; identical to SEQ ID NO: 3549

SEQ ID NO: 26584 - DNA, 2051 bp, Homo sapiens
gcggctccggctccggctccggctcccgggcatttaaaggggacgcggcggctgcccgggggggatgaggggcaagtggaggggacggctcagacgcacatcatcctcagtccctcgggactggagggactcgtgagccggagcccagaaatccgggggtggataagacaccgcgtcccctccaattcccgtaagcaccccttgctccatcctgcgccccaatacctcagctagcccccttccccacttcttacactccaaactcagccgggacagacctctgctgccgccgcccccacgaacgtgtgacgacggctggaggccaacagagtccctacaggtggtgctcacggtaatgcaccgacaatgagtggctgttttccagtttctggcctccgctgcctatctagggacggcaggatggccgcgcagggcgcgccgcgcttcctcctgaccttcgacttcgacgagactatcgtggacgaaaacagcgacgattcgatcgtgcgcgccgcgccgggccagcggctcccggagagcctgcgagccacctaccgcgagggcttctacaacgagtacatgcagcgcgtcttcaagtacctgggcgagcagggcgtgcggccgcgggacctgagcgccatctacgaagccatccctttgtcgccaggcatgagcgacctgctgcagtttgtggcaaaacagggcgcctgcttcgaggtgattctcatctccgatgccaacacctttggcgtggagagctcgctgcgcgccgccggccaccacagcctgttccgccgcatcctcagcaacccgtcggggccggatgcgcggggactgctggctctgcggccgttccacacacacagctgcgcgcgctgccccgccaacatgtgcaagcacaaggtgctcagcgactacctgcgcgagcgggcccacgacggcgtgcacttcgagcgcctcttctacgtgggcgacggcgccaacgacttctgccccatggggctgctggcgggcggcgacgtggccttcccgcgccgcggctaccccatgcaccgcctcattcaggaggcccagaaggccgagcccagctcgttccgcgccagcgtggtgccctgggaaacggctgcagatgtgcgcctccacctgcaacaggtgctgaagtcgtgctgagtctggccgcctgcaggggggtacccgggccaacggcggagggggcggggaagggagattcggcaaagacagctttactactcccttttccctttggctttgttatgtccctctgggaatttctggaatctcgtatttgggggcttggggaagggggctcagagccgtccctatctattcagttaacccacctcggctgcctcccccactccactgtgcacggttgagttctggagtctgacccatcgcggggtggcgcgcaaaccttggaaggcagcagtatttcctggtcctcccaactgggaggaaggggcccccccggcaggtgagagaaggaacatctcccgccgctgtaacttgttgcctcgggctgcgtgaccgcccctcctccagtctactgtggagggaacccaggatcctgaaattctcctggccgcaagaactccccacagaggcagaagagggtctccacctatggccccaggcctttgcgatcttgcttcacccaccgcgaccccacactatttctgtgctgtccacactctcttgcctcccgacccccgcactcccttctagcacccccaaaggaaaagccagaggaacaatcgcctcctggtggtggtacgaggtagcgcaccgtccggctcgggtccggacagccagtaacctcgcagagagtgacggtgtctccttgcatcccagcctcgtctatgcagcaagagaccagggacttcaccaaagtcaccctcgcgggctgggccttccacgcatcccccccaccccccatggaacagaaagccatgtttttaagcagaaccagcgaaacccaagcccctccttcctctggtgttttacaactataaaggaggtgaagggggaag

SEQ ID NO: 26585 - protein, 267 aa, Homo sapiens; identical to SEQ ID NO: 3549

SEQ ID NO: 26586 - DNA, 426 bp, Homo sapiens
cagagtccctacaggtggtgctcacggtaatgcaccgacaatgagtggctgttttccagtttctggcctccgctgcctatctagggtgttggatgtgccagcgcctctggccgtggcccgctaaccagcctctcccgggcgggctcctgccgcgccccctctcgcttgccccctcctcctcctcctcctgctgctctcccccctgctcccaggacggcaggatggccgcgcagggcgcgccgcgcttcctcctgaccttcgacttcgacgagactatcgtggacgaaaacagcgacgattcgatcgtgcgcgccgcgccgggccagcggctcccggagagcctgcgagccacctaccgcgagggcttctacaacgagtacatgcagcgcgtcttcaagtacctgggcgagcagggcgtgcggccgc

SEQ ID NO: 26587 - protein, 110 aa, Homo sapiens
MCQRLWPWPANQPLPGGLLPRPLSLAPSSSSSCCSPPCSQDGRMAAQGAPRFLLTFDFDETIVDENSDDSIVRAAPGQRLPESLRATYREGFYNEYMQRVFKYLGEQGVR

SEQ ID NO: 26588 - DNA, 733 bp, Homo sapiens
cggctcccgggcatttaaaggggacgcggcggctgcccgggggggatgaggggcaagtggaggggacggctcagacgcacatcatcctcagtccctcgggactggagggactcgtgagccggagcccagaaatccgggggtggataagacaccgcgtcccctccaattcccgtaagcaccccttgctccatcctgcgccccaatacctcagctagcccccttccccacttcttacactccaaactcagccgggacagacctctgctgccgccgcccccacgaacgtgtgacgacggctggaggccaacagagtccctacaggtggtgctcacggtaatgcaccgacaatgagtggctgttttccagtttctggcctccgctgcctatctagggtgttggatgtgccagcgcctctggccgtggcccgctaaccagcctctcccgggcgggctcctgccgcgccccctctcgcttgccccctcctcctcctcctcctgctgctctcccccctgctcccaggacggcaggatggccgcgcagggcgcgccgcgcttcctcctgaccttcgacttcgacgagactatcgtggacgaaaacagcgacgattcgatcgtgcgcgccgcgccgggccagcggctcccggagagcctgcgagccacctaccgcgagggcttctacaacgagtacatgcagcgcgtcttcaagtacctgggcgagcagggcgtgcggccgc

SEQ ID NO: 26589 - protein, 110 aa, Homo sapiens; identical to SEQ ID NO: 26587

SEQ ID NO: 26590 - DNA, 516 bp, Homo sapiens
gcggctccggctccggctccggctcccgggcatttaaaggggacgcggcggctgcccgggggggatgaggggcaagtggaggggacggctcagacgcacatcatcctcagtccctcgggactggagggactcgtgagccggagcccagaaatccgggggtggataagacaccgcgtcccctccaattcccgaacgtgtgacgacggctggaggccaacagagtccctacaggtggtgctcacggtaatgcaccgacaatgagtggctgttttccagtttctggcctccgctgcctatctagggacggcaggatggccgcgcagggcgcgccgcgcttcctcctgaccttcgacttcgacgagactatcgtggacgaaaacagcgacgattcgatcgtgcgcgccgcgccgggccagcggctcccggagagcctgcgagccacctaccgcgagggcttctacaacgagtacatgcagcgcgtcttcaagtacctgggcgagcagggcgtgcggccgc

SEQ ID NO: 26591 - protein, 85 aa, Homo sapiens
MSGCFPVSGLRCLSRDGRMAAQGAPRFLLTFDFDETIVDENSDDSIVRAAPGQRLPESLRATYREGFYNEYMQRVFKYLGEQGVR

SEQ ID NO: 26592 - DNA, 845 bp, Homo sapiens
ggcatttaaaggggacgcggcggctgcccgggggggatgaggggcaagtggaggggacggctcagacgcacatcatcctcagtccctcgggactggagggactcgtgagccggagcccagaaatccgggggtggataagacaccgcgtcccctccaattcccgtaagcaccccttgctccatcctgcgccccaatacctcagctagcccccttccccacttcttacactccaaactcagccgggacagacctctgctgccgccgcccccacgaacgtgtgacgacggctggaggccaacagagtccctacaggtggtgctcacggtaatgcaccgacaatgagtggctgttttccagtttctggcctccgctgcctatctagggtgtgtcatggcctggtgcgggaggctcttacctccccaagccccactgcttctcctgctgcccgcttgcttcggactctggcagaaaccccacctgctgacacgttcctcctggggaattggtgttggatgtgccagcgcctctggccgtggcccgctaaccagcctctcccgggcgggctcctgccgcgccccctctcgcttgccccctcctcctcctcctcctgctgctctcccccctgctcccaggacggcaggatggccgcgcagggcgcgccgcgcttcctcctgaccttcgacttcgacgagactatcgtggacgaaaacagcgacgattcgatcgtgcgcgccgcgccgggccagcggctcccggagagcctgcgagccacctaccgcgagggcttctacaacgagtacatgcagcgcgtcttcaagtacctgggcgagcagggcgtgcggccg

SEQ ID NO: 26593 - protein, 168 aa, Homo sapiens
MSGCFPVSGLRCLSRVCHGLVREALTSPSPTASPAARLLRTLAETPPADTFLLGNWCWMCQRLWPWPANQPLPGGLLPRPLSLAPSSSSSCCSPPCSQDGRMAAQGAPRFLLTFDFDETIVDENSDDSIVRAAPGQRLPESLRATYREGFYNEYMQRVFKYLGEQGVR

SEQ ID NO: 26594 - DNA, 2317 bp, Homo sapiens
agttaggtgaagaggagaacgatgtccaggcaggggccggggaagctcgtgccaaggcactgaggggaagtgctgcaatgaacctcagaggctggatcttgctgactcatctggggtaccaaggacagacaaaggacatggagtccaggcccaggaggcgataccaggccagcagtttcactgatgctcctgtcatgacgatgactgcctccctcctccccttggtccctgactcagtgtctgcagtgaccaggcaccaggcagggagcaaggaaccaagcctttcacctgctcccaccaactcctatggtgctccctttccaaggctaggtctcctctccacccagttccttatcacgtaccatgagaagctgtcaccttggcaactgtcaccttctggtgagatttacaattgcactgctacaactgcttgtggcatggtaaagttgcaccaggacctctgctgtccatgagatcaaagttccaggccaaggcaccaggggcacgaacagtgttgcccgcatggaactcacacttaatgggagcggcagccaacagagtcttgctgtgtcacccaggccggagtgcactagcacaatctcagctcattgcaacctccatctcccaggttcaagtgattctcctgcctcagcctcccgagtagctgggattacaggcctgtgccactatgctaattttttttttttgtattattagtagagacagggtttcaccatgttagccaggccggtcttgaacttctgacctcaagtgatctgcccacctcggcctcccaaagtgctgggattacaggtgtgagccaccgctcctggctgaggccacctcttttcttggggacacttgggctccagctttctccattcatcagcttagcatgagcttgaggaacgcagaggggggctgactgagaggagcaggcactggggacaatggggacatccacggttcctagcaatggatttgaggtgggatttccaattcctcttctcccaccttggatttgaccatctgaataccaaattcctgtcacttctaggatgtcacctaagatgagactgtggtctttccactcttgggtcccaaggaggtgccacagggcctacaataaggcaaggaaggctcagtgaggtccgtgttcaccccacccccacttcaacacgaggagttctgcttttattttgcctctgtgtgtgtgtgtgtgtgtgtgtgtttctaggtattattttatttggagaaaggatttgctcctaaggacacacacacgcacacacacatgcacactcacgcacacgtactcacaggttctgcaaaacactagtgtggcagaaagtgttgaaaactagttctagacctggcatgaatttgaccaggttcagccttagtctcctctcttagaaataaggtcatctgggccaggtgcggtggctcaagcctgtaatcccagcactttgggaggccgaggtgggcggatcacgagatcaggacctcaagaccagcctgaccaacatggtgaaaccccgtctctactaaaaatacaaaaattagccaggcatggtggcacgtgcctataatcccagctagtctggagggtgaggcaggagaatcgctggaacctgggaggcagaggttgcggcgagccgagatcatgtgaggaaataaggccatctggaaatatccttcccatcacaggatgatacccggcaaattcttcaaagcagtgttctccaacttgaatgtttgtgatgtgggcgattctgactgagggggtctgtagaccacatcttgataaacaatgctttttaaaaaattcctagaagagaatatttgatttctggaaggatagagaagaaactaataagagtgtttacctccgaggaggaggagaattgggaagctgagagcagaggagggaggaagacttacttttcaccgtgttcttttttgtaccttttgagttttgtacgacatactgaatctttgacccatttgcaattataaataaaggcacatttatttggccgggcgcggtggctcatgcctgtaatcccagcactttgggaggacgaggtgggtggatcacctaaggtcaggagttagtgaccagcctggccaacatggtgaaacctcgctctactaaaacacaaaaattagccagatgtggtggcaggcacctgtaatcccagctactcagaaggctgaggcaggagaatcgcttgaacctgggaggcagaggttgcagtgagctgagatcgcacgactgcactccagcctgggcaacagagtgagactctgtctc

SEQ ID NO: 26595 - protein, 64 aa, Homo sapiens
MELTLNGSGSQQSLAVSPRPECTSTISAHCNLHLPGSSDSPASASRVAGITGLCHYANFFFLYY

SEQ ID NO: 26596 - DNA, 721 bp, Homo sapiens
agttaggtgaagaggagaacgatgtccaggcaggggccggggaagctcgtgccaaggcactgaggggaagtgctgcaatgaacctcagaggctggatcttgctgactcatctggggtaccaaggacagacaaaggacatggagtccaggcccaggaggcgataccaggccagcagtttcactgatgctcctgtcatgacgatgactgcctccctcctccccttggtccctgactcagtgtctgcagtgaccaggcaccaggcagggagcaaggaaccaagcctttcacctgctcccaccaactcctatggtgctccctttccaaggctaggtctcctctccacccagttccttatcacgtaccatgagaagctgtcaccttggcaactgtcaccttctggtgagatttacaattgcactgctacaactgcttgtggcatggtaaagttgcaccaggacctctgctgtccatgagatcaaagttccaggccaagagacgggtctcactatgttgcccaggctggtctcaagttcctggattcaatgttcttgccttggcttctcaaagtaccaggattataggcatgagccactgtgccaggcccaaacctagcttctgagtggaaaaatttctgctgccccaccagcttcaggaagtgggagtcaactctagtcactgtggtgatgcagagataatacggctgataaaccccttatttttc

SEQ ID NO: 26597 - protein, 49 aa, Homo sapiens
MRSKFQAKRRVSLCCPGWSQVPGFNVLALASQSTRIIGMSHCARPKPSF

SEQ ID NO: 26598 - DNA, 1563 bp, Homo sapiens
gttccaagtttggagcttttagctgccagccctggcccatcatgtagctgcagcacagccttccctaacgttgcaactgggggaaaaatcactttccagtctgttttgcaaggtgtgcatttccatcttgattccctgaaagtccatctgctgcatcggtcaagagaaactccacttgcatgaagattgcacgcctgcagcttgcatctttgttgcaaaactagctacagaagagaagcaaggcaaagtcttttgtgctcccctcccccatcaaaggaaaggggaaaatgtctcagtcgaaaggcaagaagcgaaaccctggccttaaaattccaaaagaagcatttgaacaacctcagaccagttccacaccacctcgagatttagactccaaggcttgcatttctattggaaatcagaactttgaggtgaaggcagatgacctggagcctataatggaactgggacgaggtgcgtacggggtggtggagaagatgcggcacgtgcccagcgggcagatcatggcagtgaagcggatccgagccacagtaaatagccaggaacagaaacggctactgatggatttggatatttccatgaggacggtggactgtccattcactgtcaccttttatggcgcactgtttcgggagggtgatgtgtggatctgcatggagctcatggatacatcactagataaattctacaaacaagttattgataaaggccagacaattccagaggacatcttagggaaaatagcagtttctattgtaaaagcattagaacatttacatagtaagctgtctgtcattcacagagacgtcaagccttctaatgtactcatcaatgctctcggtcaagtgaagatgtgcgattttggaatcagtggctacttggtggactctgttgctaaaacaattgatgcaggttgcaaaccatacatggcccctgaaagaataaacccagagctcaaccagaagggatacagtgtgaagtctgacatttggagtctgggcatcacgatgattgagttggccatccttcgatttccctatgattcatggggaactccatttcagcagctcaaacaggtggtagaggagccatcgccacaactcccagcagacaagttctctgcagagtttgttgactttacctcacagtgcttaaagaagaattccaaagaacggcctacatacccagagctaatgcaacatccatttttcaccctacatgaatccaaaggaacagatgtggcatcttttgtaaaactgattcttggagactaaaaagcagtggacttaatcggttgaccctactgtggattggtgggtttcggggtgaagcaagttcactacagcatcaatagaaagtcatctttgagataatttaaccctgcctctcagagggttttctctcccaattttctttttactccccctcttaagggggccttggaatctatagtatagaatgaactgtctagatggatgaattatgataaaggcttaggacttcaaaaggtgattaaatatttaatgatgtgtcatatgagtcctc

SEQ ID NO: 26599 - protein, 334 aa, Homo sapiens; identical to SEQ ID NO: 3553

SEQ ID NO: 26600 - DNA, 3607 bp, Homo sapiens
gttccaagtttggagcttttagctgccagccctggcccatcatgtagctgcagcacagccttccctaacgttgcaactgggggaaaaatcactttccagtctgttttgcaaggtgtgcatttccatcttgattccctgaaagtccatctgctgcatcggtcaagagaaactccacttgcatgaagattgcacgcctgcagcttgcatctttgttgcaaaactagctacagaagagaagcaaggcaaagtcttttgtgctcccctcccccatcaaaggaaaggggaaaatgtctcagtcgaaaggcaagaagcgaaaccctggccttaaaattccaaaagaagcatttgaacaacctcagaccagttccacaccacctcgagatttagactccaaggcttgcatttctattggaaatcagaactttgaggtgaaggcagatgacctggagcctataatggaactgggacgaggtgcgtacggggtggtggagaagatgcggcacgtgcccagcgggcagatcatggcagtgaagcggatccgagccacagtaaatagccaggaacagaaacggctactgatggatttggatatttccatgaggacggtggactgtccattcactgtcaccttttatggcgcactgtttcgggagggtgatgtgtggatctgcatggagctcatggatacatcactagataaattctacaaacaagttattgataaaggccagacaattccagaggacatcttagggaaaatagcagtttctattgtaaaagcattagaacatttacatagtaagctgtctgtcattcacagagacgtcaagccttctaatgtactcatcaatgctctcggtcaagtgaagatgtgcgattttggaatcagtggctacttggtggactctgttgctaaaacaattgatgcaggttgcaaaccatacatggcccctgaaagaataaacccagagctcaaccagaagggatacagtgtgaagtctgacatttggagtctgggcatcacgatgattgagttggccatccttcgatttccctatgattcatggggaactccatttcagcagctcaaacaggtggtagaggagccatcgccacaactcccagcagacaagttctctgcagagtttgttgactttacctcacagtgcttaaagaagaattccaaagaacggcctacatacccagagctaatgcaacatccatttttcaccctacatgaatccaaaggaacagatgtggcatcttttgtaaaactgattcttggagactaaaaagcagtggacttaatcggttgaccctactgtggattggtgggtttcggggtgaagcaagttcactacagcatcaatagaaagtcatctttgagataatttaaccctgcctctcagagggttttctctcccaattttctttttactccccctcttaagggggccttggaatctatagtatagaatgaactgtctagatggatgaattatgataaaggcttaggacttcaaaaggtgattaaatatttaatgatgtgtcatatgagtcctcaagcttctcagacttctcttattctttacaaaatgaatgcattggccctgacaaaaaggtgctacggtagtgatgaaattataagtagatttgtagtttgtcccatttattattttaatatttatgtttaagtgcttggttgaaaagattccattttatacaagaagggagattcaaaaaaaaaatataaggttgggttagcaatatttatagggcttttattttttaagttcaattgtgtctgtggtccagaagaaattatttaatatgcatctttgagaatattataaaaatatcaaaaaggagctcttcttgtgaaatgtctgttccagctgttgtgactgctgccatttttgcaaacatctgcccaatcctgggtgatcaccacatcttttaggggaagtgacaagatgctctggtcatactctttttcccaactttggaaaacataaaaatcactcatataacagctcaaagagtaaaacatttggttcttctgacacttgtggtatagtattagtggaaagtgatttgtaatatgattttatatccacctacctattcatctacctgtgtgtatgtgtgtgtttgtgtgtctatttggcaattcacaagtcctgccaagtggtttctatgagcatctctgtttggtaaggaggacaattgtcagttttgagggggacatgtgttaaatcacagaaaaaaatggtgccttcttctgcgtttgtccctcctgccatgtgtaagttgtaaggattgcctttgtagttaatgtactctttggctttgtttgtttgttttcttcttcagtgaagcagccttactattcatagaagggctagaataggagaaaatgaaaggtagtgagtaattctttgataagatgaggaaataatgggaaaggttgaattaattcctgggcatggactaccagatgaccacaagttgcgttgaggccgcatctttcttcagcagcgtgcaatagctggctcctctataggagatgagcttcattgggagttcctagcaagttgactaaacagcaaaagttctttctcgtgggtaaatatacccacaggttctatgatttgtagctctaggtttcttgatgatcaaggagtgaagtaattgacagggaaaatatagacctatgataaataaccaggaagcattgcttttggacaaggaaggacagagggttttgattttaaaaagaagaaaaaaaaaccttattttttctttcttggcctcaagttcaatatggagaggattgcttccctgaatcctctcttccttccccttttagattttgaagtgcaatcatatgtttttctctgtttgcattttttcctccttgttcttgacaaggaggagttgctcctgcccagaatgagcgtgacacttccgaacacttcttcatattcagttccaagatatatctgcttgattaaacatgagcttcctctgctctgaagctacctctgtcctcattttattctagccagaaaaggagtatcaccctagtgattatggctgttcactttcccatctatcttcctaaatctggaagttcttctcttggagatcaagagaaaaattacaattgtattccttactttattcacccacctatgaaaacaggaagcaataggaaaaaaaatccggttactccattttagcttttggtgaacgatgtagagcaaattgtctctctggtctaggtccgattactcttacctgtttttccactttgagacattctaaacagaatgtgtaacttctcatatgtatgcctctcccatctgtgaacctaggccaaagttgcaaaaacaatcatattaatagtagagtagagaaaaagttagtctatggttctcaaccctcgtgtacattggaaccatctgggagctgtgaacactgtcgctgccaatgttccagccaccagagatttggatttaactggtggggcctaggaattggtgtttttttgttttgttttgttttttacacaccttcatgtgattctgatgtgaagctgggttca

SEQ ID NO: 26601 - protein, 334 aa, Homo sapiens; identical to SEQ ID NO: 3553

SEQ ID NO: 26602 - DNA, 579 bp, Homo sapiens
agatttctgcagatcgcaacaagcctcgactgcttattggcacagtctgcaaagggcctcctccgttccaaagttgctcatcctaaaacctgaaaaaaaaaatgactcagaagtggttcccatctcaagaactacccacgagtctcagtggacacatgtgagtatgagattccccgatgcagccttccaatccagcagaggttccaaccaacttccaaacaggtgcaacttgatggcacctcatttttggctgtaccagatgccttctatctctggactcctgccctcagacttctccgacacctgaagaaagcttctgggacagctgacatgcacaacctgggagctaaaacatgtgggaccagctgtgaccaatgaacaatgatggacaggagacgataaccccattagttccttacagtgctgagataaatttcatgagtctcctagaagatctgatgggattgaacatcagttgtacctagcatggccgctgtactggctttccttccttccctatttcatcccccctcgtccctcctactccttgggatcacattgacaaataagtctcttgca

SEQ ID NO: 26603 - protein, 47 aa, Homo sapiens
MRFPDAAFQSSRGSNQLPNRCNLMAPHFWLYQMPSISGLLPSDFSDT

SEQ ID NO: 26604 - DNA, 1651 bp, Homo sapiens
ggagctaagtgaagaatgacttctgttaggttttcctctgctggtcttccttgcagcctcgaaaacctcaccagagtcgcctctgctggtctcttactgtgctgctctgtcagagatgggcaagtaagcgaactgcagagtgttgctgtgtgtgcttgtgatttgtattttatttgatgtaaacgtgaaggcagagtattttctaacactgtaattcaactaggttttgtgtctcctggatctatttttttttcttgttgttctgaggagctgatatacttggaaatattaggtttaagatatgcagatgtccaacttatatacatagtcaagggtttagagtctggagacaggaggctggcaatttcaactaggaggcagtaaattcagggcaagaagcgaaaccctggccttaaaattccaaaagaagcatttgaacaacctcagaccagttccacaccacctcgagatttagactccaaggcttgcatttctattggaaatcagaactttgaggtgaaggcagatgacctggagcctataatggaactgggacgaggtgcgtacggggtggtggagaagatgcggcacgtgcccagcgggcagatcatggcagtgaagcggatccgagccacagtaaatagccaggaacagaaacggctactgatggatttggatatttccatgaggacggtggactgtccattcactgtcaccttttatggcgcactgtttcgggagggtgatgtgtggatctgcatggagctcatggatacatcactagataaattctacaaacaagttattgataaaggccagacaattccagaggacatcttagggaaaatagcagtttctattgtaaaagcattagaacatttacatagtaagctgtctgtcattcacagagacgtcaagccttctaatgtactcatcaatgctctcggtcaagtgaagatgtgcgattttggaatcagtggctacttggtggactctgttgctaaaacaattgatgcaggttgcaaaccatacatggcccctgaaagaataaacccagagctcaaccagaagggatacagtgtgaagtctgacatttggagtctgggcatcacgatgattgagttggccatccttcgatttccctatgattcatggggaactccatttcagcagctcaaacaggtggtagaggagccatcgccacaactcccagcagacaagttctctgcagagtttgttgactttacctcacagtgcttaaagaagaattccaaagaacggcctacatacccagagctaatgcaacatccatttttcaccctacatgaatccaaaggaacagatgtggcatcttttgtaaaactgattcttggagactaaaaagcagtggacttaatcggttgaccctactgtggattggtgggtttcggggtgaagcaagttcactacagcatcaatagaaagtcatctttgagataatttaaccctgcctctcagagggttttctctcccaattttctttttactccccctcttaagggggccttggaatctatagtatagaatgaactgtctagatggatgaattatgataaaggcttaggacttcaaaaggtgattaaatatttaatgatgtgtcatatgagtcctc

SEQ ID NO: 26605 - protein, 278 aa, Homo sapiens
MELGRGAYGVVEKMRHVPSGQIMAVKRIRATVNSQEQKRLLMDLDISMRTVDCPFTVTFYGALFREGDVWICMELMDTSLDKFYKQVIDKGQTIPEDILGKIAVSIVKALEHLHSKLSVIHRDVKPSNVLINALGQVKMCDFGISGYLVDSVAKTIDAGCKPYMAPERINPELNQKGYSVKSDIWSLGITMIELAILRFPYDSWGTPFQQLKQVVEEPSPQLPADKFSAEFVDFTSQCLKKNSKERPTYPELMQHPFFTLHESKGTDVASFVKLILGD

SEQ ID NO: 26606 - DNA, 3695 bp, Homo sapiens
ggagctaagtgaagaatgacttctgttaggttttcctctgctggtcttccttgcagcctcgaaaacctcaccagagtcgcctctgctggtctcttactgtgctgctctgtcagagatgggcaagtaagcgaactgcagagtgttgctgtgtgtgcttgtgatttgtattttatttgatgtaaacgtgaaggcagagtattttctaacactgtaattcaactaggttttgtgtctcctggatctatttttttttcttgttgttctgaggagctgatatacttggaaatattaggtttaagatatgcagatgtccaacttatatacatagtcaagggtttagagtctggagacaggaggctggcaatttcaactaggaggcagtaaattcagggcaagaagcgaaaccctggccttaaaattccaaaagaagcatttgaacaacctcagaccagttccacaccacctcgagatttagactccaaggcttgcatttctattggaaatcagaactttgaggtgaaggcagatgacctggagcctataatggaactgggacgaggtgcgtacggggtggtggagaagatgcggcacgtgcccagcgggcagatcatggcagtgaagcggatccgagccacagtaaatagccaggaacagaaacggctactgatggatttggatatttccatgaggacggtggactgtccattcactgtcaccttttatggcgcactgtttcgggagggtgatgtgtggatctgcatggagctcatggatacatcactagataaattctacaaacaagttattgataaaggccagacaattccagaggacatcttagggaaaatagcagtttctattgtaaaagcattagaacatttacatagtaagctgtctgtcattcacagagacgtcaagccttctaatgtactcatcaatgctctcggtcaagtgaagatgtgcgattttggaatcagtggctacttggtggactctgttgctaaaacaattgatgcaggttgcaaaccatacatggcccctgaaagaataaacccagagctcaaccagaagggatacagtgtgaagtctgacatttggagtctgggcatcacgatgattgagttggccatccttcgatttccctatgattcatggggaactccatttcagcagctcaaacaggtggtagaggagccatcgccacaactcccagcagacaagttctctgcagagtttgttgactttacctcacagtgcttaaagaagaattccaaagaacggcctacatacccagagctaatgcaacatccatttttcaccctacatgaatccaaaggaacagatgtggcatcttttgtaaaactgattcttggagactaaaaagcagtggacttaatcggttgaccctactgtggattggtgggtttcggggtgaagcaagttcactacagcatcaatagaaagtcatctttgagataatttaaccctgcctctcagagggttttctctcccaattttctttttactccccctcttaagggggccttggaatctatagtatagaatgaactgtctagatggatgaattatgataaaggcttaggacttcaaaaggtgattaaatatttaatgatgtgtcatatgagtcctcaagcttctcagacttctcttattctttacaaaatgaatgcattggccctgacaaaaaggtgctacggtagtgatgaaattataagtagatttgtagtttgtcccatttattattttaatatttatgtttaagtgcttggttgaaaagattccattttatacaagaagggagattcaaaaaaaaaatataaggttgggttagcaatatttatagggcttttattttttaagttcaattgtgtctgtggtccagaagaaattatttaatatgcatctttgagaatattataaaaatatcaaaaaggagctcttcttgtgaaatgtctgttccagctgttgtgactgctgccatttttgcaaacatctgcccaatcctgggtgatcaccacatcttttaggggaagtgacaagatgctctggtcatactctttttcccaactttggaaaacataaaaatcactcatataacagctcaaagagtaaaacatttggttcttctgacacttgtggtatagtattagtggaaagtgatttgtaatatgattttatatccacctacctattcatctacctgtgtgtatgtgtgtgtttgtgtgtctatttggcaattcacaagtcctgccaagtggtttctatgagcatctctgtttggtaaggaggacaattgtcagttttgagggggacatgtgttaaatcacagaaaaaaatggtgccttcttctgcgtttgtccctcctgccatgtgtaagttgtaaggattgcctttgtagttaatgtactctttggctttgtttgtttgttttcttcttcagtgaagcagccttactattcatagaagggctagaataggagaaaatgaaaggtagtgagtaattctttgataagatgaggaaataatgggaaaggttgaattaattcctgggcatggactaccagatgaccacaagttgcgttgaggccgcatctttcttcagcagcgtgcaatagctggctcctctataggagatgagcttcattgggagttcctagcaagttgactaaacagcaaaagttctttctcgtgggtaaatatacccacaggttctatgatttgtagctctaggtttcttgatgatcaaggagtgaagtaattgacagggaaaatatagacctatgataaataaccaggaagcattgcttttggacaaggaaggacagagggttttgattttaaaaagaagaaaaaaaaaccttattttttctttcttggcctcaagttcaatatggagaggattgcttccctgaatcctctcttccttccccttttagattttgaagtgcaatcatatgtttttctctgtttgcattttttcctccttgttcttgacaaggaggagttgctcctgcccagaatgagcgtgacacttccgaacacttcttcatattcagttccaagatatatctgcttgattaaacatgagcttcctctgctctgaagctacctctgtcctcattttattctagccagaaaaggagtatcaccctagtgattatggctgttcactttcccatctatcttcctaaatctggaagttcttctcttggagatcaagagaaaaattacaattgtattccttactttattcacccacctatgaaaacaggaagcaataggaaaaaaaatccggttactccattttagcttttggtgaacgatgtagagcaaattgtctctctggtctaggtccgattactcttacctgtttttccactttgagacattctaaacagaatgtgtaacttctcatatgtatgcctctcccatctgtgaacctaggccaaagttgcaaaaacaatcatattaatagtagagtagagaaaaagttagtctatggttctcaaccctcgtgtacattggaaccatctgggagctgtgaacactgtcgctgccaatgttccagccaccagagatttggatttaactggtggggcctaggaattggtgtttttttgttttgttttgttttttacacaccttcatgtgattctgatgtgaagctgggttca

SEQ ID NO: 26607 - protein, 278 aa, Homo sapiens; identical to SEQ ID NO: 26605

SEQ ID NO: 26608 - DNA, 1291 bp, Homo sapiens
gaaaacctcaccagagtcgcctctgctggtctcttactgtgctgctctgtcagagatgggcaagcaagaagcgaaaccctggccttaaaattccaaaagaagcatttgaacaacctcagaccagttccacaccacctcgagatttagactccaaggcttgcatttctattggaaatcagaactttgaggtgaaggcagatgacctggagcctataatggaactgggacgaggtgcgtacggggtggtggagaagatgcggcacgtgcccagcgggcagatcatggcagtgaagcggatccgagccacagtaaatagccaggaacagaaacggctactgatggatttggatatttccatgaggacggtggactgtccattcactgtcaccttttatggcgcactgtttcgggagggtgatgtgtggatctgcatggagctcatggatacatcactagataaattctacaaacaagttattgataaaggccagacaattccagaggacatcttagggaaaatagcagtttctattgtaaaagcattagaacatttacatagtaagctgtctgtcattcacagaggtaagcatccatgagctgccttggctgttcctttgataaagttcatctctttcacctggagtccgtctctacccccagtcccccatgggtggaagtagaattgactcaggcaagagaactaaggggctttcctttgagattggatagcaaaccatataagtagtattccttatcatggctgaggacataagaagaagacgtgatctttgtcttacatccaaattgaatataaacacttgttagcaagcagagctatgagatcatatcattgagaattttagagaatatgataaaaattgatcttgtattggccatcacatgagagcttgttggaaaagaatcatgggtctcaagatcaaatgaattggaatttgcattttaacaagatttccgggtgattcttgtgcacatgaaagtgtgaaaaactctggtataaagtagagccctttcagacaacaggaggcaggatataatgatttatctcttcctctttccttttcttccttcttattggcctgttatctcttcaaccagccattcatccatccatccattcattcattttctatccccccattcatccatttattcatcttttaaaatcacttttaaaatgtaatagatcccctgagaggtatctgagaagaaaatatattctgattaaattatgcatcaggattcttatagggaagtaagataaatgtacaaa

SEQ ID NO: 26609 - protein, 126 aa, Homo sapiens
MELGRGAYGVVEKMRHVPSGQIMAVKRIRATVNSQEQKRLLMDLDISMRTVDCPFTVTFYGALFREGDVWICMELMDTSLDKFYKQVIDKGQTIPEDILGKIAVSIVKALEHLHSKLSVIHRGKHP

SEQ ID NO: 26610 - DNA, 3064 bp, Homo sapiens
aaaaaaaaaaaaaaaaaaaaaagttgcaatgacaaattctcagtggggagaaagggcagatcttcctaggaaaagagagttggcattctcatcctgatgtttgccccctggactaatgaaaaacctcattcatgaccacagtctgtatttgagaagctctgtcctacctggtgcttgggttcttaacactcacagacttcctgggtaggaagtggcgctttgaatggagacatgagagctgcctgtgcaggtcagctctttcctttgccgcagtctctttctctgctatcttgctatgatttagtccttaactttttccttttgtctttccccataggcaagaagcgaaaccctggccttaaaattccaaaagaagcatttgaacaacctcagaccagttccacaccacctcgagatttagactccaaggcttgcatttctattggaaatcagaactttgaggtgaaggcagatgacctggagcctataatggaactgggacgaggtgcgtacggggtggtggagaagatgcggcacgtgcccagcgggcagatcatggcagtgaagcggatccgagccacagtaaatagccaggaacagaaacggctactgatggatttggatatttccatgaggacggtggactgtccattcactgtcaccttttatggcgcactgtttcgggaggtaggtgacccttcaattcaaagtccaagaggaacaataacttaaaaagaagtttctttgatcacgtaaatgccttcacaatcatggagctctttcttgtttgacacatcttgtatacgggggtttacgtgtgtgcaatgatgacatgccctggagcaaggttggattgaaattatggtattttcaaatgtggttagcctttttaagatgtggagtttctcgtctcctttcttttttgttttgtttatcttggcagaactttctatatcgcctatagactgatttgcttagatctcttataatttgaaatattctggtcttttgactgctttaggagcttcatctagcctacttgtgtactatatagacttactttgatctcttttctctacctctgttttccactttagcgttatatggattatgaggcttcacctcattaaaaccagctttttgactgactgttgctggtatttagtgtgagagatacgacatggaggaggcatctagacctaactcctagacagtggtatcagtaaaggcctggatatctggggttgtattgcttatgtctgttagtaattagattccatttttcattaaggggtaggagagcacatgcaggttctgcttggctacctactggtttgctctttgtagataaccttgcttatttgtaaattcctttatgatcttgacagaagacactgtatttccccccaaaattcaagaaagaaatagttaattcttcaggatagggtttactgttttttttttttatttttatttctccctttttcatccttttaaacaattcctgaaacaattggtctccagggtgatgtgtggatctgcatggagctcatggatacatcactagataaattctacaaacaagttattgataaaggccagacaattccagaggacatcttagggaaaatagcagtttctgtgagtacattttgatccctactgcaaggataatgtgagaaataaagtccctatgtgtctttggacctcagtatgaagaaatactacctgggccacagctactattcgtacatgtctgttgacatttattggtggatggataaatacatgctttcctttctgagcactgtgtagaagattctagcactgctttggtttggcagactctaggttaaatgactctaagtgctgcattcatcagctatgaccacattcctggtgtctatattctgacattagtttattttgattttcatttatggatttttaaaatgttctcttgagactagtaggcatagaagaaagcagaaggaaaataaatagaaagaaggtcttctaccttcatggctattcaggctcaggagggtggagagaaaaagaaggaggacaaatgaacaagacagatgagggagacatcctctctgatataagatacagtcctctctggtggatggagtccaatttgtgtaacttcctatgtattttcctagataggaccaccactatttgagaaaatatctcactggtaacctaaagccaaggataataaaccttgatatacttaacattcaatttctttccagcaatgtgataaataaatctatcttgtgtttctcttgcagattgtaaaagcattagaacatttacatagtaagctgtctgtcattcacagaggtaagcatccatgagctgccttggctgttcctttgataaagttcatctctttcacctggagtccgtctctacccccagtcccccatgggtggaagtagaattgactcaggcaagagaactaaggggctttcctttgagattggatagcaaaccatataagtagtattccttatcatggctgaggacataagaagaagacgtgatctttgtcttacatccaaattgaatataaacacttgttagcaagcagagctatgagatcatatcattgagaattttagagaatatgataaaaattgatcttgtattggccatcacatgagagcttgttggaaaagaatcatgggtctcaagatcaaatgaattggaatttgcattttaacaagatttccgggtgattcttgtgcacatgaaagtgtgaaaaactctggtataaagtagagccctttcagacaacaggaggcaggatataatgatttatctcttcctctttccttttcttccttcttattggcctgttatctcttcaaccagccattcatccatccatccattcattcattttctatccccccattcatccatttattcatcttttaaaatcacttttaaaatgtaatagatcccctgagaggtatctgagaagaaaatatattctgattaaattatgcatcaggattcttatagggaagtaagataaatgtacaaa

SEQ ID NO: 26611 - protein, 166 aa, Homo sapiens
MRAACAGQLFPLPQSLSLLSCYDLVLNFFLLSFPIGKKRNPGLKIPKEAFEQPQTSSTPPRDLDSKACISIGNQNFEVKADDLEPIMELGRGAYGVVEKMRHVPSGQIMAVKRIRATVNSQEQKRLLMDLDISMRTVDCPFTVTFYGALFREVGDPSIQSPRGTIT

SEQ ID NO: 26612 - DNA, 509 bp, Homo sapiens
aggaggctgtgttttcaatacacttttaaagctgattatgtttagtgttctacaggttctgaaatccttgtctaatgaaaatatatatggcttctagattttaatgattatttttttttctttaagcttaaagaagaattccaaagaacggcctacatacccagagctaatgcaacatccatttttcaccctacatgaatccaaaggaacagatgtggcatcttttgtaaaactgattcttggagactaaaaagcagtggacttaatcggttgaccctactgtggattggtgggtttcggggtgaagcaagttcactacagcatcaatagaaagtcatctttgagataatttaaccctgcctctcagagggttttctctcccaattttctttttactccccctcttaagggggccttggaatctatagtatagaatgaactgtctagatggatgaattatgataaaggcttaggacttcaaaaggtgattaaatatttaatgatgtgtc

SEQ ID NO: 26613 - protein, 48 aa, Homo sapiens
MIIFFSLSLKKNSKERPTYPELMQHPFFTLHESKGTDVASFVKLILGD

SEQ ID NO: 26614 - DNA, 1056 bp, Homo sapiens
aggaggctgtgttttcaatacacttttaaagctgattatgtttagtgttctacaggttctgaaatccttgtctaatgaaaatatatatggcttctagattttaatgattatttttttttctttaagcttaaagaagaattccaaagaacggcctacatacccagagctaatgcaacatccatttttcaccctacatgaatccaaaggaacagatgtggcatcttttgtaaaactgattcttggagactaaaaagcagtggacttaatcggttgaccctactgtggattggtgggtttcggggtgaagcaagttcactacagcatcaatagaaagtcatctttgagataatttaaccctgcctctcagagggttttctctcccaattttctttttactccccctcttaagggggccttggaatctatagtatagaatgaactgtctagatggatgaattatgataaaggcttaggacttcaaaaggtgattaaatatttaatgatgtgtcatatgagtcctcaagcttctcagacttctcttattctttacaaaatgaatgcattggccctgacaaaaaggtgctacggtagtgatgaaattataagtagatttgtagtttgtcccatttattattttaatatttatgtttaagtgcttggttgaaaagattccattttatacaagaagggagattcaaaaaaaaaatataaggttgggttagcaatatttatagggcttttattttttaagttcaattgtgtctgtggtccagaagaaattatttaatatgcatctttgagaatattataaaaatatcaaaaaggagctcttcttgtgaaatgtctgttccagctgttgtgactgctgccatttttgcaaacatctgcccaatcctgggtgatcaccacatcttttaggggaagtgacaagatgctctggtcatactctttttcccaactttggaaaacataaaaatcactcatataacagctcaaagagtaaaacatttggttcttctgacacttgtggtatagtattagtggaaagtgatttgt

SEQ ID NO: 26615 - protein, 48 aa, Homo sapiens; identical to SEQ ID NO: 26613

SEQ ID NO: 26616 - DNA, 3070 bp, Homo sapiens
agtggccagtttcacaaagaggctgcaggaagctgcttccagcagtctgagtcctgaggaggagacgataacagtgggagaagcacctggtaacagcggcacttcatccaggaagaaaacaggatctaaaatataaacaacatccttacaacacaaaatatgagcgtccatcatggaccaaccaataacttcaataaaagtgctgtatcccctggcagatgatgagtatcttcaagatgtttgtgtagatcaggaatctgggaatggcttgactggatcctccagcccagggattcatacaaggctgcaatcaaggtatcagccaaggctgcggtcatctcaaggcgtaactggggcaagatctgctttcaagcttactcacaatgctgtttgcagaattcagttcctgctgggctattggactaagagctacagtttcttagtacttagcctctccagagggcagctcacaatagagtagctgactttatcaaagtgagaaagtgagaaagagcaagagagtgccagcaggatagaagtcacagccttttataacctactttcagaagtaatagcccatcacttttgttacttagaaggaagtcattaggtctaggccacccatggtgaggggttacacaagaacatacctaccagaaggcaaggatcactgggggctattttagaagtagtctactccaaagtggttcaccagaaacgagttgctctttctcaacaaagaattagaggtaaagttgttgagagagagtttaacatgacataaaagaagaattggttatgaatcatggcattcggatctataaggaagtagaatgatttatcatcctcagattgacctttttgattcactttcttcaatgggctttctggaaagaagttacctggcaccttacctgactctctctcaattgaagtgttggttaaggtagaatggcctcaccaatctttcagtgtctcatccttatttgaacattcgatcgtacagtagatttgcagtcttatagtgtgtcaatgacagcaccactttttccaaatcttatccagtgattcagtaataaaggcatttcttgtgattctggagcctcagctaagctttgaaacacacgttctgtggcagggcaagttttttcatggtcttcagtggccaaagaacaacagtgattgtgataagttcctagatggaatgataatctgttgcaggtattcaataaagaagaatccaaacatattagtttttaagtttttgtttaaatttaattaatgaattaataaattaattagttttccagatggcatctcactctattgcccagtctggagtgcagtggtgcagttatagctcactgtagcctcaaactcctgggctcaagcatttctcccacctcagcctcccaagaagctgggagtacagggttcaccaccctgcctggctaattttttaaaatttctttttagagatggggtctcactttgttggccatgctggtattgaactcctggcttcaagcagttctccctcctcagactcccaaagtactaggatcacagatgtgagccaccacacccagcacctagcctcttagtggggagagggaacacctttttttttcaatcctctggaaaccagaaacttgttactgtggattttaaaggaatttcaaaggtcttctacatttttgtgggagacaaactcaaccaaaacgctttctcctcatgagggtactaagacaactcaagggtaaaataatagtttttttttgtcctggcgcagtggctcacgcctgtaatcccagcactttgggaggccgaggtgggcggatcacgaggtcaggaagtcgagaccatcctggctaacacggtgaaaccctctctctactaaaaaaaaaagtacaaaaaattagccgggcgcggtggtgggcgcctgtagtcccaactactcgggaggctgaggcaggggaatggcgttaacccgggaggcggagcttgcaatgagccgagattgtgccactgcactccagcctgggcgacagagcgagactccatctcagaaagaaacaaacaaacaaacaaaaataatagtttttttttaatagtgctggacaagtgttacctacatgtaaaagaatatagttagatccctatcttatatacaaaaattaaccaaaaatagataaaaatctaaatgtaagagctaaaactatacaactcttagtagaaaacagaagagtacatctttgtgatagtggattaggctgtagtttattagacataaccaaaaacaacaaaaggaagaatagataaatttgacttcatcaaaattaaaaacttctgtgttacaaaggataccatcagtgaaaaggcaaccccacagatggggagaagagatttgcaagtcatgtatatgataagggatttgtatccaaagcatataaagaacgcttacaactcaggaaaaaaataaaaatgaaaaggcacagaacccaatttgaattcaggcaaaggattagaacagacatttctctaaagatgacatacaaatggtcaatacacacatacaaggattctcaacatctgttagtcatcagagaaatgaaaatgagaaccacaatgagttaacacttcacacctgctaggatgggaataataaaaatgacagataataagaagcgtcagtgagttaatggagaaattggaggctcagactttgatggtgggaatgtaaaatggcacagctgctttgacaaacagtttgggattttgtcaaaaagttaaacatgggctgggcgccatggctcacacctgtgatcccagcactttaggagggaaaggcaggcagatcacttgaggttagcagcctgaccagcatggtaaaaccccatctctactaaaaatacaaaaaattagctgggcatggttgtgcatgcctgtaatcccagctactcgggaggctgaggcatgagaattgtttgactccaggaggcagaggttgaagtgagccatgatcgcgccactgcactccagcctgggtgatggagtaagactccgtctc

SEQ ID NO: 26617 - protein, 102 aa, Homo sapiens
MDQPITSIKVLYPLADDEYLQDVCVDQESGNGLTGSSSPGIHTRLQSRYQPRLRSSQGVTGARSAFKLTHNAVCRIQFLLGYWTKSYSFLVLSLSRGQLTIE

SEQ ID NO: 26618 - DNA, 436 bp, Homo sapiens
agcacctggtaacagcggcacttcatccaggaagaaaacaggatctaaaatataaacaacatccttacaacacaaaatatgagcgtccatcatggaccaaccaataacttcaataaaagtgctgtatcccctggcagatgatgagtatcttcaagatggtgcccaaaggagagagagaataaacttgaacattctgactttgaagaacatgaccaggctagcccaggagaaagatggagcacatatggagcagagctgccccagccaacctgctcttgagaccccagcttagagcatccaactcccagctaacacccagaagcatgagtgactccatttaaggtcaataaaaccatctagccgagtccagtgagataagccagcccttggttgatcacagatgcatgagctaaataaatgcttattgttgtatgcc

SEQ ID NO: 26619 - protein, 66 aa, Homo sapiens
MDQPITSIKVLYPLADDEYLQDGAQRRERINLNILTLKNMTRLAQEKDGAHMEQSCPSQPALETPA

SEQ ID NO: 26620 - DNA, 345 bp, Homo sapiens
cccaggtgagaaaggcccacctgtgtcctggctgagggtcttcagggttctttagggcccgaggattccaatgggtcatgtttggttagaaggtgataatctacagaattctatggattccaggtactatggacctattccgtatggactaataagaggacgaatcttctttaagatttggcctctgagtgattttggatttttacgtgccagccctaatggccacagattttctgacgattagtaagtatttattcttttgacttaattattgtctccttttcatgtgaatttattactcccgttgaaatcatgtacttaccaataaactatttgctattcaaa

SEQ ID NO: 26621 - protein, 57 aa, Homo sapiens; identical to SEQ ID NO: 5202

SEQ ID NO: 26622 - DNA, 1249 bp, Homo sapiens
atgtggctacaacagaagtttggaatgaacattggcaaagaatctcctcatggcgtgttgggaaagatggatgaaagagtaagtcccaaaaatagcccagtgggaacaacacagcagcctctccctcacggcctgcaaatcaaagccctgattaggtcaaaggatgggaaatgtggctatatcgctgctcagaggctcttcaatgccaaggcacactgcattgcctcacagctaaattcccactggattgttggtctgaatcaccgattgaaaaatcaaatgtcttcagggacccggcaggatcccgaaggacgccgctctaagccagagggagcgtgtgattcatctccgggtcagccccttctcaggctctccatactctgtgagagtcccattcctccatttggaatgttgcacgcacaacatagaactggcttataccaaaaggcctgtcccattttcattcatcctgaaactcgaaccagaactctggtaaaagggaatggcagatattcaagcttagggagcaagcagcaaggacagagccttccccgtctctgtgtgttgaagtcagcagatagcacacctgctgctgcggatggagcccctcccaaggcaagttcaactgggttctttggcagccgaagtctacacggaccctgcagggagcggtggagaaaagttagatgtctgaagtgtttttcattggaccaaaatcaaggtgttggctgggctaccttcccttctggagactctaaggaagaatccatttccttgtcttttccagatcctagaggctacctgcattccttggcttttatccccaatcttccatcttcggagccagcaacaatatattgatcatgaggagagggctcacccctcacccggagaagtagttggggaagcaatatgcggaaacaaagccatgaatctgacaagaaatgtacttaagattgtatatatggagatgaatacccattgtcctttgcactttctggatgataaattagaaaagaaaaatccaaagaatgaagttgtgctatttgtcctcacttctgatttgggaaactagaggaaattaagatgggaaaagaccatgtgaggacacagtgagaaggagaccatatgcaaagcaggaaggaagatctcactggaaccaaaaaccagccctgctggcaccctgatcttggacttctagcctttctcagaactgtgagaaaataaatttctgatgtttcagccactc

SEQ ID NO: 26623 - protein, 286 aa, Homo sapiens
MWLQQKFGMNIGKESPHGVLGKMDERVSPKNSPVGTTQQPLPHGLQIKALIRSKDGKCGYIAAQRLFNAKAHCIASQLNSHWIVGLNHRLKNQMSSGTRQDPEGRRSKPEGACDSSPGQPLLRLSILCESPIPPFGMLHAQHRTGLYQKACPIFIHPETRTRTLVKGNGRYSSLGSKQQGQSLPRLCVLKSADSTPAAADGAPPKASSTGFFGSRSLHGPCRERWRKVRCLKCFSLDQNQGVGWATFPSGDSKEESISLSFPDPRGYLHSLAFIPNLPSSEPATIY

SEQ ID NO: 26624 - DNA, 2973 bp, Homo sapiens
agtcccagcggcgcagccacccatgcgcgcgcgctcgcaagaccaccagcgcccagagccccagtctgaggcttggcgccgggggtctgcgggcgaggggagctctctacgtgcgaggggctagcgggagccggcacaagagggtcgaggagccaggaaccccaaacgtccggcgccaggcgctagccaagctgctgcgcgccccggcgcccagctggctcggggacagccgctgggtgtcggagaccggagctagcggattgcagcggaaaagcaaagatgtcacactggatccttggcctccagggtccattaaggtgagaataagatctctgggctggctggaactagcctaagactgaaaagcagccatggacatggcggatgagccactcaatggaagccacacatggctatccattccatttgacctcaatggctctgtggtgtcaaccaacacctcaaaccagacagagccgtactatgacctgacaagcaatgcagtcctcacattcatctattttgtggtctgcatcattgggttgtgtggcaacacacttgtcatttatgtcatcctccgctatgccaagatgaagaccatcaccaacatttacatcctcaacctggccatcgcagatgagctcttcatgctgggtctgcctttcttggctatgcaggtggctctggtccactggccctttggcaaggccatttgccgggtggtcatgactgtggatggcatcaatcagttcaccagcatcttctgcctgacagtcatgagcatcgaccgatacctggctgtggtccaccccatcaagtcggccaagtggaggagaccccggacggccaagatgatcaccatggctgtgtggggagtctctctgctggtcatcttgcccatcatgatatatgctgggctccggagcaaccagtgggggagaagcagctgcaccatcaactggccaggtgaatctggggcttggtacacagggttcatcatctacactttcattctggggttcctggtacccctcaccatcatctgtctttgctacctgttcattatcatcaaggtgaagtcctctggaatccgagtgggctcctctaagaggaagaagtctgagaagaaggtcacccgaatggtgtccatcgtggtggctgtcttcatcttctgctggcttcccttctacatattcaacgtttcttccgtctccatggccatcagccccaccccagcccttaaaggcatgtttgactttgtggtggtcctcacctatgctaacagctgtgccaaccctatcctatatgccttcttgtctgacaacttcaagaagagcttccagaatgtcctctgcttggtcaaggtgagcggcacagatgatggggagcggagtgacagtaagcaggacaaatcccggctgaatgagaccacggagacccagaggaccctcctcaatggagacctccaaaccagtatctgaactgcttggggggtgggaaagaaccaagccatgctctgtctactggcaatgggctccctacccacactggcttcctgcctcccacccctcacacctggcttctagaatagaggattgctcagcatgagtccaattcagagaacggtgtttgagtcagcttgtctgattgaatgataatgtgctaaattgattacctcccccttaaagcgaacactgaaatgcaggtagacaattcaaagtctggagaagagggatcatgcctggatatgatctttagaaacaacaaaaatagaaaaaaataagtatctgtgtgtttgtgtattgaaaactcaatatgtaatcttgtgtttttatatgtatacttgtatattcctatttattctctgtataggcattacctacgttcctgtgtttacatacacaagtagcaaattcgagtatgcatagtgtagatggacatttgccacaacacactgcccgcagaaatggacttaccgtgaagccaataaagttcaagcttcagggatctctcttgcacgggccttgccaaggcccaggagggacttgggcagtatgttcatgtggtcatatgtttttgtaaaaaattgtgaaagtaagatatgtttgtattgtttttcttaaagaggaacctcgtataagcttcaagcctcacaaaccttctagcctctgcccttggggatttgcttcattaatttcaggcaagtgaggtcaatgtaagaagggaaagggagaagatatttgaagaaccagaatgtaaattcatgtgtttccacttctcagatatagtcagagaattattcatttgcccaaaaggacttaagtggttgtggtcatccatcattgtatttatcaagacaaagccaactttgttataagattgcatttttttcttttcaaattgctttagtttttcttagggagctatgagggggaaaaatcactaacatgaaaggcaaaaaatggactatgattcctgtggggaaacaatttcattctctccatcgtgaaaataagtgaataagagtgaagcaaaattacacctttatgagaaaccataaaattgtttttatttttcaggccagacatagcttcctaatgaaagaaaatggaaatgtaattcgacgactcctcaaaggggactttagaggacttcatacaaagctgggcattaagaaaaccacaatgcatggccgggcgtggtggcttacacctgtaatcccagcactttgggaggccgaggtgggtggatcacccgaggtcaggagttcgagaccagcctggccaacatggtgaaaccccatcactactaaaaatatgtaaattagtcgggcgtggtgtcacgtgcctgtaatcctagctgctcgggaggctgaggcaggagaatcacttgaacttgggaggtggaggttgcagtaagctgagattgtgccactgcactctagcctgagcaacaagagcaaaactcagtctc

SEQ ID NO: 26625 - protein, 369 aa, Homo sapiens; identical to SEQ ID NO: 3557

SEQ ID NO: 26626 - DNA, 1883 bp, Homo sapiens
caagaccagcctggccaacatggtgaaaccctgtctctactaaaaatacaaaaaattacccaggcatggtggcgggcgcctgtaatcccagctacttgggaggctgagacaggagaatggcttgaacccaggaggtggagattgcggtgagctgagatcgtgccattgcactccagcctgggcaacaagagcgaaacttcatctcaaaaaaaaaaaacaaagactaattctatagtacccatgaccctgcaaccagagaaactgcctgtagggaggccagagtccaaagcagccacctgtaacctgaaaatgaaacgcagacccaggcatctgtgggtcttcatcagcaggatgaccattctaaggctaaaagacaggcctttaaatctgatgctataattccatccaaatacacagttaggtttctaccatagggaaagctattctctactttttgaagtatctgtttcaaagataacttgctctctggttctcttttatctaaaagagagaatcaacatgctaatttaaaggttaacatcattttaattcaaaaattttagtctccattccatatttaatgatgaagacaaatctgctgggtgctgggagggaataaaaagtaatgcaccccattgatttcagagtatctgatcacttgggttatgcaagctgctacttacccgccattagcatgggtagttaagtgctgattaaacctaagtggactcagtgaaaaagatattgggaaaaataatatgatattgtggcctatgttgaatgatgttagcttgtgtttcagtaacagatgttgggattacaggcacgagccaccgcgctcagccaatttttcctcaactctctctttcctggacgggctgcgttggggggaggtgcagggaaagaacacctctttgcttagacattggtgtcgacagtggggatactaagttcatctcctgatcctgctaggcctggaagcaggaaagaaatgtcctggttagagataaaattgttctatccttttagaaaagcctgttaaggaatatgatgcaaagccaccttcgacgaaatctgaaatgataccccacagccttgtccaccccaattattcagtgacagggctccagttgcttaagccatagagaaggcccctttgcagtgggagtcactgaagacagaaagggaagcccaggatgaacccagtcctaagggctgctgggggccaccaaataagactgttttagccctggacacagagggagacacagtcatcccagatccttacaaagaatacattgccaaggaccccgaaggaaatctgcttgtcttaagagaggaagacccacgaccagctctctgggactacctgtcaactcagcaggtgcagccagggagcagccatgcttcttctgccctcccagtaggctgggctatcagttcctgggaggggtcctgtccccatgtaaggggatatgtacattgctgagtacgctgatatctttttcatgggtatgattttttaacaagaaagctaaatggttctcgtgtaacataactgatatagtttggctgtgtccccacccaaatcttatcttgaactgcagctcccataatccccaggtgttgtgggagggacccagtgggaggtaattgaatcatgggggtggttaccgccatgctgttctcgtgatagcgagtgagttctcacgagatctgatggttttataaggggctttccccctccttcgctctgcacttctccttgctgccatgcgaagaaggatgtgtttgcttccccttctgccatgattgtaagtttcctgaggcctccccagccatgttaaactttgagttaattaaacctctttcctttataaatt

SEQ ID NO: 26627 - protein, 63 aa, Homo sapiens
MILWPMLNDVSLCFSNRCWDYRHEPPRSANFSSTLSFLDGLRWGEVQGKNTSLLRHWCRQWGY

SEQ ID NO: 26628 - DNA, 3380 bp, Homo sapiens
gcggagagcggcggctgcgcctgcgccaacgccgtcagtccgcggggcccgatcccgacacctaactccacagagaagctctgctcctaagggaaagggaagacttcagccacagtttcgcagccaacctggcgacctcacctctctggcgacctcacttcccagccggctccgtttaagaaaaccccgcgcaggaccgcgcccgcccccgccccctcgcgcccgccccctcgggtaacaaacatggcccccggcggggcggaagcgcttccgcccccaacgaagatggcggagggggcgggactaaaagggcgtaggtagatcgccgggggctgacgagtgcaccatggccaccgcggcaacctcacccgcgctgaagcggctggatctgcgcgaccctgcggctcttttcgagacgcatggagcggaggagatccgcgggctggagcgccaggttcgggccgagatcgagcacaagaaggaggagctgcggcagatggtgggcgaacggtaccgcgacctgatcgaggcggccgacaccatcggccagatgcgccgctgcgccgtggggctagtggacgccgtgaaggccaccgaccagtactgcgcccgcctccgccaggccggctcggccgcgccccggccaccgcgggcccagcagccacagcagccatcccaggagaagttctacagcatggctgcccagatcaagctactcttagaaattccggagaagatctggagctcgatggaagcctctcagtgtctccacgccacacagctctacctgctctgctgccacctccacagcctgctccagctggattcttctagttcccgatacagtcccgtcctctcccggtttcctatactcatccggcaggtggcagccgccagccacttccggtcaactattctgcatgaaagcaagatgttgctcaaatgccaaggtgtgtctgaccaagctgtggccgaggccctgtgctctataatgctcttagaagagagttctcctcgccaagccctcacagacttcctgctggccagaaaggcaactattcagaaacttctcaaccagccacaccatggtgctggtatcaaggctcagatttgctcattagtggagttgctggccaccactctgaagcaagctcatgcccttttctacactttgccagaaggactgctgccagatccagccctgccatgtggcttgctcttctctactctggagaccatcacaggccagcatcctgccggaaagggcactggtgtcctgcaggaagagatgaaactctgcagctggtttaaacacctgccagcatccatcgtcgagttccagccaacactccgaacccttgcacatcccatcagtcaggaatacctgaaagacacgctgcagaaatggatccacatgtgtaatgaagacattaaaaatgggatcaccaacctgctcatgtacgtgaagagcatgaagggtctcgcgggaatccgggacgccatgtgggagttacttaccaatgagtccaccaatcacagctgggatgtgctatgtcggcggcttctggagaagccgctcttgttctgggaagatatgatgcagcaactgttccttgaccgattacagactctgacaaaagaaggctttgactccatctccagtagctccaaggagctcttggtttcagctttgcaggaacttgaaagcagcaccagcaactccccttcaaataagcacatccactttgagtacaacatgtcgctcttcctctggtctgagagtcctaatgacctgccttccgatgcggcctgggtcagcgtggcaaaccggggtcagtttgccagtagcggcctctccatgaaagcacaagccatcagcccttgtgtacagaacttctgttctgccctggattctaagctgaaggttaaactagatgacctcctggcttacctcccctctgatgactcatcactgcccaaggacgtttctcccacacaggccaagagttctgcctttgacagatacgcagatgcggggaccgtgcaggagatgctgcggactcagtccgtggcatgcatcaagcacatcgtggactgcatccgggcagagctacagagcattgaagagggtgtgcaagggcaacaggatgccctcaacagtgccaagctgcactcagttcttttcatggccagactctgccagtccctgggagagctgtgcccccatctgaagcagtgcatcctgggaaaatcagagagctcagagaaaccagcaagggagtttagggctctgagaaaacagggaaaggtgaaaactcaggaaatcattcctacacaggccaagtggcaagaggttaaagaagtactcctccagcagagcgtgatgggctaccaggtctggagcagtgcagttgtgaaagttttgattcatggattcacccagtcattacttctagatgatgctggctcagttctggccacagccaccagctgggatgagctagaaattcaggaggaggcagagtctggcagcagtgtcacatccaagatccgactccctgcacagccgtcctggtatgtacagtccttcctgtttagtttatgccaggaaattaatcgggttggaggccatgccttgccaaaggtgacattacaggagatgctgaaaagctgtatggttcaagtagtagctgcctatgagaaactctccgaagaaaaacagattaagaaagaaggtgcatttccagtcacccagaaccgggcgctgcagctgctttatgatctgcgttacctcaacattgttctgacagccaagggtgacgaggtgaagagtggccggagcaagccagactccagaattgagaaagtgactgaccacctggaagccctcattgatccatttgacctggacgttttcacgccacacctcaacagcaaccttcatcgcctggtgcagcgaacttctgttctgtttggattggtgactggtacagagaatcagctcgccccccggagcagtacgttcaactcccaagaaccccataacatcctgccactggcatccagtcagatcaggtttggacttctcccactgagcatgacaagcactcgaaaggctaaatcaaccagaaacatcgaaacaaaagctcagtacgatgccaactgttaagcctgcaggaatcctcctgggttgtccccccggcacgctccacagctggtgacccgacagttcctggctccttgttcagacagcttgtcagtgaagaagacaacacgtctgcaccttcattattcaaacttggctggctctctagtatgactaagtaacatggcaacacatctgtctctccctaaataaatactaccacattatttcttct

SEQ ID NO: 26629 - protein, 940 aa, Homo sapiens
MATAATSPALKRLDLRDPAALFETHGAEEIRGLERQVRAEIEHKKEELRQMVGERYRDLIEAADTIGQMRRCAVGLVDAVKATDQYCARLRQAGSAAPRPPRAQQPQQPSQEKFYSMAAQIKLLLEIPEKIWSSMEASQCLHATQLYLLCCHLHSLLQLDSSSSRYSPVLSRFPILIRQVAAASHFRSTILHESKMLLKCQGVSDQAVAEALCSIMLLEESSPRQALTDFLLARKATIQKLLNQPHHGAGIKAQICSLVELLATTLKQAHALFYTLPEGLLPDPALPCGLLFSTLETITGQHPAGKGTGVLQEEMKLCSWFKHLPASIVEFQPTLRTLAHPISQEYLKDTLQKWIHMCNEDIKNGITNLLMYVKSMKGLAGIRDAMWELLTNESTNHSWDVLCRRLLEKPLLFWEDMMQQLFLDRLQTLTKEGFDSISSSSKELLVSALQELESSTSNSPSNKHIHFEYNMSLFLWSESPNDLPSDAAWVSVANRGQFASSGLSMKAQAISPCVQNFCSALDSKLKVKLDDLLAYLPSDDSSLPKDVSPTQAKSSAFDRYADAGTVQEMLRTQSVACIKHIVDCIRAELQSIEEGVQGQQDALNSAKLHSVLFMARLCQSLGELCPHLKQCILGKSESSEKPAREFRALRKQGKVKTQEIIPTQAKWQEVKEVLLQQSVMGYQVWSSAVVKVLIHGFTQSLLLDDAGSVLATATSWDELEIQEEAESGSSVTSKIRLPAQPSWYVQSFLFSLCQEINRVGGHALPKVTLQEMLKSCMVQVVAAYEKLSEEKQIKKEGAFPVTQNRALQLLYDLRYLNIVLTAKGDEVKSGRSKPDSRIEKVTDHLEALIDPFDLDVFTPHLNSNLHRLVQRTSVLFGLVTGTENQLAPRSSTFNSQEPHNILPLASSQIRFGLLPLSMTSTRKAKSTRNIETKAQYDANC

SEQ ID NO: 26630 - DNA, 3342 bp, Homo sapiens
gcggagagcggcggctgcgcctgcgccaacgccgtcagtccgcggggcccgatcccgacacctaactccacagagaagctctgctcctaagggaaagggaagacttcagccacagtttcgcagccaacctggcgacctcacctctctggcgacctcacttcccagccggctccgtttaagaaaaccccgcgcaggaccgcgcccgcccccgccccctcgcgcccgccccctcgggtaacaaacatggcccccggcggggcggaagcgcttccgcccccaacgaagatggcggagggggcgggactaaaagggcgtaggtagatcgccgggggctgacgagtgcaccatggccaccgcggcaacctcacccgcgctgaagcggctggatctgcgcgaccctgcggctcttttcgagacgcatggagcggaggagatccgcgggctggagcgccaggttcgggccgagatcgagcacaagaaggaggagctgcggcagatggtgggcgaacggtaccgcgacctgatcgaggcggccgacaccatcggccagatgcgccgctgcgccgtggggctagtggacgccgtgaaggccaccgaccagtactgcgcccgcctccgccaggccggctcggccgcgccccggccaccgcgggcccagcagccacagcagccatcccaggagaagttctacagcatggctgcccagatcaagctactcttagaaattccggagaagatctggagctcgatggaagcctctcagtgtctccacgccacacagctctacctgctctgctgccacctccacagcctgctccagctggattcttctagttcccgatacagtcccgtcctctcccggtttcctatactcatccggcaggtggcagccgccagccacttccggtcaactattctgcatgaaagcaagatgttgctcaaatgccaaggtgtgtctgaccaagctgtggccgaggccctgtgctctataatgctcttagaagagagttctcctcgccaagccctcacagacttcctgctggccagaaaggcaactattcagaaacttctcaaccagccacaccatggtgctggtatcaaggctcagatttgctcattagtggagttgctggccaccactctgaagcaagctcatgcccttttctacactttgccagaaggactgctgccagatccagccctgccatgtggcttgctcttctctactctggagaccatcacaggccagcatcctgccggaaagggcactggtgtcctgcaggaagagatgaaactctgcagctggtttaaacacctgccagcatccatcgtcgagttccagccaacactccgaacccttgcacatcccatcagtcaggaatacctgaaagacacgctgcagaaatggatccacatgtgtaatgaagacattaaaaatgggatcaccaacctgctcatgtacgtgaagagcatgaagggtctcgcgggaatccgggacgccatgtgggagttacttaccaatgagtccaccaatcacagctgggatgtgctatgtcggcggcttctggagaagccgctcttgttctgggaagatatgatgcagcaactgttccttgaccgattacagactctgacaaaagaaggctttgactccatctccagtagctccaaggagctcttggtttcagctttgcaggaacttgaaagcagcaccagcaactccccttcaaataagcacatccactttgagtacaacatgtcgctcttcctctggtctgagagtcctaatgacctgccttccgatgcggcctgggtcagcgtggcaaaccggggtcagtttgccagtagcggcctctccatgaaagcacaagccatcagcccttgtgtacagaacttctgttctgccctggattctaagctgaaggttaaactagatgacctcctggcttacctcccctctgatgactcatcactgcccaaggacgtttctcccacacaggccaagagttctgcctttgacagatacgcagatgcggggaccgtgcaggagatgctgcggactcagtccgtggcatgcatcaagcacatcgtggactgcatccgggcagagctacagagcattgaagagggtgtgcaagggcaacaggatgccctcaacagtgccaagctgcactcagttcttttcatggccagactctgccagtccctgggagagctgtgcccccatctgaagcagtgcatcctgggaaaatcagagagctcagagaaaccagcaagggagtttagggctctgagaaaacagggaaaggtgaaaactcaggaaatcattcctacacaggccaagtggcaagaggttaaagaagtactcctccagcagagcgtgatgggctaccaggtctggagcagtgcagttgtgaaagttttgattcatggattcacccagtcattacttctagatgatgctggctcagttctggccacagccaccagctgggatgagctagaaattcaggaggaggcagagtctggcagcagtgtcacatccaagatccgactccctgcacagccgtcctggtatgtacagtccttcctgtttagtttatgccaggaaattaatcgggttggaggccatgccttgccaaaggtgacattacaggagatgctgaaaagctgtatggttcaagtagtagctgcctatgagaaactctccgaagaaaaacagattaagaaagaaggtgcatttccagtcacccagaaccgggcgctgcagctgctttatgatctgcgttacctcaacattgttctgacagccaagggtgacgaggtgaagagtggccggagcaagccagactccagaattgagaaagtgactgaccacctggaagccctcattgatccatttgacctggacgttttcacgccacacctcaacagcaaccttcatcgcctggtgcagcgaacttctgttctgtttggattggtgactggtacagagaatcagctcgccccccggagcagtacgttcaactcccaagaaccccataacatcctgccactggcatccagtcagatcaggtttggacttctcccactgagcatgacaagcactcgaaaggctaaatcaaccagaaacatcgaaacaaaagctcaggttgtccccccggcacgctccacagctggtgacccgacagttcctggctccttgttcagacagcttgtcagtgaagaagacaacacgtctgcaccttcattattcaaacttggctggctctctagtatgactaagtaacatggcaacacatctgtctctccctaaataaatactaccacattatttcttct

SEQ ID NO: 26631 - protein, 980 aa, Homo sapiens; identical to SEQ ID NO: 3559

SEQ ID NO: 26632 - DNA, 3746 bp, Homo sapiens
gcggagagcggcggctgcgcctgcgccaacgccgtcagtccgcggggcccgatcccgacacctaactccacagagaagctctgctcctaagggaaagggaagacttcagccacagtttcgcagccaacctggcgacctcacctctctggcgacctcacttcccagccggctccgtttaagaaaaccccgcgcaggaccgcgcccgcccccgccccctcgcgcccgccccctcgggtaacaaacatggcccccggcggggcggaagcgcttccgcccccaacgaagatggcggagggggcgggactaaaagggcgtaggtagatcgccgggggctgacgagtgcaccatggccaccgcggcaacctcacccgcgctgaagcggctggatctgcgcgaccctgcggctcttttcgagacgcatggagcggaggagatccgcgggctggagcgccaggttcgggccgagatcgagcacaagaaggaggagctgcggcagatggtgggcgaacggtaccgcgacctgatcgaggcggccgacaccatcggccagatgcgccgctgcgccgtggggctagtggacgccgtgaaggccaccgaccagtactgcgcccgcctccgccaggccggctcggccgcgccccggccaccgcgggcccagcagccacagcagccatcccaggagaagttctacagcatggctgcccagatcaagctactcttagaaattccggagaagatctggagctcgatggaagcctctcagtgtctccacgccacacagctctacctgctctgctgccacctccacagcctgctccagctggattcttctagttcccgatacagtcccgtcctctcccggtttcctatactcatccggcaggtggcagccgccagccacttccggtcaactattctgcatgaaagcaagatgttgctcaaatgccaaggtgtgtctgaccaagctgtggccgaggccctgtgctctataatgctcttagaagagagttctcctcgccaagccctcacagacttcctgctggccagaaaggcaactattcagaaacttctcaaccagccacaccatggtgctggtatcaaggctcagatttgctcattagtggagttgctggccaccactctgaagcaagctcatgcccttttctacactttgccagaaggactgctgccagatccagccctgccatgtggcttgctcttctctactctggagaccatcacaggccagcatcctgccggaaagggcactggtgtcctgcaggaagagatgaaactctgcagctggtttaaacacctgccagcatccatcgtcgagttccagccaacactccgaacccttgcacatcccatcagtcaggaatacctgaaagacacgctgcagaaatggatccacatgtgtaatgaagacattaaaaatgggatcaccaacctgctcatgtacgtgaagagcatgaagggtctcgcgggaatccgggacgccatgtgggagttacttaccaatgagtccaccaatcacagctgggatgtgctatgtcggcggcttctggagaagccgctcttgttctgggaagatatgatgcagcaactgttccttgaccgattacagactctgacaaaagaaggctttgactccatctccagtagctccaaggagctcttggtttcagctttgcaggaacttgaaagcagcaccagcaactccccttcaaataagcacatccactttgagtacaacatgtcgctcttcctctggtctgagagtcctaatgacctgccttccgatgcggcctgggtcagcgtggcaaaccggggtcagtttgccagtagcggcctctccatgaaagcacaagccatcagcccttgtgtacagaacttctgttctgccctggattctaagctgaaggttaaactagatgacctcctggcttacctcccctctgatgactcatcactgcccaaggacgtttctcccacacaggccaagagttctgcctttgacagatacgcagatgcggggaccgtgcaggagatgctgcggactcagtccgtggcatgcatcaagcacatcgtggactgcatccgggcagagctacagagcattgaagagggtgtgcaagggcaacaggatgccctcaacagtgccaagctgcactcagttcttttcatggccagactctgccagtccctgggagagctgtgcccccatctgaagcagtgcatcctgggaaaatcagagagctcagagaaaccagcaagggagtttagggctctgagaaaacagggaaaggtgaaaactcaggaaatcattcctacacaggccaagtggcaagaggttaaagaagtactcctccagcagagcgtgatgggctaccaggtctggagcagtgcagttgtgaaagttttgattcatggattcacccagtcattacttctagatgatgctggctcagttctggccacagccaccagctgggatgagctagaaattcaggaggaggcagagtctggcagcagtgtcacatccaagatccgactccctgcacagccgtcctggtatgtacagtccttcctgtttagtttatgccaggaaattaatcgggttggaggccatgccttgccaaaggtgacattacaggagatgctgaaaagctgtatggttcaagtagtagctgcctatgagaaactctccgaagaaaaacagattaagaaagaaggtgcatttccagtcacccagaaccgggcgctgcagctgctttatgatctgcgttacctcaacattgttctgacagccaagggtgacgaggtgaagagtggccggagcaagccagactccagaattgagaaagtgactgaccacctggaagccctcattgatccatttgacctggacgttttcacgccacacctcaacagcaaccttcatcgcctggtgcagcgaacttctgttctgtttggattggtgactggtacagagaatcagctcgccccccggagcagtacgttcaactcccaagaaccccataacatcctgccactggcatccagtcagatcaggtttggacttctcccactgagcatgacaagcactcgaaaggctaaatcaaccagaaacatcgaaacaaaagctcagtacgatgccaactgttaagcctgcaggaatcctcctgggttgtccccccggcacgctccacagctggtgacccgacagttcctggctccttgttcagacagcttgtcagtgaagaagacaacacgtctgcaccttcattattcaaacttggctggctctctagtatgactaagtaacatggcaacacatctgtctctccctaaataaatactaccacattatttcttctaaaggtgcctctgctcatctgattctcagccacaccaatctttccagtttcactgatggaatgtggccccctagttactgttgggggttactttaagcatcaagttaatccttgtcccaaaatttcacaatacttgttgctttagacatcagttcaggtagcttacattttatcagcgttcaacaacaccttaattgttgacactacaaggtggaattgtcaatgagatcatgtaagctgctgactgaccaagtttgtaggacaaaaagtcattacatattactttacttgcagaactgtgccatgtttcctactaaagtctgaggtgcagactctggtggaatagtgacacagaagttatctggg

SEQ ID NO: 26633 - protein, 940 aa, Homo sapiens; identical to SEQ ID NO: 26629

SEQ ID NO: 26634 - DNA, 2749 bp, Homo sapiens
gacgagtgcaccatggccaccgcggcaacctcacccgcgctgaagcggctggatctgcgcgaccctgcggctcttttcgagacgcatggagcggaggagatccgcgggctggagcgccaggttcgggccgagatcgagcacaaatctggagctcgatggaagcctctcagtgtctccacgccacacagctctacctgctctgctgccacctccacagcctgctccagctggattcttctagttcccgatacagtcccgtcctctcccggtttcctatactcatccggcaggtggcagccgccagccacttccggtcaactattctgcatgaaagcaagatgttgctcaaatgccaaggtgtgtctgaccaagctgtggccgaggccctgtgctctataatgctcttagaagagagttctcctcgccaagccctcacagacttcctgctggccagaaaggcaactattcagaaacttctcaaccagccacaccatggtgctggtatcaaggctcagatttgctcattagtggagttgctggccaccactctgaagcaagctcatgcccttttctacactttgccagaaggactgctgccagatccagccctgccatgtggcttgctcttctctactctggagaccatcacaggccagcatcctgccggaaagggcactggtgtcctgcaggaagagatgaaactctgcagctggtttaaacacctgccagcatccatcgtcgagttccagccaacactccgaacccttgcacatcccatcagtcaggaatacctgaaagacacgctgcagaaatggatccacatgtgtaatgaagacattaaaaatgggatcaccaacctgctcatgtacgtgaagagcatgaagggtctcgcgggaatccgggacgccatgtgggagttacttaccaatgagtccaccaatcacagctgggatgtgctatgtcggcggcttctggagaagccgctcttgttctgggaagatatgatgcagcaactgttccttgaccgattacagactctgacaaaagaaggctttgactccatctccagtagctccaaggagctcttggtttcagctttgcaggaacttgaaagcagcaccagcaactccccttcaaataagcacatccactttgagtacaacatgtcgctcttcctctggtctgagagtcctaatgacctgccttccgatgcggcctgggtcagcgtggcaaaccggggtcagtttgccagtagcggcctctccatgaaagcacaagccatcagcccttgtgtacagaacttctgttctgccctggattctaagctgaaggttaaactagatgacctcctggcttacctcccctctgatgactcatcactgcccaaggacgtttctcccacacaggccaagagttctgcctttgacagatacgcagatgcggggaccgtgcaggagatgctgcggactcagtccgtggcatgcatcaagcacatcgtggactgcatccgggcagagctacagagcattgaagagggtgtgcaagggcaacaggatgccctcaacagtgccaagctgcactcagttcttttcatggccagactctgccagtccctgggagagctgtgcccccatctgaagcagtgcatcctgggaaaatcagagagctcagagaaaccagcaagggagtttagggctctgagaaaacagggaaaggtgaaaactcaggaaatcattcctacacaggccaagtggcaagaggttaaagaagtactcctccagcagagcgtgatgggctaccaggtctggagcagtgcagttgtgaaagttttgattcatggattcacccagtcattacttctagatgatgctggctcagttctggccacagccaccagctgggatgagctagaaattcaggaggaggcagagtctggcagcagtgtcacatccaagatccgactccctgcacagccgtcctggtatgtacagtccttcctgtttagtttatgccaggaaattaatcgggttggaggccatgccttgccaaaggtgacattacaggagatgctgaaaagctgtatggttcaagtagtagctgcctatgagaaactctccgaagaaaaacagattaagaaagaaggtgcatttccagtcacccagaaccgggcgctgcagctgctttatgatctgcgttacctcaacattgttctgacagccaagggtgacgaggtgaagagtggccggagcaagccagactccagaattgagaaagtgactgaccacctggaagccctcattgatccatttgacctggacgttttcacgccacacctcaacagcaaccttcatcgcctggtgcagcgaacttctgttctgtttggattggtgactggtacagagaatcagctcgccccccggagcagtacgttcaactcccaagaaccccataacatcctgccactggcatccagtcagatcaggtttggacttctcccactgagcatgacaagcactcgaaaggctaaatcaaccagaaacatcgaaacaaaagctcaggttgtccccccggcacgctccacagctggtgacccgacagttcctggctccttgttcagacagcttgtcagtgaagaagacaacacgtctgcaccttcattattcaaacttggctggctctctagtatgactaagtaacatggcaacacatctgtctctccctaaataaatactaccacattatttcttct

SEQ ID NO: 26635 - protein, 846 aa, Homo sapiens
MEASQCLHATQLYLLCCHLHSLLQLDSSSSRYSPVLSRFPILIRQVAAASHFRSTILHESKMLLKCQGVSDQAVAEALCSIMLLEESSPRQALTDFLLARKATIQKLLNQPHHGAGIKAQICSLVELLATTLKQAHALFYTLPEGLLPDPALPCGLLFSTLETITGQHPAGKGTGVLQEEMKLCSWFKHLPASIVEFQPTLRTLAHPISQEYLKDTLQKWIHMCNEDIKNGITNLLMYVKSMKGLAGIRDAMWELLTNESTNHSWDVLCRRLLEKPLLFWEDMMQQLFLDRLQTLTKEGFDSISSSSKELLVSALQELESSTSNSPSNKHIHFEYNMSLFLWSESPNDLPSDAAWVSVANRGQFASSGLSMKAQAISPCVQNFCSALDSKLKVKLDDLLAYLPSDDSSLPKDVSPTQAKSSAFDRYADAGTVQEMLRTQSVACIKHIVDCIRAELQSIEEGVQGQQDALNSAKLHSVLFMARLCQSLGELCPHLKQCILGKSESSEKPAREFRALRKQGKVKTQEIIPTQAKWQEVKEVLLQQSVMGYQVWSSAVVKVLIHGFTQSLLLDDAGSVLATATSWDELEIQEEAESGSSVTSKIRLPAQPSWYVQSFLFSLCQEINRVGGHALPKVTLQEMLKSCMVQVVAAYEKLSEEKQIKKEGAFPVTQNRALQLLYDLRYLNIVLTAKGDEVKSGRSKPDSRIEKVTDHLEALIDPFDLDVFTPHLNSNLHRLVQRTSVLFGLVTGTENQLAPRSSTFNSQEPHNILPLASSQIRFGLLPLSMTSTRKAKSTRNIETKAQVVPPARSTAGDPTVPGSLFRQLVSEEDNTSAPSLFKLGWLSSMTK

SEQ ID NO: 26636 - DNA, 3115 bp, Homo sapiens
gacgagtgcaccatggccaccgcggcaacctcacccgcgctgaagcggctggatctgcgcgaccctgcggctcttttcgagacgcatggagcggaggagatccgcgggctggagcgccaggttcgggccgagatcgagcacaaatctggagctcgatggaagcctctcagtgtctccacgccacacagctctacctgctctgctgccacctccacagcctgctccagctggattcttctagttcccgatacagtcccgtcctctcccggtttcctatactcatccggcaggtggcagccgccagccacttccggtcaactattctgcatgaaagcaagatgttgctcaaatgccaaggtgtgtctgaccaagctgtggccgaggccctgtgctctataatgctcttagaagagagttctcctcgccaagccctcacagacttcctgctggccagaaaggcaactattcagaaacttctcaaccagccacaccatggtgctggtatcaaggctcagatttgctcattagtggagttgctggccaccactctgaagcaagctcatgcccttttctacactttgccagaaggactgctgccagatccagccctgccatgtggcttgctcttctctactctggagaccatcacaggccagcatcctgccggaaagggcactggtgtcctgcaggaagagatgaaactctgcagctggtttaaacacctgccagcatccatcgtcgagttccagccaacactccgaacccttgcacatcccatcagtcaggaatacctgaaagacacgctgcagaaatggatccacatgtgtaatgaagacattaaaaatgggatcaccaacctgctcatgtacgtgaagagcatgaagggtctcgcgggaatccgggacgccatgtgggagttacttaccaatgagtccaccaatcacagctgggatgtgctatgtcggcggcttctggagaagccgctcttgttctgggaagatatgatgcagcaactgttccttgaccgattacagactctgacaaaagaaggctttgactccatctccagtagctccaaggagctcttggtttcagctttgcaggaacttgaaagcagcaccagcaactccccttcaaataagcacatccactttgagtacaacatgtcgctcttcctctggtctgagagtcctaatgacctgccttccgatgcggcctgggtcagcgtggcaaaccggggtcagtttgccagtagcggcctctccatgaaagcacaagccatcagcccttgtgtacagaacttctgttctgccctggattctaagctgaaggttaaactagatgacctcctggcttacctcccctctgatgactcatcactgcccaaggacgtttctcccacacaggccaagagttctgcctttgacagatacgcagatgcggggaccgtgcaggagatgctgcggactcagtccgtggcatgcatcaagcacatcgtggactgcatccgggcagagctacagagcattgaagagggtgtgcaagggcaacaggatgccctcaacagtgccaagctgcactcagttcttttcatggccagactctgccagtccctgggagagctgtgcccccatctgaagcagtgcatcctgggaaaatcagagagctcagagaaaccagcaagggagtttagggctctgagaaaacagggaaaggtgaaaactcaggaaatcattcctacacaggccaagtggcaagaggttaaagaagtactcctccagcagagcgtgatgggctaccaggtctggagcagtgcagttgtgaaagttttgattcatggattcacccagtcattacttctagatgatgctggctcagttctggccacagccaccagctgggatgagctagaaattcaggaggaggcagagtctggcagcagtgtcacatccaagatccgactccctgcacagccgtcctggtatgtacagtccttcctgtttagtttatgccaggaaattaatcgggttggaggccatgccttgccaaaggtgacattacaggagatgctgaaaagctgtatggttcaagtagtagctgcctatgagaaactctccgaagaaaaacagattaagaaagaaggtgcatttccagtcacccagaaccgggcgctgcagctgctttatgatctgcgttacctcaacattgttctgacagccaagggtgacgaggtgaagagtggccggagcaagccagactccagaattgagaaagtgactgaccacctggaagccctcattgatccatttgacctggacgttttcacgccacacctcaacagcaaccttcatcgcctggtgcagcgaacttctgttctgtttggattggtgactggtacagagaatcagctcgccccccggagcagtacgttcaactcccaagaaccccataacatcctgccactggcatccagtcagatcaggtttggacttctcccactgagcatgacaagcactcgaaaggctaaatcaaccagaaacatcgaaacaaaagctcaggttgtccccccggcacgctccacagctggtgacccgacagttcctggctccttgttcagacagcttgtcagtgaagaagacaacacgtctgcaccttcattattcaaacttggctggctctctagtatgactaagtaacatggcaacacatctgtctctccctaaataaatactaccacattatttcttctaaaggtgcctctgctcatctgattctcagccacaccaatctttccagtttcactgatggaatgtggccccctagttactgttgggggttactttaagcatcaagttaatccttgtcccaaaatttcacaatacttgttgctttagacatcagttcaggtagcttacattttatcagcgttcaacaacaccttaattgttgacactacaaggtggaattgtcaatgagatcatgtaagctgctgactgaccaagtttgtaggacaaaaagtcattacatattactttacttgcagaactgtgccatgtttcctactaaagtctgaggtgcagactctggtggaatagtgacacagaagttatctggg

SEQ ID NO: 26637 - protein, 846 aa, Homo sapiens; identical to SEQ ID NO: 26635

SEQ ID NO: 26638 - DNA, 1055 bp, Homo sapiens
cttattcccctccctatgctgcatcctggagtattacgtgcttgagcaggttaattttgttatttgagcctgtatcgcttcgttcgcactaagcatgtttttgatttgactcacagaagttcgctgcaccaggcgatgaaggttgctgttgaggtgtggcgtgaaaacgtccaggtcaaatggatcaatgagggcttccaggtggtcagtcactttctcaattctgagaaaaggattaggatcattactgtccacattttttaggatcaaaaacaatcttatgatatcctactgctgtagaaatcttggagttgggttttattctacttagttgctggcttagtacgtttgtcactgatgatagtgcttaagtcaccctcaagcatgatgtctaagtgaagtccaccctttcccccgttctgtctataaggagggcactaagggctcaaatgatactcagcagctgctaggctgactcagaagagaggggaataagagtccacctatttcacttgaccattgcatttatccagcaggcggccattatttaacttgctggcaatatgagcacttactgttcaaaacaaacacaatgaatgtgcagtataacaggctgactctggtggcttcccagcaaagggactatttgcttttggaagagaccgccttgacatagctccctagaggatacgacacctggagtctggcttgctccggccactcttcacctcgtcacccttggctgtcagaacaatgttgaggtaacgcagatcataaagcagctgcagcgcccggttctgggtgactggaaatgcaccttctttctgcaaatgaattcccagtccccacccatgaagagagaggacttgagacagggtcttgctttgtcgcccaggctggagtgcagtggtgagatgatagctgctcattgcagccgtgaactcccaagctgaagccatcctcccacctcagcctcccaaagttctgggtcttggtgtttccatctgtgctgagctgccttcttagcgaagatctgctgaccctttagaatgagt

SEQ ID NO: 26639 - protein, 40 aa, Homo sapiens
MNSQSPPMKREDLRQGLALSPRLECSGEMIAAHCSRELPS

SEQ ID NO: 26640 - DNA, 1118 bp, Homo sapiens
ggtggggactgggaattcatttgcagaaagaaggtgcatttccagtcacccagaaccgggcgctgcagctgctttatgatctgcgttacctcaacattgttctgacagccaagggtgacgaggtgaagagtggccggagcaagccagactccaggtgtcgtatcctctagggagctatgtcaaggcggtctcttccaaaagcaaatagtccctttgctgggaagccaccagagtcagcctgttatactgcacattcattgtgtttgttttgaacagtaagtgctcatattgccagcaagttaaataatggccgcctgctggataaatgcaatggtcaagtgaaataggtggactcttattcccctctcttctgagtcagcctagcagctgctgagtatcatttgagcccttagtgccctccttatagacagaacgggggaaagggtggacttcacttagacatcatgcttgagggtgacttaagcactatcatcagtgacaaacgtactaagccagcaactaagtagaataaaacccaactccaagatttctacagcagtaggatatcataagattgtttttgatcctaaaaaatgtggacagtaatgatcctaatccttttctcagaattgagaaagtgactgaccacctggaagccctcattgatccatttgacctggacgttttcacgccacacctcaacagcaaccttcatcgcctggtgcagcgaacttctgttctgtttggattggtgactggtacagagaatcagctcgccccccggagcagtacgttcaactcccaagaaccccataacatcctgccactggcatccagtcagatcaggtaaaggctgccaagaggcttctgcggggcacttcgggaggccaaggtggacggatcacgtcaggagatcgagaccatcctggctaacatggtgaaaccctgtctctactaaaaaaaatacaaaaaattagctggcctggtggcaggtgcctatagtcccagctattcaggaggctgaggcaggagaatggcgtgaacccaggaggcggagcttgcagtgagccgagattgcgccactgcactccagcctgggcgacagaacgagactctgt

SEQ ID NO: 26641 - protein, 31 aa, Homo sapiens
MSRRSLPKANSPFAGKPPESACYTAHSLCLF

SEQ ID NO: 26642 - DNA, 435 bp, Homo sapiens
cagctcgccccccggagcagtacgttcaactcccaagaaccccataacatcctgccactggcatccagtcagatcaggtaaaggctgccaagaggcttctgcggggcacttcgggaggccaaggtggacggatcacgtcaggagatcgagaccatcctggctaacatggtttggacttctcccactgagcatgacaagcactcgaaaggctaaatcaaccagaaacatcgaaacaaaagctcaggttgtccccccggcacgctccacagctggtgacccgacagttcctggctccttgttcagacagcttgtcagtgaagaagacaacacgtctgcaccttcattattcaaacttggctggctctctagtatgactaagtaacatggcaacacatctgtctctccctaaataaatactaccacattatttcttct

SEQ ID NO: 26643 - protein, 63 aa, Homo sapiens
MTSTRKAKSTRNIETKAQVVPPARSTAGDPTVPGSLFRQLVSEEDNTSAPSLFKLGWLSSMTK

SEQ ID NO: 26644 - DNA, 2644 bp, Homo sapiens
gggcaaataggcaaaggcagccactcttatatcaaatgttgtcatatggaagggagtacaattaggaaaaggagaaggaatggcaacgaagaagacaaccatcttcccccccagaccaaaagaagtagcagaaaccctgtctttcaggattcctgggacacagagacagtacctgtaatgagaaacagtaaagaaaacagactaagaggaaacaaagcgttctgcgcgtcttcaggcagtgacagtggtgggagcagcagcagcagcagcagcagcatcaatagcccggacagggccagcgggccggaaggcagcttgagccagaccatggccggatccagccctaacacgcctcagcccgtgcccgagcagtccgcgctgtgccaaggcctctacttccacatcaaccagaccctgagggaggcccacttccacagcctacagcaccgagggcggcctctgacatgatgtgccggcagtttcttgccttctgtgaagggacagcgctgtgcagatttgatatttcaacttacaacttgttttaaaagaaaaattgcacacgaaaaatgcctgttggcttttcagtctatatttgaaataacaggttaacaggcagttgtttacttgtggttttgctgcactattgcaatttcaaaggggctttgaagcaattttttataggattcttttgagggagggtatcaaatctatgtcaaggtagtggtttgaggaaaactcattctgtgtgttgaatccatagtatgtcccattcagactgatttccaaatctgtcaactagaaactctactttatgtaaagggccttttaaaaatgcgggatcttcaattttttttattcaataaactagtaaagagtatctagtttccatgaaaaaacataagtttttttccaaaatataggaagcttgattcagtcttgcactgaaattaactgccatactacctctcagtatgtagatgttctattgaaagtactctctcctgtgtaacaggagaacaatcagatccaattcagactgtcagtgaagcacactccctaataatagtctctactctttgttatatatttgtatttccagagagaatgtcttttagattcttgtatacccagataacttctgtgtcactattccaccagagtctgcacctcagactttagtaggaaacatggcacagttctgcaagtaaagtaatatgtaatgactttttgtcctacaaacttggtcagtcagcagcttacatgatctcattgacaattccaccttgtagtgtcaacaattaaggtgttgttgaacgctgataaaatgtaagctacctgaactgatgtctaaagcaacaagtattgtgaaattttgggacaaggattaacttgatgcttaaagtaacccccaacagtaactagggggccacattccatcagtgaaactggaaagattggtgtggctgagaatcagatgagcagaggcacctttagaagaaataatgtggtagtatttatttagggagagacagatgtgttgccatgttacttagtcatactagagagccagccaagtttgaataatgaaggtgcagacgtgttgtcttcttcactgacaagctgtctgaacaaggagccaggaactgtcgggtcaccagctgtggagcgtgccggggggacaacctgccattggatgtagagaaaagtgccttagagttggcctgagccctcctgcccactcgccctccgcgcgacgccactcggagtccacacggcacacacaagcggagctgagaagcacgatggctctagtcagaggactttgctgtcggtccagatttgaagaggacacggaacagcatgagcctttgtgacaaaactagaatttggaaatgaggactgtcttgggaaaagggtagacacaggcacttctctccacagcctgctaacctaatgtgggcagaactgaaagatcactgcagtggaaactgttctggaagaggctgcaacatagcccatgcttagggactggatggtttttgcaagagctttttttttttttaaactaccatctcccaacttttaaagccagatacttgacaaggattttagatcttaatgggttcgatggtagggaatacggaaaggatacactgctaatattgtgtctaacaataaagcaaacaactcgatgctgtaagaagacaagctgtttgagctttcaaacacacatgcacacagcacaattcagaaatacccaggaggattcctgcaggcttaacagttggcatcgtactgaaatgaaacgtgtattaacaagaaaatgtcaaacttttggggaaacaaattttctgttacttcccacccaactaaaagggaagataaaaccatcatcaccagaacaaaacagattttctccaaacaagtacaatgatagtgccgggttggcagttaactctttcaccctactaaattcaagagctcatctccaccctgtcctgtatattttctacatttctattaagaggctacttggtagtgtcagcgggcatcttttacaccttctagtagctcaagctagtaaaaccttgtacttctctattgcgccgccattaaaagcagcattagtgcattttgtcattca

SEQ ID NO: 26645 - protein, 140 aa, Homo sapiens
MEGSTIRKRRRNGNEEDNHLPPQTKRSSRNPVFQDSWDTETVPVMRNSKENRLRGNKAFCASSGSDSGGSSSSSSSSINSPDRASGPEGSLSQTMAGSSPNTPQPVPEQSALCQGLYFHINQTLREAHFHSLQHRGRPLT

SEQ ID NO: 26646 - DNA, 2705 bp, Homo sapiens
gatggtgccactgcgcagccgcgagagggcggtaccacggcggcagcgacatgggggggcgcggagcagacgccggaagtagtggtggtacgggtccgactgaggggtactcgccaccggctgcgtccacccgagcggctgcgagagccaaggcccgagggggtgggcgtggcggccgccgaaacacaaccccctctgttccctctcttcgcggagcggcgccgcgtagcttccatccgccagctgccatgagcgagcgcctccgtcccaggattcctgggacacagagtcttcaggcagtgacagtggtgggagcagcagcagcagcagcagcagcatcaatagcccggacagggccagcgggccggaaggcagcttgagccagaccatggccggatccagccctaacacgcctcagcccgtgcccgagcagtccgcgctgtgccaaggcctctacttccacatcaaccagaccctgagggaggcccacttccacagcctacagcaccgagggcggcctctgacatgatgtgccggcagtttcttgccttctgtgaagggacagcgctgtgcagatttgatatttcaacttacaacttgttttaaaagaaaaattgcacacgaaaaatgcctgttggcttttcagtctatatttgaaataacaggttaacaggcagttgtttacttgtggttttgctgcactattgcaatttcaaaggggctttgaagcaattttttataggattcttttgagggagggtatcaaatctatgtcaaggtagtggtttgaggaaaactcattctgtgtgttgaatccatagtatgtcccattcagactgatttccaaatctgtcaactagaaactctactttatgtaaagggccttttaaaaatgcgggatcttcaattttttttattcaataaactagtaaagagtatctagtttccatgaaaaaacataagtttttttccaaaatataggaagcttgattcagtcttgcactgaaattaactgccatactacctctcagtatgtagatgttctattgaaagtactctctcctgtgtaacaggagaacaatcagatccaattcagactgtcagtgaagcacactccctaataatagtctctactctttgttatatatttgtatttccagagagaatgtcttttagattcttgtatacccagataacttctgtgtcactattccaccagagtctgcacctcagactttagtaggaaacatggcacagttctgcaagtaaagtaatatgtaatgactttttgtcctacaaacttggtcagtcagcagcttacatgatctcattgacaattccaccttgtagtgtcaacaattaaggtgttgttgaacgctgataaaatgtaagctacctgaactgatgtctaaagcaacaagtattgtgaaattttgggacaaggattaacttgatgcttaaagtaacccccaacagtaactagggggccacattccatcagtgaaactggaaagattggtgtggctgagaatcagatgagcagaggcacctttagaagaaataatgtggtagtatttatttagggagagacagatgtgttgccatgttacttagtcatactagagagccagccaagtttgaataatgaaggtgcagacgtgttgtcttcttcactgacaagctgtctgaacaaggagccaggaactgtcgggtcaccagctgtggagcgtgccggggggacaacctgccattggatgtagagaaaagtgccttagagttggcctgagccctcctgcccactcgccctccgcgcgacgccactcggagtccacacggcacacacaagcggagctgagaagcacgatggctctagtcagaggactttgctgtcggtccagatttgaagaggacacggaacagcatgagcctttgtgacaaaactagaatttggaaatgaggactgtcttgggaaaagggtagacacaggcacttctctccacagcctgctaacctaatgtgggcagaactgaaagatcactgcagtggaaactgttctggaagaggctgcaacatagcccatgcttagggactggatggtttttgcaagagctttttttttttttaaactaccatctcccaacttttaaagccagatacttgacaaggattttagatcttaatgggttcgatggtagggaatacggaaaggatacactgctaatattgtgtctaacaataaagcaaacaactcgatgctgtaagaagacaagctgtttgagctttcaaacacacatgcacacagcacaattcagaaatacccaggaggattcctgcaggcttaacagttggcatcgtactgaaatgaaacgtgtattaacaagaaaatgtcaaacttttggggaaacaaattttctgttacttcccacccaactaaaagggaagataaaaccatcatcaccagaacaaaacagattttctccaaacaagtacaatgatagtgccgggttggcagttaactctttcaccctactaaattcaagagctcatctccaccctgtcctgtatattttctacatttctattaagaggctacttggtagtgtcagcgggcatcttttacaccttctagtagctcaagctagtaaaaccttgtacttctctattgcgccgccattaaaagcagcattagtgcattttgtcattca

SEQ ID NO: 26647 - protein, 109 aa, Homo sapiens
MGGRGADAGSSGGTGPTEGYSPPAASTRAAARAKARGGGRGGRRNTTPSVPSLRGAAPRSFHPPAAMSERLRPRIPGTQSLQAVTVVGAAAAAAAASIARTGPAGRKAA

SEQ ID NO: 26648 - DNA, 2687 bp, Homo sapiens
gatggtgccactgcgcagccgcgagagggcggtaccacggcggcagcgacatgggggggcgcggagcagacgccggaagtagtggtggtacgggtccgactgaggggtactcgccaccggctgcgtccacccgagcggctgcgagagccaaggcccgagggggtgggcgtggcggccgccgaaacacaaccccctctgttccctctcttcgcggagcggcgccgcgtagcttccatccgccagctgccatgagcgagcgcctccgtcccagtcttcaggcagtgacagtggtgggagcagcagcagcagcagcagcagcatcaatagcccggacagggccagcgggccggaaggcagcttgagccagaccatggccggatccagccctaacacgcctcagcccgtgcccgagcagtccgcgctgtgccaaggcctctacttccacatcaaccagaccctgagggaggcccacttccacagcctacagcaccgagggcggcctctgacatgatgtgccggcagtttcttgccttctgtgaagggacagcgctgtgcagatttgatatttcaacttacaacttgttttaaaagaaaaattgcacacgaaaaatgcctgttggcttttcagtctatatttgaaataacaggttaacaggcagttgtttacttgtggttttgctgcactattgcaatttcaaaggggctttgaagcaattttttataggattcttttgagggagggtatcaaatctatgtcaaggtagtggtttgaggaaaactcattctgtgtgttgaatccatagtatgtcccattcagactgatttccaaatctgtcaactagaaactctactttatgtaaagggccttttaaaaatgcgggatcttcaattttttttattcaataaactagtaaagagtatctagtttccatgaaaaaacataagtttttttccaaaatataggaagcttgattcagtcttgcactgaaattaactgccatactacctctcagtatgtagatgttctattgaaagtactctctcctgtgtaacaggagaacaatcagatccaattcagactgtcagtgaagcacactccctaataatagtctctactctttgttatatatttgtatttccagagagaatgtcttttagattcttgtatacccagataacttctgtgtcactattccaccagagtctgcacctcagactttagtaggaaacatggcacagttctgcaagtaaagtaatatgtaatgactttttgtcctacaaacttggtcagtcagcagcttacatgatctcattgacaattccaccttgtagtgtcaacaattaaggtgttgttgaacgctgataaaatgtaagctacctgaactgatgtctaaagcaacaagtattgtgaaattttgggacaaggattaacttgatgcttaaagtaacccccaacagtaactagggggccacattccatcagtgaaactggaaagattggtgtggctgagaatcagatgagcagaggcacctttagaagaaataatgtggtagtatttatttagggagagacagatgtgttgccatgttacttagtcatactagagagccagccaagtttgaataatgaaggtgcagacgtgttgtcttcttcactgacaagctgtctgaacaaggagccaggaactgtcgggtcaccagctgtggagcgtgccggggggacaacctgccattggatgtagagaaaagtgccttagagttggcctgagccctcctgcccactcgccctccgcgcgacgccactcggagtccacacggcacacacaagcggagctgagaagcacgatggctctagtcagaggactttgctgtcggtccagatttgaagaggacacggaacagcatgagcctttgtgacaaaactagaatttggaaatgaggactgtcttgggaaaagggtagacacaggcacttctctccacagcctgctaacctaatgtgggcagaactgaaagatcactgcagtggaaactgttctggaagaggctgcaacatagcccatgcttagggactggatggtttttgcaagagctttttttttttttaaactaccatctcccaacttttaaagccagatacttgacaaggattttagatcttaatgggttcgatggtagggaatacggaaaggatacactgctaatattgtgtctaacaataaagcaaacaactcgatgctgtaagaagacaagctgtttgagctttcaaacacacatgcacacagcacaattcagaaatacccaggaggattcctgcaggcttaacagttggcatcgtactgaaatgaaacgtgtattaacaagaaaatgtcaaacttttggggaaacaaattttctgttacttcccacccaactaaaagggaagataaaaccatcatcaccagaacaaaacagattttctccaaacaagtacaatgatagtgccgggttggcagttaactctttcaccctactaaattcaagagctcatctccaccctgtcctgtatattttctacatttctattaagaggctacttggtagtgtcagcgggcatcttttacaccttctagtagctcaagctagtaaaaccttgtacttctctattgcgccgccattaaaagcagcattagtgcattttgtcattca

SEQ ID NO: 26649 - protein, 103 aa, Homo sapiens
MGGRGADAGSSGGTGPTEGYSPPAASTRAAARAKARGGGRGGRRNTTPSVPSLRGAAPRSFHPPAAMSERLRPSLQAVTVVGAAAAAAAASIARTGPAGRKAA

SEQ ID NO: 26650 - DNA, 2850 bp, Homo sapiens
gatggtgccactgcgcagccgcgagagggcggtaccacggcggcagcgacatgggggggcgcggagcagacgccggaagtagtggtggtacgggtccgactgaggggtactcgccaccggctgcgtccacccgagcggctgcgagagccaaggcccgagggggtgggcgtggcggccgccgaaacacaaccccctctgttccctctcttcgcggagcggcgccgcgtagcttccatccgccagctgccatgagcgagcgcctccgtcccaggaaaaggagaaggaatggcaacgaagaagacaaccatcttcccccccagaccaaaagaagtagcagaaaccctgtctttcaggattcctgggacacagagacagtacctgtaatgagaaacagtaaagaaaacagactaagaggaaacaaagcgttctgcgcgtcttcaggcagtgacagtggtgggagcagcagcagcagcagcagcagcatcaatagcccggacagggccagcgggccggaaggcagcttgagccagaccatggccggatccagccctaacacgcctcagcccgtgcccgagcagtccgcgctgtgccaaggcctctacttccacatcaaccagaccctgagggaggcccacttccacagcctacagcaccgagggcggcctctgacatgatgtgccggcagtttcttgccttctgtgaagggacagcgctgtgcagatttgatatttcaacttacaacttgttttaaaagaaaaattgcacacgaaaaatgcctgttggcttttcagtctatatttgaaataacaggttaacaggcagttgtttacttgtggttttgctgcactattgcaatttcaaaggggctttgaagcaattttttataggattcttttgagggagggtatcaaatctatgtcaaggtagtggtttgaggaaaactcattctgtgtgttgaatccatagtatgtcccattcagactgatttccaaatctgtcaactagaaactctactttatgtaaagggccttttaaaaatgcgggatcttcaattttttttattcaataaactagtaaagagtatctagtttccatgaaaaaacataagtttttttccaaaatataggaagcttgattcagtcttgcactgaaattaactgccatactacctctcagtatgtagatgttctattgaaagtactctctcctgtgtaacaggagaacaatcagatccaattcagactgtcagtgaagcacactccctaataatagtctctactctttgttatatatttgtatttccagagagaatgtcttttagattcttgtatacccagataacttctgtgtcactattccaccagagtctgcacctcagactttagtaggaaacatggcacagttctgcaagtaaagtaatatgtaatgactttttgtcctacaaacttggtcagtcagcagcttacatgatctcattgacaattccaccttgtagtgtcaacaattaaggtgttgttgaacgctgataaaatgtaagctacctgaactgatgtctaaagcaacaagtattgtgaaattttgggacaaggattaacttgatgcttaaagtaacccccaacagtaactagggggccacattccatcagtgaaactggaaagattggtgtggctgagaatcagatgagcagaggcacctttagaagaaataatgtggtagtatttatttagggagagacagatgtgttgccatgttacttagtcatactagagagccagccaagtttgaataatgaaggtgcagacgtgttgtcttcttcactgacaagctgtctgaacaaggagccaggaactgtcgggtcaccagctgtggagcgtgccggggggacaacctgccattggatgtagagaaaagtgccttagagttggcctgagccctcctgcccactcgccctccgcgcgacgccactcggagtccacacggcacacacaagcggagctgagaagcacgatggctctagtcagaggactttgctgtcggtccagatttgaagaggacacggaacagcatgagcctttgtgacaaaactagaatttggaaatgaggactgtcttgggaaaagggtagacacaggcacttctctccacagcctgctaacctaatgtgggcagaactgaaagatcactgcagtggaaactgttctggaagaggctgcaacatagcccatgcttagggactggatggtttttgcaagagctttttttttttttaaactaccatctcccaacttttaaagccagatacttgacaaggattttagatcttaatgggttcgatggtagggaatacggaaaggatacactgctaatattgtgtctaacaataaagcaaacaactcgatgctgtaagaagacaagctgtttgagctttcaaacacacatgcacacagcacaattcagaaatacccaggaggattcctgcaggcttaacagttggcatcgtactgaaatgaaacgtgtattaacaagaaaatgtcaaacttttggggaaacaaattttctgttacttcccacccaactaaaagggaagataaaaccatcatcaccagaacaaaacagattttctccaaacaagtacaatgatagtgccgggttggcagttaactctttcaccctactaaattcaagagctcatctccaccctgtcctgtatattttctacatttctattaagaggctacttggtagtgtcagcgggcatcttttacaccttctagtagctcaagctagtaaaaccttgtacttctctattgcgccgccattaaaagcagcattagtgcattttgtcattca

SEQ ID NO: 26651 - protein, 207 aa, Homo sapiens
MGGRGADAGSSGGTGPTEGYSPPAASTRAAARAKARGGGRGGRRNTTPSVPSLRGAAPRSFHPPAAMSERLRPRKRRRNGNEEDNHLPPQTKRSSRNPVFQDSWDTETVPVMRNSKENRLRGNKAFCASSGSDSGGSSSSSSSSINSPDRASGPEGSLSQTMAGSSPNTPQPVPEQSALCQGLYFHINQTLREAHFHSLQHRGRPLT

SEQ ID NO: 26652 - DNA, 2787 bp, Homo sapiens
gatggtgccactgcgcagccgcgagagggcggtaccacggcggcagcgacatgggggggcgcggagcagacgccggaagtagtggtggtacgggtccgactgaggggtactcgccaccggctgcgtccacccgagcggctgcgagagccaaggcccgagggggtgggcgtggcggccgccgaaacacaaccccctctgttccctctcttcgcggagcggcgccgcgtagcttccatccgccagctgccatgagcgagcgcctccgtcccaggaaaaggagaaggaatggcaacgaagaagacaaccatcttcccccccagaccaaaagaagtagcagaaaccctgtctttcaggattcctgggacacagagtcttcaggcagtgacagtggtgggagcagcagcagcagcagcagcagcatcaatagcccggacagggccagcgggccggaaggcagcttgagccagaccatggccggatccagccctaacacgcctcagcccgtgcccgagcagtccgcgctgtgccaaggcctctacttccacatcaaccagaccctgagggaggcccacttccacagcctacagcaccgagggcggcctctgacatgatgtgccggcagtttcttgccttctgtgaagggacagcgctgtgcagatttgatatttcaacttacaacttgttttaaaagaaaaattgcacacgaaaaatgcctgttggcttttcagtctatatttgaaataacaggttaacaggcagttgtttacttgtggttttgctgcactattgcaatttcaaaggggctttgaagcaattttttataggattcttttgagggagggtatcaaatctatgtcaaggtagtggtttgaggaaaactcattctgtgtgttgaatccatagtatgtcccattcagactgatttccaaatctgtcaactagaaactctactttatgtaaagggccttttaaaaatgcgggatcttcaattttttttattcaataaactagtaaagagtatctagtttccatgaaaaaacataagtttttttccaaaatataggaagcttgattcagtcttgcactgaaattaactgccatactacctctcagtatgtagatgttctattgaaagtactctctcctgtgtaacaggagaacaatcagatccaattcagactgtcagtgaagcacactccctaataatagtctctactctttgttatatatttgtatttccagagagaatgtcttttagattcttgtatacccagataacttctgtgtcactattccaccagagtctgcacctcagactttagtaggaaacatggcacagttctgcaagtaaagtaatatgtaatgactttttgtcctacaaacttggtcagtcagcagcttacatgatctcattgacaattccaccttgtagtgtcaacaattaaggtgttgttgaacgctgataaaatgtaagctacctgaactgatgtctaaagcaacaagtattgtgaaattttgggacaaggattaacttgatgcttaaagtaacccccaacagtaactagggggccacattccatcagtgaaactggaaagattggtgtggctgagaatcagatgagcagaggcacctttagaagaaataatgtggtagtatttatttagggagagacagatgtgttgccatgttacttagtcatactagagagccagccaagtttgaataatgaaggtgcagacgtgttgtcttcttcactgacaagctgtctgaacaaggagccaggaactgtcgggtcaccagctgtggagcgtgccggggggacaacctgccattggatgtagagaaaagtgccttagagttggcctgagccctcctgcccactcgccctccgcgcgacgccactcggagtccacacggcacacacaagcggagctgagaagcacgatggctctagtcagaggactttgctgtcggtccagatttgaagaggacacggaacagcatgagcctttgtgacaaaactagaatttggaaatgaggactgtcttgggaaaagggtagacacaggcacttctctccacagcctgctaacctaatgtgggcagaactgaaagatcactgcagtggaaactgttctggaagaggctgcaacatagcccatgcttagggactggatggtttttgcaagagctttttttttttttaaactaccatctcccaacttttaaagccagatacttgacaaggattttagatcttaatgggttcgatggtagggaatacggaaaggatacactgctaatattgtgtctaacaataaagcaaacaactcgatgctgtaagaagacaagctgtttgagctttcaaacacacatgcacacagcacaattcagaaatacccaggaggattcctgcaggcttaacagttggcatcgtactgaaatgaaacgtgtattaacaagaaaatgtcaaacttttggggaaacaaattttctgttacttcccacccaactaaaagggaagataaaaccatcatcaccagaacaaaacagattttctccaaacaagtacaatgatagtgccgggttggcagttaactctttcaccctactaaattcaagagctcatctccaccctgtcctgtatattttctacatttctattaagaggctacttggtagtgtcagcgggcatcttttacaccttctagtagctcaagctagtaaaaccttgtacttctctattgcgccgccattaaaagcagcattagtgcattttgtcattca

SEQ ID NO: 26653 - protein, 186 aa, Homo sapiens
MGGRGADAGSSGGTGPTEGYSPPAASTRAAARAKARGGGRGGRRNTTPSVPSLRGAAPRSFHPPAAMSERLRPRKRRRNGNEEDNHLPPQTKRSSRNPVFQDSWDTESSGSDSGGSSSSSSSSINSPDRASGPEGSLSQTMAGSSPNTPQPVPEQSALCQGLYFHINQTLREAHFHSLQHRGRPLT

SEQ ID NO: 26654 - DNA, 407 bp, Homo sapiens
tagcaggctgtggagagaagtgcctgtgtaaaggctcatgctgttccgtgtcctcttcaaatctggaccgacagcaaagtcctctgactagagccatcgtgcttctcagctccgcttgtgtgtgccgtgtggactccgagtggcgtcgcgcggagggcgagtgggcaggagggctcaggccaactctaaggcacttttctctacatccaatggcaggttgtccccccggcacgctccacagctggtgacccgacagttcctggctccttgttcagacagcttgtcagtgaagaagacaacacgtctgcaccttcattattcaaacttggctggctctctagtatgactaagtaacatggcaacacatctgtctctccctaaataaatactaccacattatttcttct

SEQ ID NO: 26655 - protein, 84 aa, Homo sapiens
SHRASQLRLCVPCGLRVASRGGRVGRRAQANSKALFSTSNGRLSPRHAPQLVTRQFLAPCSDSLSVKKTTRLHLHYSNLAGSLV

SEQ ID NO: 26656 - DNA, 802 bp, Homo sapiens
tagcaggctgtggagagaagtgcctgtgtaaaggctcatgctgttccgtgtcctcttcaaatctggaccgacagcaaagtcctctgactagagccatcgtgcttctcagctccgcttgtgtgtgccgtgtggactccgagtggcgtcgcgcggagggcgagtgggcaggagggctcaggccaactctaaggcacttttctctacatccaatggcaggttgtccccccggcacgctccacagctggtgacccgacagttcctggctccttgttcagacagcttgtcagtgaagaagacaacacgtctgcaccttcattattcaaacttggctggctctctagtatgactaagtaacatggcaacacatctgtctctccctaaataaatactaccacattatttcttctaaaggtgcctctgctcatctgattctcagccacaccaatctttccagtttcactgatggaatgtggccccctagttactgttgggggttactttaagcatcaagttaatccttgtcccaaaatttcacaatacttgttgctttagacatcagttcaggtagcttacattttatcagcgttcaacaacaccttaattgttgacactacaaggtggaattgtcaatgagatcatgtaagctgctgactgaccaagtttgtaggacaaaaagtcattacatattactttacttgcagaactgtgccatgtttcctactaaagtctgaggtgcagactctggtggaatagtgacacagaagttatctgggtatacaagaatctaaaagacattctctct

SEQ ID NO: 26657 - protein, 33 aa, Homo sapiens
MRSCKLLTDQVCRTKSHYILLYLQNCAMFPTKV

SEQ ID NO: 26658 - DNA, 768 bp, Homo sapiens
gatggtgccactgcgcagccgcgagagggcggtaccacggcggcagcgacatgggggggcgcggagcagacgccggaagtagtggtggtacgggtccgactgaggggtactcgccaccggctgcgtccacccgagcggctgcgagagccaaggcccgagggggtgggcgtggcggccgccgaaacacaaccccctctgttccctctcttcgcggagcggcgccgcgtagcttccatccgccagctgccatgagcgagcgcctccgtcccaggaaaaggagaaggaatggcaacgaagaagacaaccatcttcccccccagaccaaaagaagtagcagaaaccctgtctttcaggattcctgggacacagagacagtacctgtaatgagaaacagtaaagaaaacagactaagaggaaacaaagcgttctgcgcgtcttcaggcagtgacagtggtgggagcagcagcagcagcagcagcagcatcaatagcccggacagggccagcgggccggaaggcagcttgagccagaccatggccggatccagccctaacacgcctcagcccgtgcccgagcagtccgcgctgtgccaaggcctctacttccacatcaaccagaccctgagggaggcccacttccacagcctacagcaccgagggcggcctctgacatgatgtgccggcagtttcttgccttctgtgaagggacagcgctgtgcagatttgatatttcaacttacaacttgttttaaaagaaaaattgcacacg

SEQ ID NO: 26659 - protein, 207 aa, Homo sapiens; identical to SEQ ID NO: 26651

SEQ ID NO: 26660 - DNA, 705 bp, Homo sapiens
gatggtgccactgcgcagccgcgagagggcggtaccacggcggcagcgacatgggggggcgcggagcagacgccggaagtagtggtggtacgggtccgactgaggggtactcgccaccggctgcgtccacccgagcggctgcgagagccaaggcccgagggggtgggcgtggcggccgccgaaacacaaccccctctgttccctctcttcgcggagcggcgccgcgtagcttccatccgccagctgccatgagcgagcgcctccgtcccaggaaaaggagaaggaatggcaacgaagaagacaaccatcttcccccccagaccaaaagaagtagcagaaaccctgtctttcaggattcctgggacacagagtcttcaggcagtgacagtggtgggagcagcagcagcagcagcagcagcatcaatagcccggacagggccagcgggccggaaggcagcttgagccagaccatggccggatccagccctaacacgcctcagcccgtgcccgagcagtccgcgctgtgccaaggcctctacttccacatcaaccagaccctgagggaggcccacttccacagcctacagcaccgagggcggcctctgacatgatgtgccggcagtttcttgccttctgtgaagggacagcgctgtgcagatttgatatttcaacttacaacttgttttaaaagaaaaattgcacacg

SEQ ID NO: 26661 - protein, 186 aa, Homo sapiens; identical to SEQ ID NO: 26653

SEQ ID NO: 26662 - DNA, 2200 bp, Homo sapiens
gcgactaggagcttctgggagaaaggacctcccctggggtggcagaagcgctcgcctgttcacagccaacggagggctgacattcacgtttcattctgccacactcgggaacggtgatcggggaagcatggggatccgggagaagcacccacaaaactagcatcctcctggaggagctcgggaataggatgagtgataatccacccagaatggaagtgtgtccttactgtaagaagccatttaaacgattaaaatcccacttgccatactgtaagatgataggaccaaccatacctactgatcaaaaagtttatcagtccaagccagctacactcccacgtgctaaaaagatgaaaggaccaatcaaagatttaattaaagctaaagggaaagagttagagacagagaatgaagaaagaaattctaagttggtggtggacaaaccagaacagacagtgaagacctttccactgccagctgttggtttggaaagagcagctactacaaaggcagataaagacatcaagaatccaatccaaccatccttcaaaatgttaaaaaatactaaaccaatgactactttccaagaagaaaccaaggctcagttttacgcatcagagaaaacctctcctaaaagagaacttgccaaagatttgcctaaatcaggagaaagtcgatgtaatccttcagaagctggagcgtctttactggttggctcaatagaaccttctttgtcaaatcaagatagaaaatattcctcaactctacctaatgatgtacaaactacctctggtgatctcaaattggacaaaattgatccccaaagacaggaacttctagtaaaattactagatgtgcctactggtgattgtcatatttctccaaagaatgtcagtgatggggttaaaagggtaagaacattattaagcaatgagagagattccaaaggcagggatcacctctcaggagtccctactgatgttacagttactgagactccagaaaagaacacagaatccctcattttaagccttaaaatgagctcattaggtaaaatccaagtcatggagaaacaagagaaaggacttaccctgggagtagagacgtgtgggagcaaaggaaatgcagagaaaagtatgtctgcaacagaaaagcaggaacggactgtcatgagccatggctgtgagaacttcaacaccagggattcagtcacaggaaaggagtctcaaggggaaagaccacatttaagtttgttcattccgagggagacgacttaccagtttcattctgtatcgcagtcaagtagtcaaagtcttgcctctctagctacaacatttcttcaagaaaagaaagcagaagcccagaatcatcattgtgtccctgatgtaaaggcattaatggagagtcccgagggacagttatctctggagcccaaatctgatagtcagttccaagcatcacacactgggtgccagagccctttatgttcagcccagcgtcacactcctcagagccccttcaccaatcatgctgcagctgctggcaggaagactcttcgcagctgcatggggctggagtggtttccagagctctatcctggttaccttggactaggggtgttgccagggaagcctcagtgttggaatgcaatgacccagaagccacaacttatcagtccccagggggaaagactctcacaagtttctttgttggaacgaagctcaactcatataaggagtttggaaccccctgccggacttacaacctccaacttctctctaatgaggctcttgggagctgtacaaaaaggctggatcaggtgcaacaccaccataaggaagagtggattcggtggcatcacgatgctcttcacaggatacttcgtcctgtgttgtagctggagtttcagacgtctgaaaaaattgtgccgacccctgccctggaagagcacagtacctccatgcattggtgtggcgaagacgactggggattgccgctctaaaacatgtttggattaggaagcacgtttaagtaggagaagccttcgtgacttctctctagtgccttcgtgccctgtgttgcccactgaattgccctgtaacacctaagtgtagtggtagcattaagggatagcttttcagccctcaaggttatcaggagcatttgtatcactgctataaataaagtagtatcacttgtc

SEQ ID NO: 26663 - protein, 609 aa, Homo sapiens
MSDNPPRMEVCPYCKKPFKRLKSHLPYCKMIGPTIPTDQKVYQSKPATLPRAKKMKGPIKDLIKAKGKELETENEERNSKLVVDKPEQTVKTFPLPAVGLERAATTKADKDIKNPIQPSFKMLKNTKPMTTFQEETKAQFYASEKTSPKRELAKDLPKSGESRCNPSEAGASLLVGSIEPSLSNQDRKYSSTLPNDVQTTSGDLKLDKIDPQRQELLVKLLDVPTGDCHISPKNVSDGVKRVRTLLSNERDSKGRDHLSGVPTDVTVTETPEKNTESLILSLKMSSLGKIQVMEKQEKGLTLGVETCGSKGNAEKSMSATEKQERTVMSHGCENFNTRDSVTGKESQGERPHLSLFIPRETTYQFHSVSQSSSQSLASLATTFLQEKKAEAQNHHCVPDVKALMESPEGQLSLEPKSDSQFQASHTGCQSPLCSAQRHTPQSPFTNHAAAAGRKTLRSCMGLEWFPELYPGYLGLGVLPGKPQCWNAMTQKPQLISPQGERLSQVSLLERSSTHIRSLEPPAGLTTSNFSLMRLLGAVQKGWIRCNTTIRKSGFGGITMLFTGYFVLCCSWSFRRLKKLCRPLPWKSTVPPCIGVAKTTGDCRSKTCLD

SEQ ID NO: 26664 - DNA, 3454 bp, Homo sapiens
ggccgggggttgggcaggggcctggggggcttccctggggggcttgtcgccggggccgcctgggctttcaggtcttccgaggctgacattcacgtttcattctgccacactcgggaacggtgatcggggaagcatggggatccgggagaagcacccacaaaactagcatcctcctggaggagctcgggaataggatgagtgataatccacccagaatggaagtgtgtccttactgtaagaagccatttaaacgattaaaatcccacttgccatactgtaagatgataggaccaaccatacctactgatcaaaaagtttatcagtccaagccagctacactcccacgtgctaaaaagatgaaaggaccaatcaaagatttaattaaagctaaagggaaagagttagagacagagaatgaagaaagaaattctaagttggtggtggacaaaccagaacagacagtgaagacctttccactgccagctgttggtttggaaagagcagctactacaaaggcagataaagacatcaagaatccaatccaaccatccttcaaaatgttaaaaaatactaaaccaatgactactttccaagaagaaaccaaggctcagttttacgcatcagagaaaacctctcctaaaagagaacttgccaaagatttgcctaaatcaggagaaagtcgatgtaatccttcagaagctggagcgtctttactggttggctcaatagaaccttctttgtcaaatcaagatagaaaatattcctcaactctacctaatgatgtacaaactacctctggtgatctcaaattggacaaaattgatccccaaagacaggaacttctagtaaaattactagatgtgcctactggtgattgtcatatttctccaaagaatgtcagtgatggggttaaaagggtaagaacattattaagcaatgagagagattccaaaggcagggatcacctctcaggagtccctactgatgttacagttactgagactccagaaaagaacacagaatccctcattttaagccttaaaatgagctcattaggtaaaatccaagtcatggagaaacaagagaaaggacttaccctgggagtagagacgtgtgggagcaaaggaaatgcagagaaaagtatgtctgcaacagaaaagcaggaacggactgtcatgagccatggctgtgagaacttcaacaccagggattcagtcacaggaaaggagtctcaaggggaaagaccacatttaagtttgttcattccgagggagacgacttaccagtttcattctgtatcgcagtcaagtagtcaaagtcttgcctctctagctacaacatttcttcaagaaaagaaagcagaagcccagaatcatcattgtgtccctgatgtaaaggcattaatggagagtcccgagggacagttatctctggagcccaaatctgatagtcagttccaagcatcacacactgggtgccagagccctttatgttcagcccagcgtcacactcctcagagccccttcaccaatcatgctgcagctgctggcaggaagactcttcgcagctgcatggggctggagtggtttccagagctctatcctggttaccttggactaggggtgttgccagggaagcctcagtgttggaatgcaatgacccagaagccacaacttatcagtccccagggggaaagactctcacaaggctggatcaggtgcaacaccaccataaggaagagtggattcggtggcatcacgatgctcttcacaggatacttcgtcctgtgttgtagctggagtttcagacgtctgaaaaaattgtgccgacccctgccctggaagagcacagtacctccatgcattggtgtggcgaagacgactggggattgccgctctaaaacatgtttggattaggaagcacgtttaagtaggagaagccttcgtgacttctctctagtgccttcgtgccctgtgttgcccactgaattgccctgtaacacctaagtgtagtggtagcattaagggatagcttttcagccctcaaggttatcaggagcatttgtatcactgctataaataaagtagtatcacttgtcataatcagggtgctgaaacataatgaaaaggtttaacttagtcacagtaaatattttatatccctgaaaataagttatttaatgagaatagaactatttaatgatccatgagtcctaaaaggatatctgccttgtattgccaagtttaaggcaaaggtgagatcctgtattaataagaagacagcttttttgtttgacattggtaagtaccaagaattctaactcacatatagtaggaaacaacaaaaagtctccactgacttctttgaattagatactgagaatccacaatacagtagtgtggataactttcaagaagccattggaaacatctccacattctgggatgacttgtaaatgtctacagagtaatggaaggaaaggcttccttgtctgctcattgctgccacctgggttgggaaaataattgaagatgttttctcaagtccttcaagaatctcttcttaatgttcagaatagtttaagagcgttgttgaggtaaactgatagctgattattttctgagatttagatctaaacaaactcagcatgacgaggaagcacacttcacagctccagggtgcaatactgatgtaaagttgcctcgtgaggatacatttttcgctcatgtatgcaaaattcctatcagttcatttgcacagccagttccaatcatgtatgtgatcaccagattaaaagcttcatccagaaagacaagactcctcagaacgaatagtagacaagtaagactgctacccacagaagccagtacgcttcaggtgtgaggcggggtaactactcatctcttcacagagccaaggaaagaaaaagaacgtctctaacatgatttaccattttaaacagccttataagttttgtctcttaaaatcatgctgcagaaggagggggtaaaagtcgtgttctgccctgtctgtggcattggagtgccccgctaggtaagaagcaacgcttagatcttgcttccaggcagcagcttgaattcccgaatcttcctgcaaggtgcatacaaatgcagcgtgagaatccatacacgtaatccatattcaccttcccatccatcccgcagaagaggcatggtgacacccaggctactgtccatgcttgagaggacgtatttgaaggttctgttactacaagttgggaatattcacggacatgcctgaataccccggctgtaactcacacgtggtctgtgtaagtggattaacctcggggcggccttgtttaatcctgaataatatctgaaagactgagtttacttgggaatgtgtagtttttctaatgcacattaaaatttattttagctgttaaaaataaaatcattttattatcagc

SEQ ID NO: 26665 - protein, 573 aa, Homo sapiens
MSDNPPRMEVCPYCKKPFKRLKSHLPYCKMIGPTIPTDQKVYQSKPATLPRAKKMKGPIKDLIKAKGKELETENEERNSKLVVDKPEQTVKTFPLPAVGLERAATTKADKDIKNPIQPSFKMLKNTKPMTTFQEETKAQFYASEKTSPKRELAKDLPKSGESRCNPSEAGASLLVGSIEPSLSNQDRKYSSTLPNDVQTTSGDLKLDKIDPQRQELLVKLLDVPTGDCHISPKNVSDGVKRVRTLLSNERDSKGRDHLSGVPTDVTVTETPEKNTESLILSLKMSSLGKIQVMEKQEKGLTLGVETCGSKGNAEKSMSATEKQERTVMSHGCENFNTRDSVTGKESQGERPHLSLFIPRETTYQFHSVSQSSSQSLASLATTFLQEKKAEAQNHHCVPDVKALMESPEGQLSLEPKSDSQFQASHTGCQSPLCSAQRHTPQSPFTNHAAAAGRKTLRSCMGLEWFPELYPGYLGLGVLPGKPQCWNAMTQKPQLISPQGERLSQGWIRCNTTIRKSGFGGITMLFTGYFVLCCSWSFRRLKKLCRPLPWKSTVPPCIGVAKTTGDCRSKTCLD

SEQ ID NO: 26666 - DNA, 2082 bp, Homo sapiens
ggcctggggggcttccctggggggcttgtcgccggggccgcctgggctttcaggtcttccgaggctgacattcacgtttcattctgccacactcgggaacggtgatcggggaagcatggggatccgggagaagcacccacaaaactagcatcctcctggaggagctcgggaataggatgagtgataatccacccagaatggaagtgtgtccttactgtaagaagccatttaaacgattaaaatcccacttgccatactgtaagatgataggaccaaccatacctactgatcaaaaagtttatcagtccaagccagctacactcccacgtgctaaaaagatgaaaggaccaatcaaagatttaattaaagctaaagggaaagagttagagacagagaatgaagaaagaaattctaagttggtggtggacaaaccagaacagacagtgaagacctttccactgccagctgttggtttggaaagagcagctactacaaaggcagataaagacatcaagaatccaatccaaccatccttcaaaatgttaaaaaatactaaaccaatgactactttccaagaagaaaccaaggctcagttttacgcatcagagaaaacctctcctaaaagagaacttgccaaagatttgcctaaatcaggagaaagtcgatgtaatccttcagaagctggagcgtctttactggttggctcaatagaaccttctttgtcaaatcaagatagaaaatattcctcaactctacctaatgatgtacaaactacctctggtgatctcaaattggacaaaattgatccccaaagacaggaacttctagtaaaattactagatgtgcctactggtgattgtcatatttctccaaagaatgtcagtgatggggttaaaagggtaagaacattattaagcaatgagagagattccaaaggcagggatcacctctcaggagtccctactgatgttacagttactgagactccagaaaagaacacagaatccctcattttaagccttaaaatgagctcattaggtaaaatccaagtcatggagaaacaagagaaaggacttaccctgggagtagagacgtgtgggagcaaaggaaatgcagagaaaagtatgtctgcaacagaaaagcaggaacggactgtcatgagccatggctgtgagaacttcaacaccagggattcagtcacaggaaaggagtctcaaggggaaagaccacatttaagtttgttcattccgagggagacgacttaccagtttcattctgtatcgcagtcaagtagtcaaagtcttgcctctctagctacaacatttcttcaagaaaagaaagcagaagcccagaatcatcattgtgtccctgatgtaaaggcattaatggagagtcccgagggacagttatctctggagcccaaatctgatagtcagttccaagcatcacacactgggtgccagagccctttatgttcagcccagcgtcacactcctcagagccccttcaccaatcatgctgcagctgctggcaggaagactcttcgcagctgcatggggctggagtggtttccagagctctatcctggttaccttggactaggggtgttgccagggaagcctcagtgttggaatgcaatgacccagaagccacaacttatcagtccccagggggaaagactctcacaaggctggatcaggtgcaacaccaccataaggaagagtggattcggtggcatcacgatgctcttcacaggatacttcgtcctgtgttgtagctggagtttcagacgtctgaaaaaattgtgccgacccctgccctggaagagcacagtacctccatgcattggtgtggcgaagacgactggggattgccgctctaaaacatgtttggattaggaagcacgtttaagtaggagaagccttcgtgacttctctctagtgccttcgtgccctgtgttgcccactgaattgccctgtaacacctaagtgtagtggtagcattaagggatagcttttcagccctcaaggttatcaggagcatttgtatcactgctataaataaagtagtatcacttgtcat

SEQ ID NO: 26667 - protein, 573 aa, Homo sapiens; identical to SEQ ID NO: 26665

SEQ ID NO: 26668 - DNA, 2470 bp, Homo sapiens
ggggggcttccctggggggcttgtcgccggggccgcctgggctttcaggtcttccgaggctgacattcacgtttcattctgccacactcgggaacggtgatcggggaagcatggggatccgggagaagcacccacaaaactagcatcctcctggaggagctcgggaataggatgagtgataatccacccagaatggaagtgtgtccttactgtaagaagccatttaaacgattaaaatcccacttgccatactgtaagatgataggaccaaccatacctactgatcaaaaagtttatcagtccaagccagctacactcccacgtgctaaaaagatgaaaggaccaatcaaagatttaattaaagctaaagggaaagagttagagacagagaatgaagaaagaaattctaagttggtggtggacaaaccagaacagacagtgaagacctttccactgccagctgttggtttggaaagagcagctactacaaaggcagataaagacatcaagaatccaatccaaccatccttcaaaatgttaaaaaatactaaaccaatgactactttccaagaagaaaccaaggctcagttttacgcatcagagaaaacctctcctaaaagagaacttgccaaagatttgcctaaatcaggagaaagtcgatgtaatccttcagaagctggagcgtctttactggttggctcaatagaaccttctttgtcaaatcaagatagaaaatattcctcaactctacctaatgatgtacaaactacctctggtgatctcaaattggacaaaattgatccccaaagacaggaacttctagtaaaattactagatgtgcctactggtgattgtcatatttctccaaagaatgtcagtgatggggttaaaagggtaagaacattattaagcaatgagagagattccaaaggcagggatcacctctcaggagtccctactgatgttacagttactgagactccagaaaagaacacagaatccctcattttaagccttaaaatgagctcattaggtaaaatccaagtcatggagaaacaagagaaaggacttaccctgggagtagagacgtgtgggagcaaaggaaatgcagagaaaagtatgtctgcaacagaaaagcaggaacggactgtcatgagccatggctgtgagaacttcaacaccagggattcagtcacaggaaaggagtctcaaggggaaagaccacatttaagtttgttcattccgagggagacgacttaccagtttcattctgtatcgcagtcaagtagtcaaagtcttgcctctctagctacaacatttcttcaagaaaagaaagcagaagcccagaatcatcattgtgtccctgatgtaaaggcattaatggagagtcccgagggacagttatctctggagcccaaatctgatagtcagttccaagcatcacacactgggtgccagagccctttatgttcagcccagcgtcacactcctcagagccccttcaccaatcatgctgcagctgctggcaggaagactcttcgcagctgcatggggctggagtggtttccagagctctatcctggttaccttggactaggggtgttgccagggaagcctcagtgttggaatgcaatgacccagaagccacaacttatcagtccccagggggaaagactctcacaagtttctttgttggaacgaagctcaactcatataaggagtttggaaccccctgccggacttacaacctccaacttctctctaatgaggctcttgggagctgtacaaaaaggctggatcaggtgcaacaccaccataaggaagagtggattcggtggcatcacgatgctcttcacaggatacttcgtcctgtgttgtagctggagtttcagacgtctgaagctgcagcggtggcgtaagtagtgttgacctggacatcacttaaagctctggaacagcaaagggcgtacagtggagacgactgcaatacatacttaacagtttaaaaatgtataatatttgggacagggagaggggagtgaaaaaaataaagaataaaattattggaatctaaaataatgatacaggaagtaaacgtattattaatatagacagatctggttctgtctggatgttcttggcttgctctcaggagcaactgagaattagagaaaaactagttttgtttaaccataaagttgttattcaaggagatgtgaagatgacaaagttcatcactaaaattaagaagtcacttctcagtaaaaagctagtatctcattaccattcagctatatgagataccagactactacctatatgttgatacaggaaagtatctgaattggcagaaaataagcccacatcaggcccttccccttagtttctttggggcccttgaccagatcttgataaggtgtgagaaacacaagagctaaggatgggcattcgagttgcaggtaagcctccg

SEQ ID NO: 26669 - protein, 583 aa, Homo sapiens
MSDNPPRMEVCPYCKKPFKRLKSHLPYCKMIGPTIPTDQKVYQSKPATLPRAKKMKGPIKDLIKAKGKELETENEERNSKLVVDKPEQTVKTFPLPAVGLERAATTKADKDIKNPIQPSFKMLKNTKPMTTFQEETKAQFYASEKTSPKRELAKDLPKSGESRCNPSEAGASLLVGSIEPSLSNQDRKYSSTLPNDVQTTSGDLKLDKIDPQRQELLVKLLDVPTGDCHISPKNVSDGVKRVRTLLSNERDSKGRDHLSGVPTDVTVTETPEKNTESLILSLKMSSLGKIQVMEKQEKGLTLGVETCGSKGNAEKSMSATEKQERTVMSHGCENFNTRDSVTGKESQGERPHLSLFIPRETTYQFHSVSQSSSQSLASLATTFLQEKKAEAQNHHCVPDVKALMESPEGQLSLEPKSDSQFQASHTGCQSPLCSAQRHTPQSPFTNHAAAAGRKTLRSCMGLEWFPELYPGYLGLGVLPGKPQCWNAMTQKPQLISPQGERLSQVSLLERSSTHIRSLEPPAGLTTSNFSLMRLLGAVQKGWIRCNTTIRKSGFGGITMLFTGYFVLCCSWSFRRLKLQRWRK

SEQ ID NO: 26670 - DNA, 2183 bp, Homo sapiens
ggggggcttccctggggggcttgtcgccggggccgcctgggctttcaggtcttccgaggctgacattcacgtttcattctgccacactcgggaacggtgatcggggaagcatggggatccgggagaagcacccacaaaactagcatcctcctggaggagctcgggaataggatgagtgataatccacccagaatggaagtgtgtccttactgtaagaagccatttaaacgattaaaatcccacttgccatactgtaagatgataggaccaaccatacctactgatcaaaaagtttatcagtccaagccagctacactcccacgtgctaaaaagatgaaaggaccaatcaaagatttaattaaagctaaagggaaagagttagagacagagaatgaagaaagaaattctaagttggtggtggacaaaccagaacagacagtgaagacctttccactgccagctgttggtttggaaagagcagctactacaaaggcagataaagacatcaagaatccaatccaaccatccttcaaaatgttaaaaaatactaaaccaatgactactttccaagaagaaaccaaggctcagttttacgcatcagagaaaacctctcctaaaagagaacttgccaaagatttgcctaaatcaggagaaagtcgatgtaatccttcagaagctggagcgtctttactggttggctcaatagaaccttctttgtcaaatcaagatagaaaatattcctcaactctacctaatgatgtacaaactacctctggtgatctcaaattggacaaaattgatccccaaagacaggaacttctagtaaaattactagatgtgcctactggtgattgtcatatttctccaaagaatgtcagtgatggggttaaaagggtaagaacattattaagcaatgagagagattccaaaggcagggatcacctctcaggagtccctactgatgttacagttactgagactccagaaaagaacacagaatccctcattttaagccttaaaatgagctcattaggtaaaatccaagtcatggagaaacaagagaaaggacttaccctgggagtagagacgtgtgggagcaaaggaaatgcagagaaaagtatgtctgcaacagaaaagcaggaacggactgtcatgagccatggctgtgagaacttcaacaccagggattcagtcacaggaaaggagtctcaaggggaaagaccacatttaagtttgttcattccgagggagacgacttaccagtttcattctgtatcgcagtcaagtagtcaaagtcttgcctctctagctacaacatttcttcaagaaaagaaagcagaagcccagaatcatcattgtgtccctgatgtaaaggcattaatggagagtcccgagggacagttatctctggagcccaaatctgatagtcagttccaagcatcacacactgggtgccagagccctttatgttcagcccagcgtcacactcctcagagccccttcaccaatcatgctgcagctgctggcaggaagactcttcgcagctgcatggggctggagtggtttccagagctctatcctggttaccttggactaggggtgttgccagggaagcctcagtgttggaatgcaatgacccagaagccacaacttatcagtccccagggggaaagactctcacaagtttctttgttggaacgaagctcaactcatataaggagtttggaaccccctgccggacttacaacctccaacttctctctaatgaggctcttgggagctgtacaaaaaggctggatcaggtgcaacaccaccataaggaagagtggattcggtggcatcacgatgctcttcacaggatacttcgtcctgtgttgtagctggagtttcagacgtctgaaaaaattgtgccgacccctgccctggaagagcacagtacctccatgcattggtgtggcgaagacgactggggattgccgctctaaaacatgtttggattaggaagcacgtttaagtaggagaagccttcgtgacttctctctagtgccttcgtgccctgtgttgcccactgaattgccctgtaacacctaagtgtagtggtagcattaagggatagcttttcagccctcaaggttatcaggagcatttgtatcactgctataaataaagtagtatcacttgtc

SEQ ID NO: 26671 - protein, 609 aa, Homo sapiens; identical to SEQ ID NO: 26663

SEQ ID NO: 26672 - DNA, 609 bp, Homo sapiens
aggctgacattcacgtttcattctgccacactcgggaacggtgatcggggaagcatggggatccgggagaagcacccacaaaactagcatcctcctggaggagctcggtttctttgttggaacgaagctcaactcatataaggagtttggaaccccctgccggacttacaacctccaacttctctctaatgaggctcttgggagctgtacaaaaaggctggatcaggtgcaacaccaccataaggaagagtggattcggtggcatcacgatgctcttcacaggatacttcgtcctgtgttgtagctggagtttcagacgtctgaaaaaattgtgccgacccctgccctggaagagcacagtacctccatgcattggtgtggcgaagacgactggggattgccgctctaaaacatgtttggattaggaagcacgtttaagtaggagaagccttcgtgacttctctctagtgccttcgtgccctgtgttgcccactgaattgccctgtaacacctaagtgtagtggtagcattaagggatagcttttcagccctcaaggttatcaggagcatttgtatcactgctataaataaagtagtatcacttgtcat

SEQ ID NO: 26673 - protein, 78 aa, Homo sapiens
MRLLGAVQKGWIRCNTTIRKSGFGGITMLFTGYFVLCCSWSFRRLKKLCRPLPWKSTVPPCIGVAKTTGDCRSKTCLD

SEQ ID NO: 26674 - DNA, 1963 bp, Homo sapiens
aggctgacattcacgtttcattctgccacactcgggaacggtgatcggggaagcatggggatccgggagaagcacccacaaaactagcatcctcctggaggagctcggtttctttgttggaacgaagctcaactcatataaggagtttggaaccccctgccggacttacaacctccaacttctctctaatgaggctcttgggagctgtacaaaaaggctggatcaggtgcaacaccaccataaggaagagtggattcggtggcatcacgatgctcttcacaggatacttcgtcctgtgttgtagctggagtttcagacgtctgaaaaaattgtgccgacccctgccctggaagagcacagtacctccatgcattggtgtggcgaagacgactggggattgccgctctaaaacatgtttggattaggaagcacgtttaagtaggagaagccttcgtgacttctctctagtgccttcgtgccctgtgttgcccactgaattgccctgtaacacctaagtgtagtggtagcattaagggatagcttttcagccctcaaggttatcaggagcatttgtatcactgctataaataaagtagtatcacttgtcataatcagggtgctgaaacataatgaaaaggtttaacttagtcacagtaaatattttatatccctgaaaataagttatttaatgagaatagaactatttaatgatccatgagtcctaaaaggatatctgccttgtattgccaagtttaaggcaaaggtgagatcctgtattaataagaagacagcttttttgtttgacattggtaagtaccaagaattctaactcacatatagtaggaaacaacaaaaagtctccactgacttctttgaattagatactgagaatccacaatacagtagtgtggataactttcaagaagccattggaaacatctccacattctgggatgacttgtaaatgtctacagagtaatggaaggaaaggcttccttgtctgctcattgctgccacctgggttgggaaaataattgaagatgttttctcaagtccttcaagaatctcttcttaatgttcagaatagtttaagagcgttgttgaggtaaactgatagctgattattttctgagatttagatctaaacaaactcagcatgacgaggaagcacacttcacagctccagggtgcaatactgatgtaaagttgcctcgtgaggatacatttttcgctcatgtatgcaaaattcctatcagttcatttgcacagccagttccaatcatgtatgtgatcaccagattaaaagcttcatccagaaagacaagactcctcagaacgaatagtagacaagtaagactgctacccacagaagccagtacgcttcaggtgtgaggcggggtaactactcatctcttcacagagccaaggaaagaaaaagaacgtctctaacatgatttaccattttaaacagccttataagttttgtctcttaaaatcatgctgcagaaggagggggtaaaagtcgtgttctgccctgtctgtggcattggagtgccccgctaggtaagaagcaacgcttagatcttgcttccaggcagcagcttgaattcccgaatcttcctgcaaggtgcatacaaatgcagcgtgagaatccatacacgtaatccatattcaccttcccatccatcccgcagaagaggcatggtgacacccaggctactgtccatgcttgagaggacgtatttgaaggttctgttactacaagttgggaatattcacggacatgcctgaataccccggctgtaactcacacgtggtctgtgtaagtggattaacctcggggcggccttgtttaatcctgaataatatctgaaagactgagtttacttgggaatgtgtagtttttctaatgcacattaaaatttattttagctgttaaaaataaaatcattttattatcagc

SEQ ID NO: 26675 - protein, 78 aa, Homo sapiens; identical to SEQ ID NO: 26673

SEQ ID NO: 26676 - DNA, 2043 bp, Homo sapiens
aggctgacattcacgtttcattctgccacactcgggaacggtgatcggggaagcatggggatccgggagaagcacccacaaaactagcatcctcctggaggagctcggtttctttgttggaacgaagctcaactcatataaggagtttggaaccccctgccggacttacaacctccaacttctctctaatgaggctcttgggagctgtacaaaaaggctggatcaggtgcaacaccaccataaggaagagtggattcggtggcatcacgatgctcttcacaggatacttcgtcctgtgttgtagctggagtttcagacgtctgaaaaaattgtgccgacccctgccctggaagagcacagtacctccatgcattggtgtggcgaagacgactggggattgccgctctaaaacatgtttggattaggaagcacgtttaagtaggagaagccttcgtgacttctctctagtgccttcgtgccctgtgttgcccactgaattgccctgtaacacctaagtgtagtggtagcattaagggatagcttttcagccctcaaggttatcaggagcatttgtatcactgctataaataaagtagtatcacttgtcataatcagggtgctgaaacataatgaaaaggtttaacttagtcacagtaaatattttatatccctgaaaataagttatttaatgagaatagaactatttaatgatccatgagtcctaaaaggatatctgccttgtattgccaagtttaaggcaaaggtgagatcctgtattaataagaagacagcttttttgtttgacattggtaagtaccaagaattctaactcacatatagtaggaaacaacaaaaagtctccactgacttctttgaattagatactgagaatccacaatacagtagtgtggataactttcaagaagccattggaaacatctccacattctgggatgacttgtaaatgtctacagagtaatggaaggaaaggcttccttgtctgctcattgctgccacctgggttgggaaaataattgaagatgttttctcaagtccttcaagaatctcttcttaatgttcagaatagtttaagagcgttgttgaggtaaactgatagctgattattttctgagatttagatctaaacaaactcagcatgacgaggaagcacacttcacagctccagggtgcaatactgatgtaaagttgcctcgtgaggatacatttttcgctcatgtatgcaaaattcctatcagttcatttgcacagccagttccaatcatgtatgtgatcaccagattaaaagcttcatccagaaagacaagactcctcagaacgaatagtagacaagtaagactgctacccacagaagccagtacgcttcaggtgtgaggcggggtaactactcatctcttcacagagccaaggaaagaaaaagaacgtctctaacatgatttaccattttaaacagccttataagttttgtctcttaaaatcatgctgcagaaggagggggtaaaagtcgtgttctgccctgtctgtggcattggagtgccccgctaggtaagaagcaacgcttagatcttgcttccaggcagcagcttgaattcccgaatcttcctgcaaggtgcatacaaatgcagcgtgagaatccatacacgtaatccatattcaccttcccatccatcccgcagaagaggcatggtgacacccaggctactgtccatgcttgagaggacgtatttgaaggttctgttactacaagttgggaatattcacggacatgcctgaataccccggctgtaactcacacgtggtctgtgtaagtggattaacctcggggcggccttgtttaatcctgaataatatctgaaagactgagtttacttgggaatgtgtagtttttctaatgcacattaaaatttattttagctgttaaaaataaaatcattttattatcagcagactcttttatactttatggggcatctacatactacttccgccactcttcataataaaattatttgtaaaatataaaaa

SEQ ID NO: 26677 - protein, 78 aa, Homo sapiens; identical to SEQ ID NO: 26673

SEQ ID NO: 26678 - DNA, 343 bp, Homo sapiens
ggggttttacagtgttagccaggatggtctcaatctcctgacgtcgtgatccacccacctcagcctcccaaagtgctgggattacaggcgtgagccaccgcgcccggcctgcataagccctcttttctggttctgcttaagttattcatgcactgaacataaataggaaatgtttgctggccaataatagcgatagggtgatagaacaggcatgttgactgtgggcaagtcacaatcataaaaggagaaagtcacgcttttagctgaggcaggagaatcactcgaacccaggaggtagaggttgcagtgagccaagatcatgccactgcactccagcctgggc

SEQ ID NO: 26679 - protein, 38 aa, Homo sapiens
STHLSLPKCWDYRREPPRPACISPLFWFCLSYSCTEHK

SEQ ID NO: 26680 - DNA, 312 bp, Homo sapiens
acagctttacagtatctggcatgccctggtgaatgagctattgcctggggtttctgggttttatttttttgagatacagttttgctcttgttgcccaggcagaggttgcagtgagccgagatcgcgccactactccagcctgggcaacaagtgaaactgcatctcaaaaaaaaaaaaaaaaaaaaaaaaccaccagtatttttgtacaattaaaacaaaaagcccactttcagatgaaaacttcaggtgtaaaagtacaagataacgatgaattctgaaggccagcataattcacacactggacttcttaag

SEQ ID NO: 26681 - protein, 81 aa, Homo sapiens
MSYCLGFLGFIFLRYSFALVAQAEVAVSRDRATTPAWATSETASQKKKKKKKTTSIFVQLKQKAHFQMKTSGVKVQDNDEF

SEQ ID NO: 26682 - DNA, 1302 bp, Homo sapiens
tgccttcgtgccctgtgttgcccactgaattgccctgtaacacctaagtgtagtggtagcattaagggatagcttttcagccctcaaggttatcaggagcatttgtatcactgctataaataaagtagtatcacttgtcataatcagggtgctgaaacataatgaaaaggtttaacttagtcacagtaaatattttatatccctgaaaataagttatttaatgagaatagaactatttaatgatccatgagtcctaaaaggatatctgccttgtattgccaagtttaaggcaaaggtgagatcctgtattaataagaagacagcttttttgtttgacattggtaagtaccaagaattctaactcacatatagtaggaaacaacaaaaagtctccactgacttctttgaattagatactgagaatccacaatacagtagtgtggataactttcaagaagccattggaaacatctccacattctgggatgacttgtaaatgtctacagagtaatggaaggaaaggcttccttgtctgctcattgctgccacctgggttgggaaaataattgaagatgttttctcaagtccttcaagaatctcttcttaatgttcagaatagtttaagagcgttgttgaggtaaactgatagctgattattttctgagatttagatctaaacaaactcagcatgacgaggaagcacacttcacagctccagggtgcaatactgatgtaaagttgcctcgtgaggatacatttttcgctcatgtatgcaaaattcctatcagttcatttgcacagccagttccaatcatgtatgtgatcaccagattaaaagcttcatccagaaagacaagactcctcagaacgaatagtagacaagtaagactgctacccacagaagccagtacgcttcaggtgtgaggcggggtaactactcatctcttcacagagccaaggaaagaaaaagaacgtctctaacatgatttaccattttaaacagccttataagttttgtctcttaaaatcatgctgcagaaggagggggtaaaagtcgtgttctgccctgtctgtggcattggagtgccccgctaggtaagaagcaacgcttagatcttgcttccaggcagcagcttgaattcccgaatcttcctgcaaggtgcatacaaatgcagcgtgagaatccatacacgtaatccatattcaccttcccatccatcccgcagaagaggcatggtgacacccaggctactgtccatgcttgagaggacgtatttgaaggttttgggaatgtgtagtttt

SEQ ID NO: 26683 - protein, 36 aa, Homo sapiens
MYVITRLKASSRKTRLLRTNSRQVRLLPTEASTLQV

SEQ ID NO: 26684 - DNA, 1374 bp, Homo sapiens
atgcaagaggtcattgcggggctagagcggttcacctttgccttcgagaaggatgtcgagatgcagaagggcactgggctcctgcctttccagggcatggacaagtcggcctcagctgtgtgcaacttcttcactaaagggctctgtgagaaagggaaactctgccccttccgacatgaccgaggggagaagatggtggtatgcaagcactggctccgggggctctgcaagaagggtgatcactgcaagttcctgcaccagtatgacctcaccaggatgcctgagtgctacttctactccaagtttggtcctctgtgtaaataccgccatgtccccagaataatgtgtctcaactatttagttggcttctgccccgagggacccaagtgccaatttgctcataacagaaccttcaaatacgtcctctcaagcatggacagtagcctgggtgtcaccatgcctcttctgcgggatggatgggaaggtgaatatggattacgtgtatggattctcacgctgcatttgtatgcaccttgcaggaagattcgggaattcaagctgctgcctggaagcaagatctaagcgttgcttcttacctagcggggcactccaatgccacagacagggcagaacacgacttttaccccctccttctgcagcatgattttaagagacaaaacttataaggctgtttaaaatggtaaatcatgttagagacgttctttttctttccttggctctgtgaagagatgagtagttaccccgcctcacacctgaagcgtactggcttctgtgggtagcagtcttacttgtctactattcgttctgaggagtcttgtctttctggatgaagcttttaatctggtgatcacatacatgattggaactggctgtgcaaatgaactgataggaattttgcatacatgagcgaaaaatgtatcctcacgaggcaactttacatcagtattgcaccctggagctgtgaagtgtgcttcctcgtcatgctgagtttgtttagatctaaatctcagaaaataatcagctatcagtttacctcaacaacgctcttaaactattctgaacattaagaagagattcttgaaggacttgagaaaacatcttcaattattttcccaacccaggtggcagcaatgagcagacaaggaagcctttccttccattactctgtagacatttacaagtcatcccagaatgtggagatgtttccaatggcttcttgaaagttatccacactactgtattgtggattctcagtatctaattcaaagaagtcagtggagactttttgttgtttcctactatatgtgagttagaattcttggtacttaccaatgtcaaacaaaaaagctgtct

SEQ ID NO: 26685 - protein, 193 aa, Homo sapiens
MQEVIAGLERFTFAFEKDVEMQKGTGLLPFQGMDKSASAVCNFFTKGLCEKGKLCPFRHDRGEKMVVCKHWLRGLCKKGDHCKFLHQYDLTRMPECYFYSKFGPLCKYRHVPRIMCLNYLVGFCPEGPKCQFAHNRTFKYVLSSMDSSLGVTMPLLRDGWEGEYGLRVWILTLHLYAPCRKIREFKLLPGSKI

SEQ ID NO: 26686 - DNA, 1163 bp, Homo sapiens
aacacacttgtcaaggccacagggttctgatgaatcttgttttcttcttctgccctgctttcttccaaaaaggattagaggcagcttacaaaaattcataaaatacaataggataaaaatagatcagagagaaaacaacactggaacacatggtacaatgaaccaagagggtaggacacagaaatgttctttggctggggctccacaatcctcaaaggtggactgcaaacaggattctgagcttcgtatcagtcaaaacaaagagggaaatctgccggttttgagactcacaaagtccacaagattaaaaccaaccctggccgggtgcagtggctcatgcctgtaatcctagcactttgggagaccaaggcgggtggatcacatgaggccaggagttcgagaccagcctggtcaacatggtgaaactccgcttaaaattagctgggcgtggtggcagacacctgtaatcccagctactagggagactgaggcaggggactcacctaagcctgggaggtggaggttgcagtgagccgagattgtgccactgcactccaacctgggcaacagagcaggattctgactcaattaaaaagcaaaataaaacactcaacctagaagcagcgcagctatttctgacactaaagtctgagaggaattctcgtgggacctttgaagggatgacgggtagtgtcccaagcaacaccgtcaacgacagtccttttttgttttagagacagggtcactcagtcttgtccagcctgggcaacagggtgagaccctgtctcaaaaaaaaaagtcccctgacattgccaaatgccctattaggggctgaaaaccactgctcataaaggaggagtgagccactttcttaaaaggttggtgcaaaagtaattgagggttgggtacggtggcttacgcctgtaatcccagcactttgggaggccaaggagggcggatcatttgaggtcaagagttcgagaccagcctggccaacatggcaaaaccctgtctctgctaaaaatacaaaaattagctgggcgtggtggcgcaagcctataaccacagctacttgggaggctgatgcaggagagttgcttgaacccgggaggcggaagttgcaatgagccaagatcatgccactgcactccaggatctgtctc

SEQ ID NO: 26687 - protein, 62 aa, Homo sapiens
MNQEGRTQKCSLAGAPQSSKVDCKQDSELRISQNKEGNLPVLRLTKSTRLKPTLAGCSGSCL

SEQ ID NO: 26688 - DNA, 1500 bp, Homo sapiens
gaggatgaggggtgggcagcagcggcccccagccccggctcagcccgcagcatgggcagccacaccacacgggacagcagctccctctccagctgcacctcaggcatcctggaggagcgcagccctgccttccgggggccggacagggcccgggctgctgtctcaagacagccagacaaggagttctccttcatggatgaggaggaggaggatgaaatccgtgtgtgaggcggacagtgggtggccaccgggagctcttggctgcatcttctccctgcccccaccccactatgacctttgaccctacggcgcaggggcagccaggacccttgattcagaccatggaccctggaccttgtagatgagggacactggcctggccctcgggtcttcggaggacgtagggggctggcatgggtgccgactggctgcctgacttcatcatgctccctgcacttaggctgcgtgggacaagggctgtgttgtcacagcaggaataggttttcctctgttggcctccctttcctccaccctggcctcaaatggatgccagatgccaaccccagttctggccacgtacagccagcgggtcagcccagaggcagcctcagctccagggctaaggactctcggctcccattttctctgctggcgtttctgctgtgcccagcagtggctgctggggaagcagctgcagcaggagggagacggtcttgcctctcagcccctccctgccccaccccagctcctgccctggaaatctggagccccttggagctgagctggacggggggccagctgcgagcatgtgcactaaacgcagccctttccaggggaagagaacaggatggagaatggaaggaaagccccccaggcttcgtgaattgcaagaagggacccttccaggatgacactaggaacagggctagggcactcgctcagtccctaggggcttgtttgttctttattattgtgtttaaatccttatagagcaatatcaggatggtgttaataggtctgcctcagaatgagaatcaatccttttagaaaacctttatactaagcctcctcttcaaaattcacagtggccaattccagattctaaactgatttttttcatgatattgtcaaaacagtgaggaaacattaaaaaaaaagccctaaagcacgcctggtgtctgtctctgctttttgggagggctatttcaggatgggggtggggtctggacccaggtcctagagctgtccaggggggcctgaggtggcttctgtctctctgtccgtgaggacccgcccttcctgcgatgctgtctgcctgggcaggccccttcagagtctggggactcaggtgtccctaactgccatctcttggaagcccttggcacttggtcgcttagctgttctgtgcctccctctcctgctctgtaaaatgggtatcctgccactcttagagggttgaggcacagaaacagtgacatgggctttttgtgggggaggggg

SEQ ID NO: 26689 - protein, 147 aa, Homo sapiens
MPDANPSSGHVQPAGQPRGSLSSRAKDSRLPFSLLAFLLCPAVAAGEAAAAGGRRSCLSAPPCPTPAPALEIWSPLELSWTGGQLRACALNAALSRGREQDGEWKESPPGFVNCKKGPFQDDTRNRARALAQSLGACLFFIIVFKSL

SEQ ID NO: 26690 - DNA, 3212 bp, Homo sapiens
acaaacgccggcgctgacaggggccgccagcccctccgccgcgcggagcccacgaaggggacagcgcagccggcccagagctcgggtctccggggaccgagccttatgatctcctcattgcgtccccctctgcccactggacttggacttcagatctgaccccagacctgccggctacctcgggagggcccacctccccgcccatccagcaagatgccaatcctcaagcaactggtgtccagctcggtgcactccaagcgccgttcccgagcggacctcacggccgagatgatcagcgccccgctgggcgacttccgccacaccatgcacgttggccgggccggagacgcctttggggacacctccttcctcaatagcaaggccgcggagaagggcaccagtaagctgcccaagagcctgtcatccagccccgtgaagaaggccaatgacggggagggcggcgatgaggaggcgggcacggaggaggcagtgccccgtcggaatggggccgcgggtccacattcccctgaccccctcctcgatgagcaggcctttggggatctgacagatctgcctgtcgtgcccaaggccacgtacgggctgaagcatgcggagtccatcatgtccttccacatcgacctggggccctccatgctgggtgacgtcctcagcatcatggacaaggaggagtgggaccccgaggagggggagggtggttaccatggcgatgagggcgccgctggcaccatcacccaggctcccccgtacgccgtggcggcccctcccctggcaaggcaggaaggcaaggctggcccagacttgccctccctcccctcccatgctctggaggatgaggggtgggcagcagcggcccccagccccggctcagcccgcagcatgggcagccacaccacacgggacagcagctccctctccagctgcacctcaggcatcctggaggagcgcagccctgccttccgggggccggacagggcccgggctgctgtctcaagacagccagacaaggagttctccttcatggatgaggaggaggaggatgaaatccgtgtgtgaggcggacagtgggtggccaccgggagctcttggctgcatcttctccctgcccccaccccactatgacctttgaccctacggcgcaggggcagccaggacccttgattcagaccatggaccctggaccttgtagatgagggacactggcctggccctcgggtcttcggaggacgtagggggctggcatgggtgccgactggctgcctgacttcatcatgctccctgcacttaggctgcgtgggacaagggctgtgttgtcacagcaggaataggttttcctctgttggcctccctttcctccaccctggcctcaaatggatgccagatgccaaccccagttctggccacgtacagccagcgggtcagcccagaggcagcctcagctccagggctaaggactctcggctcccattttctctgctggcgtttctgctgtgcccagcagtggctgctggggaagcagctgcagcaggagggagacggtcttgcctctcagcccctccctgccccaccccagctcctgccctggaaatctggagccccttggagctgagctggacggggggccagctgcgagcatgtgcactaaacgcagccctttccaggggaagagaacaggatggagaatggaaggaaagccccccaggcttcgtgaattgcaagaagggacccttccaggatgacactaggaacagggctagggcactcgctcagtccctaggggcttgtttgttctttattattgtgtttaaatccttatagagcaatatcaggatggtgttaataggtctgcctcagaatgagaatcaatccttttagaaaacctttatactaagcctcctcttcaaaattcacagtggcgattagcggactggagtctggtggcgattagcggactggagtctggggacatccgtggcaaagacaccagctcaactttagtgcttcccaactttatttagaatgacatggggtgggtgtctggtgtgtgtgttttccctacgcacctcccatagctattaacaactgaggaaggccagtgcagaatatttttggagaacgattttttttttaaataatatatcattcctatggggggaaagccttttttttctttttggctgagttattccctccctcccctcaataccctcagtactgactacttccctttcttttctcaggcctccccccaccgacttttgaggccagggttggccagatttagcaaaaccaaaacagagtgctgagttaaacgcaaatttcaggtaaacaaaagataattttctagcattaatatgccccacgcaatatttggaacacttatgtgaaaaatgatttgtttttctgaaattcacgtttctctctgagtcctgtaactgtccccgaggggattgagcagaagctcgggtatgagccctgaggttgactgccggttatttttctgtcctgggaacagcctgacccacctccctgtctccatgtagccagtgaggggagggggagacacagaaccaaccacagccaggggcgtccccatggcgactgtggcccggcccctcctctcttgcctgactctcctctcttgcctgactctagacactaacttagttccaggttcggtgccctgttggtgctcctgtttccaatagcttaggtcccatggtgggggaggaacctcaggggctatgcagcccccgccagctgccctcgaatcccgtccaggccaattccagattctaaactgatttttttcatgatattgtcaaaacagtgaggaaacattaaaaaaaaagccctaaagcacgcctggtgtctgtctctgctttttgggagggctatttcaggatgggggtggggtctggacccaggtcctagagctgtccaggggggcctgaggtggcttctgtctctctgtccgtgaggacccgcccttcctgcgatgctgtctgcctgggcaggccccttcagagtctggggactcaggtgtccctaactgccatctcttggaagcccttggcacttggtcgcttagctgttctgtgcctccctctcctgctctgtaaaatgggtatcctgccactcttagagggttgaggcacagaaacagtgacatgggctttttgtgggggaggggg

SEQ ID NO: 26691 - protein, 286 aa, Homo sapiens
MPILKQLVSSSVHSKRRSRADLTAEMISAPLGDFRHTMHVGRAGDAFGDTSFLNSKAAEKGTSKLPKSLSSSPVKKANDGEGGDEEAGTEEAVPRRNGAAGPHSPDPLLDEQAFGDLTDLPVVPKATYGLKHAESIMSFHIDLGPSMLGDVLSIMDKEEWDPEEGEGGYHGDEGAAGTITQAPPYAVAAPPLARQEGKAGPDLPSLPSHALEDEGWAAAAPSPGSARSMGSHTTRDSSSLSSCTSGILEERSPAFRGPDRARAAVSRQPDKEFSFMDEEEEDEIRV

SEQ ID NO: 26692 - DNA, 3423 bp, Homo sapiens
aacaaacgccggcgctgacaggggccgccagcccctccgccgcgcggagcccacgaaggggacagcgcagccggcccagagctcgggtctccggggaccgagccttatgatctcctcattgcgtccccctctgcccactggacttggacttcagatctgaccccagacctgccggctacctcgggagggcccacctccccgcccatccagcaagatgccaatcctcaagcaactggtgtccagctcggtgcactccaagcgccgttcccgagcggacctcacggccgagatgatcagcgccccgctgggcgacttccgccacaccatgcacgttggccgggccggagacgcctttggggacacctccttcctcaatagcaaggctggcgagcccgacggcgagtccttggacgaacagccctcttcttcatcttccaaacgcagtctcctgtccaggaagttccggggcagcaagcggtcacagtcggtgaccaggggggagcgggagcagcgtgacatgctgggctccctgcgggactcggccctgtttgtcaagaatgccatgtccctgccccagctcaatgagaaggaggccgcggagaagggcaccagtaagctgcccaagagcctgtcatccagccccgtgaagaaggccaatgacggggagggcggcgatgaggaggcgggcacggaggaggcagtgccccgtcggaatggggccgcgggtccacattcccctgaccccctcctcgatgagcaggcctttggggatctgacagatctgcctgtcgtgcccaaggccacgtacgggctgaagcatgcggagtccatcatgtccttccacatcgacctggggccctccatgctgggtgacgtcctcagcatcatggacaaggaggagtgggaccccgaggagggggagggtggttaccatggcgatgagggcgccgctggcaccatcacccaggctcccccgtacgccgtggcggcccctcccctggcaaggcaggaaggcaaggctggcccagacttgccctccctcccctcccatgctctggaggatgaggggtgggcagcagcggcccccagccccggctcagcccgcagcatgggcagccacaccacacgggacagcagctccctctccagctgcacctcaggcatcctggaggagcgcagccctgccttccgggggccggacagggcccgggctgctgtctcaagacagccagacaaggagttctccttcatggatgaggaggaggaggatgaaatccgtgtgtgaggcggacagtgggtggccaccgggagctcttggctgcatcttctccctgcccccaccccactatgacctttgaccctacggcgcaggggcagccaggacccttgattcagaccatggaccctggaccttgtagatgagggacactggcctggccctcgggtcttcggaggacgtagggggctggcatgggtgccgactggctgcctgacttcatcatgctccctgcacttaggctgcgtgggacaagggctgtgttgtcacagcaggaataggttttcctctgttggcctccctttcctccaccctggcctcaaatggatgccagatgccaaccccagttctggccacgtacagccagcgggtcagcccagaggcagcctcagctccagggctaaggactctcggctcccattttctctgctggcgtttctgctgtgcccagcagtggctgctggggaagcagctgcagcaggagggagacggtcttgcctctcagcccctccctgccccaccccagctcctgccctggaaatctggagccccttggagctgagctggacggggggccagctgcgagcatgtgcactaaacgcagccctttccaggggaagagaacaggatggagaatggaaggaaagccccccaggcttcgtgaattgcaagaagggacccttccaggatgacactaggaacagggctagggcactcgctcagtccctaggggcttgtttgttctttattattgtgtttaaatccttatagagcaatatcaggatggtgttaataggtctgcctcagaatgagaatcaatccttttagaaaacctttatactaagcctcctcttcaaaattcacagtggcgattagcggactggagtctggtggcgattagcggactggagtctggggacatccgtggcaaagacaccagctcaactttagtgcttcccaactttatttagaatgacatggggtgggtgtctggtgtgtgtgttttccctacgcacctcccatagctattaacaactgaggaaggccagtgcagaatatttttggagaacgattttttttttaaataatatatcattcctatggggggaaagccttttttttctttttggctgagttattccctccctcccctcaataccctcagtactgactacttccctttcttttctcaggcctccccccaccgacttttgaggccagggttggccagatttagcaaaaccaaaacagagtgctgagttaaacgcaaatttcaggtaaacaaaagataattttctagcattaatatgccccacgcaatatttggaacacttatgtgaaaaatgatttgtttttctgaaattcacgtttctctctgagtcctgtaactgtccccgaggggattgagcagaagctcgggtatgagccctgaggttgactgccggttatttttctgtcctgggaacagcctgacccacctccctgtctccatgtagccagtgaggggagggggagacacagaaccaaccacagccaggggcgtccccatggcgactgtggcccggcccctcctctcttgcctgactctcctctcttgcctgactctagacactaacttagttccaggttcggtgccctgttggtgctcctgtttccaatagcttaggtcccatggtgggggaggaacctcaggggctatgcagcccccgccagctgccctcgaatcccgtccaggccaattccagattctaaactgatttttttcatgatattgtcaaaacagtgaggaaacattaaaaaaaaagccctaaagcacgcctggtgtctgtctctgctttttgggagggctatttcaggatgggggtggggtctggacccaggtcctagagctgtccaggggggcctgaggtggcttctgtctctctgtccgtgaggacccgcccttcctgcgatgctgtctgcctgggcaggccccttcagagtctggggactcaggtgtccctaactgccatctcttggaagcccttggcacttggtcgcttagctgttctgtgcctccctctcctgctctgtaaaatgggtatcctgccactcttagagggttgaggcacagaaacagtgacatgggctttttgtgggggaggggg

SEQ ID NO: 26693 - protein, 356 aa, Homo sapiens; identical to SEQ ID NO: 3565

SEQ ID NO: 26694 - DNA, 2762 bp, Homo sapiens
ccccagccggggttacaaaactgccccctgcccccggcgcgtcccccaggagccatcctgcccgcggggatcccgtcagccgccttatgatctcctcattgcgtccccctctgcccactggacttggacttcagatctgaccccagacctgccggctacctcgggagggcccacctccccgcccatccagcaagatgccaatcctcaagcaactggtgtccagctcggtgcactccaagcgccgttcccgagcggacctcacggccgagatgatcagcgccccgctgggcgacttccgccacaccatgcacgttggccgggccggagacgcctttggggacacctccttcctcaatagcaaggctggcgagcccgacggcgagtccttggacgaacagccctcttcttcatcttccaaacgcagtctcctgtccaggaagttccggggcagcaagcggtcacagtcggtgaccaggggggagcgggagcagcgtgacatgctgggctccctgcgggactcggccctgtttgtcaagaatgccatgtccctgccccagctcaatgagaaggaggccgcggagaagggcaccagtaagctgcccaagagcctgtcatccagccccgtgaagaaggccaatgacggggagggcggcgatgaggaggcgggcacggaggaggcagtgccccgtcggaatggggccgcgggtccacattcccctgaccccctcctcgatgagcaggcctttggggatctgacagatctgcctgtcgtgcccaaggccacgtacgggctgaagcatgcggagtccatcatgtccttccacatcgacctggggccctccatgctgggtgacgtcctcagcatcatggacaaggaggagtgggaccccgaggagggggagggtggttaccatggcgatgagggcgccgctggcaccatcacccaggctcccccgtacgccgtggcggcccctcccctggcaaggcaggaaggcaaggctggcccagacttgccctccctcccctcccatgctctggaggatgaggggtgggcagcagcggcccccagccccggctcagcccgcagcatgggcagccacaccacacgggacagcagctccctctccagctgcacctcaggcatcctggaggagcgcagccctgccttccgggggccggacagggcccgggctgctgtctcaagacagccagacaaggagttctccttcatggatgaggaggaggaggatgaaatccgtgtgtgaggcggacagtgggtggccaccgggagctcttggctgcatcttctccctgcccccaccccactatgacctttgaccctacggcgcaggggcagccaggacccttgattcagaccatggaccctggaccttgtagatgagggacactggcctggccctcgggtcttcggaggacgtagggggctggcatgggtgccgactggctgcctgacttcatcatgctccctgcacttaggctgcgtgggacaagggctgtgttgtcacagcaggaataggttttcctctgttggcctccctttcctccaccctggcctcaaatggatgccagatgccaaccccagttctggccacgtacagccagcgggtcagcccagaggcagcctcagctccagggctaaggactctcggctcccattttctctgctggcgtttctgctgtgcccagcagtggctgctggggaagcagctgcagcaggagggagacggtcttgcctctcagcccctccctgccccaccccagctcctgccctggaaatctggagccccttggagctgagctggacggggggccagctgcgagcatgtgcactaaacgcagccctttccaggggaagagaacaggatggagaatggaaggaaagccccccaggcttcgtgaattgcaagaagggacctggtgtgtgtgttttccctacgcacctcccatagctattaacaactgaggaaggccagtgcagaatatttttggagaacgattttttttttaaataatatatcattcctatggggggaaagccttttttttctttttggctgagttattccctccctcccctcaataccctcagtactgactacttccctttcttttctcaggcctccccccaccgacttttgaggccagggttggccagatttagcaaaaccaaaacagagtgctgagttaaacgcaaatttcaggtaaacaaaagataattttctagcattaatatgccccacgcaatatttggaacacttatgtgaaaaatgatttgtttttctgaaattcacgtttctctctgagtcctgtaactgtccccgaggggattgagcagaagctcgggtatgagccctgaggttgactgccggttatttttctgtcctgggaacagcctgacccacctccctgtctccatgtagccagtgaggggagggggagacacagaaccaaccacagccaggggcgtccccatggcgactgtggcccggcccctcctctcttgcctgactctcctctcttgcctgactctagacactaacttagttccaggttcggtgccctgttggtgctcctgtttccaatagcttaggtcccatggtgggggaggaacctcaggggctatgcagcccccgccagctgccctcgaatcccgtccaggccaattccagattctaaactgatttttttcatgatattgtcaaaacagtgaggaaacattaaaaaaaaagccctaaagcacg

SEQ ID NO: 26695 - protein, 128 aa, Homo sapiens
MPDANPSSGHVQPAGQPRGSLSSRAKDSRLPFSLLAFLLCPAVAAGEAAAAGGRRSCLSAPPCPTPAPALEIWSPLELSWTGGQLRACALNAALSRGREQDGEWKESPPGFVNCKKGPGVCVFPTHLP

SEQ ID NO: 26696 - DNA, 2882 bp, Homo sapiens
acaaacgccggcgctgacaggggccgccagcccctccgccgcgcggagcccacgaaggggacagcgcagccggcccagagctcgggtctccggggaccgagccttatgatctcctcattgcgtccccctctgcccactggacttggacttcagatctgaccccagacctgccggctacctcgggagggcccacctccccgcccatccagcaagatgccaatcctcaagcaactggtgtccagctcggtgcactccaagcgccgttcccgagcggacctcacggccgagatgatcagcgccccgctgggcgacttccgccacaccatgcacgttggccgggccggagacgcctttggggacacctccttcctcaatagcaaggccgcggagaagggcaccagtaagctgcccaagagcctgtcatccagccccgtgaagaaggccaatgacggggagggcggcgatgaggaggcgggcacggaggaggcagtgccccgtcggaatggggccgcgggtccacattcccctgaccccctcctcgatgagcaggcctttggggatctgacagatctgcctgtcgtgcccaaggccacgtacgggctgaagcatgcggagtccatcatgtccttccacatcgacctggggccctccatgctgggtgacgtcctcagcatcatggacaaggaggagtgggaccccgaggagggggagggtggttaccatggcgatgagggcgccgctggcaccatcacccaggctcccccgtacgccgtggcggcccctcccctggcaaggcaggaaggcaaggctggcccagacttgccctccctcccctcccatgctctggaggatgaggggtgggcagcagcggcccccagccccggctcagcccgcagcatgggcagccacaccacacgggacagcagctccctctccagctgcacctcaggcatcctggaggagcgcagccctgccttccgggggccggacagggcccgggctgctgtctcaagacagccagacaaggagttctccttcatggatgaggaggaggaggatgaaatccgtgtgtgaggcggacagtgggtggccaccgggagctcttggctgcatcttctccctgcccccaccccactatgacctttgaccctacggcgcaggggcagccaggacccttgattcagaccatggaccctggaccttgtagatgagggacactggcctggccctcgggtcttcggaggacgtagggggctggcatgggtgccgactggctgcctgacttcatcatgctccctgcacttaggctgcgtgggacaagggctgtgttgtcacagcaggaataggttttcctctgttggcctccctttcctccaccctggcctcaaatggatgccagatgccaaccccagttctggccacgtacagccagcgggtcagcccagaggcagcctcagctccagggctaaggactctcggctcccattttctctgctggcgtttctgctgtgcccagcagtggctgctggggaagcagctgcagcaggagggagacggtcttgcctctcagcccctccctgccccaccccagctcctgccctggaaatctggagccccttggagctgagctggacggggggccagctgcgagcatgtgcactaaacgcagccctttccaggggaagagaacaggatggagaatggaaggaaagccccccaggcttcgtgaattgcaagaagggacccttccaggatgacactaggaacagggctagggcactcgctcagtccctaggggcttgtttgttctttattattgtgtttaaatccttatagagcaatatcaggatggtgttaataggtctgcctcagaatgagaatcaatccttttagaaaacctttatactaagcctcctcttcaaaattcacagtggcgattagcggactggagtctggtggcgattagcggactggagtctggggacatccgtggcaaagacaccagctcaactttagtgcttcccaactttatttagaatgacatggggtgggtgtctggtgtgtgtgttttccctacgcacctcccatagctattaacaactgaggaaggccagtgcagaatatttttggagaacgattttttttttaaataatatatcattcctatggggggaaagccttttttttctttttggctgagttattccctccctcccctcaataccctcagtactgactacttccctttcttttctcaggcctccccccaccgacttttgaggccagggttggccagatttagcaaaaccaaaacagagtgctgagttaaacgcaaatttcaggtaaacaaaagataattttctagcattaatatgccccacgcaatatttggaacacttatgtgaaaaatgatttgtttttctgaaattcacgtttctctctgagtcctgtaactgtccccgaggggattgagcagaagctcgggtatgagccctgaggttgactgccggttatttttctgtcctgggaacagcctgacccacctccctgtctccatgtagccagtgaggggagggggagacacagaaccaaccacagccaggggcgtccccatggcgactgtggcccggcccctcctctcttgcctgactctcctctcttgcctgactctagacactaacttagttccaggttcggtgccctgttggtgctcctgtttccaatagcttaggtcccatggtgggggaggaacctcaggggctatgcagcccccgccagctgccctcgaatcccgtccaggccaattccagattctaaactgatttttttcatgatattgtcaaaacagtgaggaaacattaaaaaaaaagccctaaagcacg

SEQ ID NO: 26697 - protein, 286 aa, Homo sapiens; identical to SEQ ID NO: 26691

SEQ ID NO: 26698 - DNA, 3096 bp, Homo sapiens
ggaaacaaacgccggcgctgacaggggccgccagcccctccgccgcgcggagcccacgaaggggacagcgcagccggcccagagctcgggtctccggggaccgagccttatgatctcctcattgcgtccccctctgcccactggacttggacttcagatctgaccccagacctgccggctacctcgggagggcccacctccccgcccatccagcaagatgccaatcctcaagcaactggtgtccagctcggtgcactccaagcgccgttcccgagcggacctcacggccgagatgatcagcgccccgctgggcgacttccgccacaccatgcacgttggccgggccggagacgcctttggggacacctccttcctcaatagcaaggctggcgagcccgacggcgagtccttggacgaacagccctcttcttcatcttccaaacgcagtctcctgtccaggaagttccggggcagcaagcggtcacagtcggtgaccaggggggagcgggagcagcgtgacatgctgggctccctgcgggactcggccctgtttgtcaagaatgccatgtccctgccccagctcaatgagaaggaggccgcggagaagggcaccagtaagctgcccaagagcctgtcatccagccccgtgaagaaggccaatgacggggagggcggcgatgaggaggcgggcacggaggaggcagtgccccgtcggaatggggccgcgggtccacattcccctgaccccctcctcgatgagcaggcctttggggatctgacagatctgcctgtcgtgcccaaggccacgtacgggctgaagcatgcggagtccatcatgtccttccacatcgacctggggccctccatgctgggtgacgtcctcagcatcatggacaaggaggagtgggaccccgaggagggggagggtggttaccatggcgatgagggcgccgctggcaccatcacccaggctcccccgtacgccgtggcggcccctcccctggcaaggcaggaaggcaaggctggcccagacttgccctccctcccctcccatgctctggaggatgaggggtgggcagcagcggcccccagccccggctcagcccgcagcatgggcagccacaccacacgggacagcagctccctctccagctgcacctcaggcatcctggaggagcgcagccctgccttccgggggccggacagggcccgggctgctgtctcaagacagccagacaaggagttctccttcatggatgaggaggaggaggatgaaatccgtgtgtgaggcggacagtgggtggccaccgggagctcttggctgcatcttctccctgcccccaccccactatgacctttgaccctacggcgcaggggcagccaggacccttgattcagaccatggaccctggaccttgtagatgagggacactggcctggccctcgggtcttcggaggacgtagggggctggcatgggtgccgactggctgcctgacttcatcatgctccctgcacttaggctgcgtgggacaagggctgtgttgtcacagcaggaataggttttcctctgttggcctccctttcctccaccctggcctcaaatggatgccagatgccaaccccagttctggccacgtacagccagcgggtcagcccagaggcagcctcagctccagggctaaggactctcggctcccattttctctgctggcgtttctgctgtgcccagcagtggctgctggggaagcagctgcagcaggagggagacggtcttgcctctcagcccctccctgccccaccccagctcctgccctggaaatctggagccccttggagctgagctggacggggggccagctgcgagcatgtgcactaaacgcagccctttccaggggaagagaacaggatggagaatggaaggaaagccccccaggcttcgtgaattgcaagaagggacccttccaggatgacactaggaacagggctagggcactcgctcagtccctaggggcttgtttgttctttattattgtgtttaaatccttatagagcaatatcaggatggtgttaataggtctgcctcagaatgagaatcaatccttttagaaaacctttatactaagcctcctcttcaaaattcacagtggcgattagcggactggagtctggtggcgattagcggactggagtctggggacatccgtggcaaagacaccagctcaactttagtgcttcccaactttatttagaatgacatggggtgggtgtctggtgtgtgtgttttccctacgcacctcccatagctattaacaactgaggaaggccagtgcagaatatttttggagaacgattttttttttaaataatatatcattcctatggggggaaagccttttttttctttttggctgagttattccctccctcccctcaataccctcagtactgactacttccctttcttttctcaggcctccccccaccgacttttgaggccagggttggccagatttagcaaaaccaaaacagagtgctgagttaaacgcaaatttcaggtaaacaaaagataattttctagcattaatatgccccacgcaatatttggaacacttatgtgaaaaatgatttgtttttctgaaattcacgtttctctctgagtcctgtaactgtccccgaggggattgagcagaagctcgggtatgagccctgaggttgactgccggttatttttctgtcctgggaacagcctgacccacctccctgtctccatgtagccagtgaggggagggggagacacagaaccaaccacagccaggggcgtccccatggcgactgtggcccggcccctcctctcttgcctgactctcctctcttgcctgactctagacactaacttagttccaggttcggtgccctgttggtgctcctgtttccaatagcttaggtcccatggtgggggaggaacctcaggggctatgcagcccccgccagctgccctcgaatcccgtccaggccaattccagattctaaactgatttttttcatgatattgtcaaaacagtgaggaaacattaaaaaaaaagccctaaagcacg

SEQ ID NO: 26699 - protein, 356 aa, Homo sapiens; identical to SEQ ID NO: 3565

SEQ ID NO: 26700 - DNA, 2816 bp, Homo sapiens
gctcccagccctgaaagcccgagagccagagggaaacaaacgccggcgctgacaggggccgccagcccctccgccgcgcggagcccacgaaggggacagcgcagccggcccagagctcgggtctccggggaccgagccttatgatctcctcattgcgtccccctctgcccactggacttggacttcagatctgaccccagacctgccggctacctcgggagggcccacctccccgcccatccagcaagatgccaatcctcaagcaactggtgtccagctcggtgcactccaagcgccgttcccgagcggacctcacggccgagatgatcagcgccccgctgggcgacttccgccacaccatgcacgttggccgggccggagacgcctttggggacacctccttcctcaatagcaaggctggcgagcccgacggcgagtccttggacgaacagccctcttcttcatcttccaaacgcagtctcctgtccaggaagttccggggcagcaagcggtcacagtcggtgaccaggggggagcgggagcagcgtgacatgctgggctccctgcgggactcggccctgtttgtcaagaatgccatgtccctgccccagctcaatgagaaggaggccgcggagaagggcaccagtaagctgcccaagagcctgtcatccagccccgtgaagaaggccaatgacggggagggcggcgatgaggaggcgggcacggaggaggcagtgccccgtcggaatggggccgcgggtccacattcccctgaccccctcctcgatgagcaggcctttggggatctgacagatctgcctgtcgtgcccaaggccacgtacgggctgaagcatgcggagtccatcatgtccttccacatcgacctggggccctccatgctgggtgacgtcctcagcatcatggacaaggaggagtgggaccccgaggagggggagggtggttaccatggcgatgagggcgccgctggcaccatcacccaggctcccccgtacgccgtggcggcccctcccctggcaaggcaggaaggcaaggctggcccagacttgccctccctcccctcccatgctctggaggatgaggggtgggcagcagcggcccccagccccggctcagcccgcagcatgggcagccacaccacacgggacagcagctccctctccagctgcacctcaggcatcctggaggagcgcagccctgccttccgggggccggacagggcccgggctgctgtctcaagacagccagacaaggagttctccttcatggatgaggaggaggaggatgaaatccgtgtgtgaggcggacagtgggtggccaccgggagctcttggctgcatcttctccctgcccccaccccactatgacctttgaccctacggcgcaggggcagccaggacccttgattcagaccatggaccctggaccttgtagatgagggacactggcctggccctcgggtcttcggaggacgtagggggctggcatgggtgccgactggctgcctgacttcatcatgctccctgcacttaggctgcgtgggacaagggctgtgttgtcacagcaggaataggttttcctctgttggcctccctttcctccaccctggcctcaaatggatgccagatgccaaccccagttctggccacgtacagccagcgggtcagcccagaggcagcctcagctccagggctaaggactctcggctcccattttctctgctggcgtttctgctgtgcccagcagtggctgctggggaagcagctgcagcaggagggagacggtcttgcctctcagcccctccctgccccaccccagctcctgccctggaaatctggagccccttggagctgagctggacggggggccagctgcgagcatgtgcactaaacgcagccctttccaggggaagagaacaggatggagaatggaaggaaagccccccaggcttcgtgaattgcaagaagggacctggtgtgtgtgttttccctacgcacctcccatagctattaacaactgaggaaggccagtgcagaatatttttggagaacgattttttttttaaataatatatcattcctatggggggaaagccttttttttctttttggctgagttattccctccctcccctcaataccctcagtactgactacttccctttcttttctcaggcctccccccaccgacttttgaggccagggttggccagatttagcaaaaccaaaacagagtgctgagttaaacgcaaatttcaggtaaacaaaagataattttctagcattaatatgccccacgcaatatttggaacacttatgtgaaaaatgatttgtttttctgaaattcacgtttctctctgagtcctgtaactgtccccgaggggattgagcagaagctcgggtatgagccctgaggttgactgccggttatttttctgtcctgggaacagcctgacccacctccctgtctccatgtagccagtgaggggagggggagacacagaaccaaccacagccaggggcgtccccatggcgactgtggcccggcccctcctctcttgcctgactctcctctcttgcctgactctagacactaacttagttccaggttcggtgccctgttggtgctcctgtttccaatagcttaggtcccatggtgggggaggaacctcaggggctatgcagcccccgccagctgccctcgaatcccgtccaggccaattccagattctaaactgatttttttcatgatattgtcaaaacagtgaggaaacattaaaaaaaaagccctaaagcacg

SEQ ID NO: 26701 - protein, 128 aa, Homo sapiens; identical to SEQ ID NO: 26695

SEQ ID NO: 26702 - DNA, 314 bp, Homo sapiens
cattcagagtagaggagtgattttgcaaatctggttagagttccagtagcctcggacacactttccctgaaacttgagagagacagaacctttcttgcagaagacaatgcctcccctgcccctgcaagccaggatgctgccagagtaaacatgaccacatttaaggacgcgaagacaacttctgggttggtgagcagatcgaggtgccaggaaggtggtgcgtgccctgccccccaccccaacacttgaccccacgcatcctcatgcagctcttccgtttggctgttcctgagtcgtatcttttgtaataaacc

SEQ ID NO: 26703 - protein, 32 aa, Homo sapiens
MTTFKDAKTTSGLVSRSRCQEGGACPAPHPNT

SEQ ID NO: 26704 - DNA, 403 bp, Homo sapiens
cattcagagtagaggagtgattttgcaaatctggttagagttccagtagcctcggacacactttccctgaaacttgagagagacagaacctttcttgcagaagacaatgcctcccctgcccctgcaagccaggatgctgccagagtaaacatgaccacatttaaggacgcgaaggtaaatccagcaattccaggcagcaagccagggaagagatggagtctatgagttggctcctatgaacagtcagcctggagatgtgctacaacttctgggttggtgagcagatcgaggtgccaggaaggtggtgcgtgccctgccccccaccccaacacttgaccccacgcatcctcatgcagctcttccgtttggctgttcctgagtcgtatcttttgtaataaaccag

SEQ ID NO: 26705 - protein, 46 aa, Homo sapiens [sequence omitted]

SEQ ID NO: 26706 - DNA, 640 bp, Homo sapiens
gctcccatagcaggattttcatcatttgtttgacatcagaagaggaaaaagcagaaagagaaatggcaccaaactcctccttcacccctcctctcactgcctgccagaaaacaaaaacaccaagaaaccaagtcaacttttcacctcctgagtttatttttccagagattccagggccagcaaagccggcgttcagaaggagggagaaaaccgtgagaggatgtgtgtggccagcagctcttcagctttgagatggtggggttcactgctcccttgggaattacacggagctggggaagtggaacctctactgcccatctcccctgctcaacttctccaccaagcatttggtttatttagaaaaaggaagaaaaacaaaaaacaaaaaactaaagggtgagaatttgcttagcgccttccttgttcctgcatattttttaaaatattgaatccaaggaagagagcccaagggtaggggagaaaccccccacaactgacccctgcctccctgtgctggaattgactttcctgagcatggacaaggaaaggtgaagtctggggagcagaggtgtaaataaggcgactggccttggcactgtgggatgattaggtttaacgcattgtgggcaagataagaatg

SEQ ID NO: 26707 - protein, 59 aa, Homo sapiens [sequence omitted]

SEQ ID NO: 26708 - DNA, 2428 bp, Homo sapiens
tgtcttaggcagtcacttaaaatcatgtttccaaccatttttaatgaagtggaagacagaatccatagtgttctgcttgcacaagtgctaattccttgagcctgtttctctggacggtggttctgtcattggttgtgacagtactttctgcacagtacgtatcttttaatgtagtacagatattttaataaaaagaataaaagagatgctccaaaaggtgtcttttttttttgagactgagtcttgctctgctgcccaggccagaatgcagtggcgtgatctcagctcactgcaacttccatctcccagcttcaagcaattccctgcctcagcttccccagtagctgggattacaggcatgtgccaccacaccagactaatttttgtatttttagtagagacagggtttcaccatgttggctaggctggtctcgaactcctaacctcaggtgatccacccacctcggcctctcaaagtgctggaattacaggcatgagccaccgtgcttggcccgaaagttgtctttttaagaaacttcaagggaggaccaaggcctgcgattcagtgtggagcagggaggatccaacaggcccagccctcagggagcatagtcagaacggggctgggagcgggatttggggcttcccctcacctcccagggcctccatctctgtgctcctgcagacgagggactatgggacatcctcatcaaagacatccccaaggaggtgagctcctacacgttcagcatggacatcctgaagccgggcgtgagctatgacttccgggtcatcgcggtcattgccctggtcggcctcatcttcatcctgcttctggtcttcgtgctcatcatccggggccagagcaagaagtacgccaagaagacagactcggggaacagtgccaagtctggagccctaggccacagcgagatgatgagcttggatgaaagcagcttccctgccctggaactcaacaacaggcggctctccgtcaagaactctttctgccgaaagaacggcctgtacaccaggtctccccccaggcccagcccaggcagcctgcactactcggatgaggatgtcaccaaatacaacgacctcatccctgcagagagcagcagcctgacggagaagccctcagaaatctccgactctcagggaagtgacagcgagtacgaggtcgactcaaaccaccagaaggcccactcctttgtcaaccactacatcagtgaccccacatactacaactcgtggcggcgacagcagaagggcatctcgagggcacaggcctacagctacacggagagcgactcgggtgagccagaccacaccaccgtcaccaacagcaccagcacccagcagggcagcctctttcggcccaaggccagtcggactccaacgccccagaacccccctaaccccccaagtcagcagagcaccctctaccgtccccccagcagcctggccccaggctcccgggctcccatagcaggattttcatcatttgtttgacatcagaagaggaaaaagcagaaagagaaatggcaccaaactcctccttcacccctcctctcactgcctgccagaaaacaaaaacaccaagaaaccaagtcaacttttcacctcctgagtttatttttccagagattccagggccagcaaagccggcgttcagaaggagggagaaaaccgtgagaggatgtgtgtggccagcagctcttcagctttgagatggtggggttcactgctcccttgggaattacacggagctggggaagtggctgtgtcactgctatggacacggagtggggcgggcatctggagagagagagggagcggaggctaaggactggaggccgccaggcaggcgtggccgagggaagaaaaagcttctggatgtccagccagctgcccccttccagcccctccaggacccctggacccactgccgctgctctctgcaaaaagaatgggcatcccggaggccacgcctatcttctctctctgctcctccttccctccatgcaccatcactgtggctggcaggcatcggacagcctcatccagaccccctgccctgtcttggcaacctctactgcccatctcccctgctcaacttctccaccaagcatttggtttatttagaaaaaggaagaaaaacaaaaaacaaaaaactaaagggtgagaatttgcttagcgccttccttgttcctgcatattttttaaaatattgaatccaaggaagagagcccaagggtaggggagaaaccccccacaactgacccctgcctccctgtgctggaattgactttcctgagcatggacaaggaaaggtgaagtctggggagcagaggtgtaaataaggcgactggccttggcactgtgggatgattaggtttaacgcattgtgggcaagataagaatg

SEQ ID NO: 26709 - protein, 254 aa, Homo sapiens
MDILKPGVSYDFRVIAVIALVGLIFILLLVFVLIIRGQSKKYAKKTDSGNSAKSGALGHSEMMSLDESSFPALELNNRRLSVKNSFCRKNGLYTRSPPRPSPGSLHYSDEDVTKYNDLIPAESSSLTEKPSEISDSQGSDSEYEVDSNHQKAHSFVNHYISDPTYYNSWRRQQKGISRAQAYSYTESDSGEPDHTTVTNSTSTQQGSLFRPKASRTPTPQNPPNPPSQQSTLYRPPSSLAPGSRAPIAGFSSFV

SEQ ID NO: 26710 - DNA, 4893 bp, Homo sapiens
agctgatcgcctgggagccggaacaggaagaggaggttaccatggtgaccgcccggcctaactttcaagacagcatccacgtgggcttcgtgtctggcctgaagaagttcaccgagtacttcacctcagtgctgtgtttcaccacccccggggacgggccacgcagcaccccgcagctggtgcgcacccatgaggatgtgcctgggcccgtgggacacctgagcttcagtgagatcctggacacatcgctgaaggtcagctggcaagagccgggagagaaaaatggcatcctcacagggtaccggatctcctgggaggagtacaatcgaaccaacacccgtgtgacccactacctgcccaacgtgaccctggagtaccgtgtcacgggcctcaccgcgctcaccacctacaccatcgaggtggccgccatgacctcaaagggccagggccaagtgtccgcctccaccatctcctctggggtgcccccagaactcccagggccccccaccaacctgggcatttccaacatcggcccccgctctgtgaccttgcagttcaggccaggctacgatgggaaaacctccatctcccgctggctggtggaagcccaggtaggcgtggttggggagggagaggagtggttgctgatccaccagctctccaatgagcccgatgcccgctccatggaggtgcccgacctcaaccccttcacctgctacagcttccgcatgcgccaggtgaacatcgtgggcaccagcccccccagtcagccttctagaaagatccagaccctgcaggcaccccctgacatggccccagccaatgtgtctctgcgcacagccagtgagaccagcctgtggctgcgctggatgcctctcccggagatggaatacaatgggaaccctgagtccgtgggctataagatcaagtacagccggtcagacgggcatggcaagacgctgagccacgtggtgcaggaccgtgtggagcgggactacaccatcgaggacctggaggagtggacagagtaccgcgtccaggtccaggccttcaacgccatcgggagcgggccctggagccagacggtggtgggcaggacccgggagtcagttccctcttccggccccaccaatgtgtctgcactggccaccacctccagcagcatgctggtgcgctggagcgaggtccccgaggctgatcgcaacgggctcgtgctgggctataaggtgatgtataaggagaaggactcggacacccagccccgattctggctggtggaaggcaactcgtctcgcagtgcccagctcaccggcttgggcaaatacgtgctctatgaagtccaggtgctggccttcacacgcatcggggacggcagccccagccaccctcccatcctggagcggacgctggatgatgtcccaggaccacccatgggcatcctgttcccagaggtgcggaccacgtctgtgcggctgatctggcagccccctgccgcccccaatggcatcattcttgcttaccagatcacacaccggctcaacaccaccacggccaacaccgccactgtggaggtgctggcacccagcgcccggcagtacacagccacgggcctcaagccagagtctgtctacctgttccgcatcacggcccagacccgcaagggctggggagaagctgccgaggccttggtggtgaccaccgagaagagagaccgtccgcagccccccagcaggccgatggtgcagcaggaggatgtgagagcacgcagcgtgctgctgtcctgggagccagggagcgacgggctctcccctgtgcgctactacaccatccagacccgcgagctgcccagcggcaggtgggcactgcactcggcctccgtgagccacaatgcctccagcttcattgtggacaggctgaagcccttcacgtcctacaagttccgagtgaaggcgaccaatgacattggcgacagcgagttcagcgaggagtcggagtcactgaccaccctgcaggctgcccccgatgaagcacccaccatcctctccgtgacgccccacaccaccacctccgtgctaatccgatggcagccgccagcagaggacaagatcaatggcatcctcctgggcttccggatccgataccgggagctgctctatgaaggactgaggggcttcacgcttcgaggcatcaacaacccaggggccacatgggctgagcttacctacctgaacaagcacaggcggtacgagatacggatgagcgtgtacaacgctgtgggtgaggggccctccagccccccgcaggaggtctttgttggggaggcagtgcccacagcagcacctcgtaacgtggtcgtccacggcgccacggccacacagctggacgtgacttgggagccacctccgctggacagccagaatggagacatccaggggtacaagatttatttctgggaagcccagcgggggaacctcacagagcgagtgaagacgcttttcctggctgagaacagcgtgaagctcaagaacttgactggctacacggcctacatggtcagcgtggccgccttcaacgccgctggggatgggcctcggagcacccccacccaaggccagacccagcaagcagcccccagcgctcccagctcggtcaagttcagtgagctgaccacaacctcagtgaatgtgtcctgggaagccccgcagttccccaatggcatcctggagggctacaggctggtgtacgagccctgcagccccgtggatggagtcagcaagatcgtgaccgtggacgtgaaggggaacagccccctgtggctgaaggtgaaggacctggcggagggggtgacctacaggttccgcatcagagccaagaccttcacctacgggccggagatcgaagccaacgtcaccacgggccccggagaaggtgccccaggaccgcctggcgtgcccatcatcgtgcggtacagctctgccatcgccattcactggtccagcggagacccgggcaaagggcccatcacccgctacgtcatcgaggccagaccttcagacgagggactatgggacatcctcatcaaagacatccccaaggaggtgagctcctacacgttcagcatggacatcctgaagccgggcgtgagctatgacttccgggtcatcgcggtcaacgactatggtttcggcacccccagcagcccctcccagtctgtgccagcccagaaagccaaccccttctatgaggagtggtggttcttggtggtcattgccctggtcggcctcatcttcatcctgcttctggtcttcgtgctcatcatccggggccagagcaagaagtacgccaagaagacagactcggggaacagtgccaagtctggagccctaggccacagcgagatgatgagcttggatgaaagcagcttccctgccctggaactcaacaacaggcggctctccgtcaagaactctttctgccgaaagaacggcctgtacaccaggtctccccccaggcccagcccaggcagcctgcactactcggatgaggatgtcaccaaatacaacgacctcatccctgcagagagcagcagcctgacggagaagccctcagaaatctccgactctcagggaagtgacagcgagtacgaggtcgactcaaaccaccagaaggcccactcctttgtcaaccactacatcagtgaccccacatactacaactcgtggcggcgacagcagaagggcatctcgagggcacaggcctacagctacacggagagcgactcgggtgagccagaccacaccaccgtcaccaacagcaccagcacccagcagggcagcctctttcggcccaaggccagtcggactccaacgccccagaacccccctaaccccccaagtcagcagagcaccctctaccgtccccccagcagcctggccccaggctcccgggctcccatagcaggattttcatcatttgtttgacatcagaagaggaaaaagcagaaagagaaatggcaccaaactcctccttcacccctcctctcactgcctgccagaaaacaaaaacaccaagaaaccaagtcaacttttcacctcctgagtttatttttccagagattccagggccagcaaagccggcgttcagaaggagggagaaaaccgtgagaggatgtgtgtggccagcagctcttcagctttgagatggtggggttcactgctcccttgggaattacacggagctggggaagtggctgtgtcactgctatggacacggagtggggcgggcatctggagagagagagggagcggaggctaaggactggaggccgccaggcaggcgtggccgagggaagaaaaagcttctggatgtccagccagctgcccccttccagcccctccaggacccctggacccactgccgctgctctctgcaaaaagaatgggcatcccggaggccacgcctatcttctctctctgctcctccttccctccatgcaccatcactgtggctggcaggcatcggacagcctcatccagaccccctgccctgtcttggcaacctctactgcccatctcccctgctcaacttctccaccaagcatttggtttatttagaaaaaggaagaaaaacaaaaaacaaaaaactaaagggtgagaatttgcttagcgccttccttgttcctgcatattttttaaaatattgaatccaaggaagagagcccaagggtaggggagaaaccccccacaactgacccctgcctccctgtgctggaattgactttcctgagcatggacaaggaaaggtgaagtctggggagcagaggtgtaaataaggcgactggccttggcactgtgggatgattaggtttaacgcattgtgggcaagataagaatg

SEQ ID NO: 26711 - protein, 1312 aa, Homo sapiens
MVTARPNFQDSIHVGFVSGLKKFTEYFTSVLCFTTPGDGPRSTPQLVRTHEDVPGPVGHLSFSEILDTSLKVSWQEPGEKNGILTGYRISWEEYNRTNTRVTHYLPNVTLEYRVTGLTALTTYTIEVAAMTSKGQGQVSASTISSGVPPELPGPPTNLGISNIGPRSVTLQFRPGYDGKTSISRWLVEAQVGVVGEGEEWLLIHQLSNEPDARSMEVPDLNPFTCYSFRMRQVNIVGTSPPSQPSRKIQTLQAPPDMAPANVSLRTASETSLWLRWMPLPEMEYNGNPESVGYKIKYSRSDGHGKTLSHVVQDRVERDYTIEDLEEWTEYRVQVQAFNAIGSGPWSQTVVGRTRESVPSSGPTNVSALATTSSSMLVRWSEVPEADRNGLVLGYKVMYKEKDSDTQPRFWLVEGNSSRSAQLTGLGKYVLYEVQVLAFTRIGDGSPSHPPILERTLDDVPGPPMGILFPEVRTTSVRLIWQPPAAPNGIILAYQITHRLNTTTANTATVEVLAPSARQYTATGLKPESVYLFRITAQTRKGWGEAAEALVVTTEKRDRPQPPSRPMVQQEDVRARSVLLSWEPGSDGLSPVRYYTIQTRELPSGRWALHSASVSHNASSFIVDRLKPFTSYKFRVKATNDIGDSEFSEESESLTTLQAAPDEAPTILSVTPHTTTSVLIRWQPPAEDKINGILLGFRIRYRELLYEGLRGFTLRGINNPGATWAELTYLNKHRRYEIRMSVYNAVGEGPSSPPQEVFVGEAVPTAAPRNVVVHGATATQLDVTWEPPPLDSQNGDIQGYKIYFWEAQRGNLTERVKTLFLAENSVKLKNLTGYTAYMVSVAAFNAAGDGPRSTPTQGQTQQAAPSAPSSVKFSELTTTSVNVSWEAPQFPNGILEGYRLVYEPCSPVDGVSKIVTVDVKGNSPLWLKVKDLAEGVTYRFRIRAKTFTYGPEIEANVTTGPGEGAPGPPGVPIIVRYSSAIAIHWSSGDPGKGPITRYVIEARPSDEGLWDILIKDIPKEVSSYTFSMDILKPGVSYDFRVIAVNDYGFGTPSSPSQSVPAQKANPFYEEWWFLVVIALVGLIFILLLVFVLIIRGQSKKYAKKTDSGNSAKSGALGHSEMMSLDESSFPALELNNRRLSVKNSFCRKNGLYTRSPPRPSPGSLHYSDEDVTKYNDLIPAESSSLTEKPSEISDSQGSDSEYEVDSNHQKAHSFVNHYISDPTYYNSWRRQQKGISRAQAYSYTESDSGEPDHTTVTNSTSTQQGSLFRPKASRTPTPQNPPNPPSQQSTLYRPPSSLAPGSRAPIAGFSSFV

SEQ ID NO: 26712 - DNA, 6427 bp, Homo sapiens
tcaccatccccaaccccaccggcagtgacgccggctactacgagtgtgaggctgtcctgcgcagcagcagcgtcccctctgttgtccggggcgcctacctctcagtgctggaaccgcctcagtttgtcaaggagccagaaagacacatcactgcggagatggagaaggtggtggacatcccctgtcaggccaaaggtgtgccgccgccctccatcacctggtacaaggacgcagccgtggtggaggtggagaagttgacccgcttccggcagcgcaacgacgggggcctgcagatcagcggcctggtgcccgatgataccggcatgttccagtgcttcgcccgcaatgcagccggcgaggtgcaaacttccacctacctggctgtcaccagcatcgcccctaacatcaccagaggccccctggacagcacggtgatcgatggcatgtcagtggtgctagcatgtgagacctcgggggcgccccgaccagctatcacttggcagaaaggggagcgcatcttggccagtggctctgtgcagctgcctcgcttcacacccctggagtcgggcagcctcctcatcagccccacacacatctccgatgcggggacctacacctgcctggccaccaactctcggggggtcgatgaggcctcagcagacctagtcgtttgggctcggacccgcatcaccaagcccccccaggatcagagtgtcatcaagggcacccaggcctccatggtgtgcggagtgacccacgacccccgagtaaccatcaggtacatctgggagaaggacggggccaccctgggcacggagagccatcctcgtatccgcctggacagaaacggctccctgcacatctcacagacgtggtcgggagacatcggcacgtacacctgccgggtgatctcagcaggaggcaacgactctcgcagtgcccacctgcgagtcaggcaactgccccacgcgcccgagcacccagtggccactctcagcaccgtggaaaggcgagccatcaacctgacgtggaccaagccctttgatggcaacagccccctgatccgctacattctggagatgtcggagaacaatgccccctggactgtactcctggccagtgtggaccccaaagctacctcagtgacagtcaagggcctggttcctgcacgctcctaccagttccgtctttgtgccgtcaacgacgtggggaaaggacagttcagcaaagacaccgagagggtctccctccccgaggagccccccacggcccctccacagaacgtcatcgccagcggtcgaaccaaccagtccatcatgatccagtggcagccgcctcctgagagccaccagaatggaattctcaagggttacatcatcaggtactgcctggccgggctgcccgtggggtaccagtttaagaacatcacggatgctgatgtgaacaacctgctgctggaggatctcatcatttggaccaactacgagatcgaggtggctgcttacaacagcgctgggctgggggtctacagcagtaaagtcaccgagtggacgctgcagggagttcccacggtccctccgggcaatgtgcacgcggaagccaccaattccacgaccatccgcttcacctggaacgcccccagcccccagttcatcaacggcatcaaccagggctacaagctgatcgcctgggagccggaacaggaagaggaggttaccatggtgaccgcccggcctaactttcaagacagcatccacgtgggcttcgtgtctggcctgaagaagttcaccgagtacttcacctcagtgctgtgtttcaccacccccggggacgggccacgcagcaccccgcagctggtgcgcacccatgaggatgtgcctgggcccgtgggacacctgagcttcagtgagatcctggacacatcgctgaaggtcagctggcaagagccgggagagaaaaatggcatcctcacagggtaccggatctcctgggaggagtacaatcgaaccaacacccgtgtgacccactacctgcccaacgtgaccctggagtaccgtgtcacgggcctcaccgcgctcaccacctacaccatcgaggtggccgccatgacctcaaagggccagggccaagtgtccgcctccaccatctcctctggggtgcccccagaactcccagggccccccaccaacctgggcatttccaacatcggcccccgctctgtgaccttgcagttcaggccaggctacgatgggaaaacctccatctcccgctggctggtggaagcccaggtaggcgtggttggggagggagaggagtggttgctgatccaccagctctccaatgagcccgatgcccgctccatggaggtgcccgacctcaaccccttcacctgctacagcttccgcatgcgccaggtgaacatcgtgggcaccagcccccccagtcagccttctagaaagatccagaccctgcaggcaccccctgacatggccccagccaatgtgtctctgcgcacagccagtgagaccagcctgtggctgcgctggatgcctctcccggagatggaatacaatgggaaccctgagtccgtgggctataagatcaagtacagccggtcagacgggcatggcaagacgctgagccacgtggtgcaggaccgtgtggagcgggactacaccatcgaggacctggaggagtggacagagtaccgcgtccaggtccaggccttcaacgccatcgggagcgggccctggagccagacggtggtgggcaggacccgggagtcagttccctcttccggccccaccaatgtgtctgcactggccaccacctccagcagcatgctggtgcgctggagcgaggtccccgaggctgatcgcaacgggctcgtgctgggctataaggtgatgtataaggagaaggactcggacacccagccccgattctggctggtggaaggcaactcgtctcgcagtgcccagctcaccggcttgggcaaatacgtgctctatgaagtccaggtgctggccttcacacgcatcggggacggcagccccagccaccctcccatcctggagcggacgctggatgatgtcccaggaccacccatgggcatcctgttcccagaggtgcggaccacgtctgtgcggctgatctggcagccccctgccgcccccaatggcatcattcttgcttaccagatcacacaccggctcaacaccaccacggccaacaccgccactgtggaggtgctggcacccagcgcccggcagtacacagccacgggcctcaagccagagtctgtctacctgttccgcatcacggcccagacccgcaagggctggggagaagctgccgaggccttggtggtgaccaccgagaagagagaccgtccgcagccccccagcaggccgatggtgcagcaggaggatgtgagagcacgcagcgtgctgctgtcctgggagccagggagcgacgggctctcccctgtgcgctactacaccatccagacccgcgagctgcccagcggcaggtgggcactgcactcggcctccgtgagccacaatgcctccagcttcattgtggacaggctgaagcccttcacgtcctacaagttccgagtgaaggcgaccaatgacattggcgacagcgagttcagcgaggagtcggagtcactgaccaccctgcaggctgcccccgatgaagcacccaccatcctctccgtgacgccccacaccaccacctccgtgctaatccgatggcagccgccagcagaggacaagatcaatggcatcctcctgggcttccggatccgataccgggagctgctctatgaaggactgaggggcttcacgcttcgaggcatcaacaacccaggggccacatgggctgagcttacctccatgtactccatgcggaacctgagccggcccagcctcacgcagtacgagctggacaacctgaacaagcacaggcggtacgagatacggatgagcgtgtacaacgctgtgggtgaggggccctccagccccccgcaggaggtctttgttggggaggcagtgcccacagcagcacctcgtaacgtggtcgtccacggcgccacggccacacagctggacgtgacttgggagccacctccgctggacagccagaatggagacatccaggggtacaagatttatttctgggaagcccagcgggggaacctcacagagcgagtgaagacgcttttcctggctgagaacagcgtgaagctcaagaacttgactggctacacggcctacatggtcagcgtggccgccttcaacgccgctggggatgggcctcggagcacccccacccaaggccagacccagcaagcagcccccagcgctcccagctcggtcaagttcagtgagctgaccacaacctcagtgaatgtgtcctgggaagccccgcagttccccaatggcatcctggagggctacaggctggtgtacgagccctgcagccccgtggatggagtcagcaagatcgtgaccgtggacgtgaaggggaacagccccctgtggctgaaggtgaaggacctggcggagggggtgacctacaggttccgcatcagagccaagaccttcacctacgggccggagatcgaagccaacgtcaccacgggccccggagaaggtgccccaggaccgcctggcgtgcccatcatcgtgcggtacagctctgccatcgccattcactggtccagcggagacccgggcaaagggcccatcacccgctacgtcatcgaggccagaccttcagacgagggactatgggacatcctcatcaaagacatccccaaggaggtgagctcctacacgttcagcatggacatcctgaagccgggcgtgagctatgacttccgggtcatcgcggtcaacgactatggtttcggcacccccagcagcccctcccagtctgtgccagcccagaaagccaaccccttctatgaggagtggtggttcttggtggtcattgccctggtcggcctcatcttcatcctgcttctggtcttcgtgctcatcatccggggccagagcaagaagtacgccaagaagacagactcggggaacagtgccaagtctggagccctaggccacagcgagatgatgagcttggatgaaagcagcttccctgccctggaactcaacaacaggcggctctccgtcaagaactctttctgccgaaagaacggcctgtacaccaggtctccccccaggcccagcccaggcagcctgcactactcggatgaggatgtcaccaaatacaacgacctcatccctgcagagagcagcagcctgacggagaagccctcagaaatctccgactctcagggaagtgacagcgagtacgaggtcgactcaaaccaccagaaggcccactcctttgtcaaccactacatcagtgaccccacatactacaactcgtggcggcgacagcagaagggcatctcgagggcacaggcctacagctacacggagagcgactcgggtgagccagaccacaccaccgtcaccaacagcaccagcacccagcagggcagcctctttcggcccaaggccagtcggactccaacgccccagaacccccctaaccccccaagtcagcagagcaccctctaccgtccccccagcacaaagccggcgttcagaaggagggagaaaaccgtgagaggatgtgtgtggccagcagctcttcagctttgagatggtggggttcactgctcccttgggaattacacggagctggggaagtggctgtgtcactgctatggacacggagtggggcgggcatctggagagagagagggagcggaggctaaggactggaggccgccaggcaggcgtggccgagggaagaaaaagcttctggatgtccagccagctgcccccttccagcccctccaggacccctggacccactgccgctgctctctgcaaaaagaatgggcatcccggaggccacgcctatcttctctctctgctcctccttccctccatgcaccatcactgtggctggcaggcatcggacagcctcatccagaccccctgccctgtcttggcaacctctactgcccatctcccctgctcaacttctccaccaagcatttggtttatttagaaaaaggaagaaaaacaaaaaacaaaaaactaaagggtgagaatttgcttagcgccttccttgttcctgcatattttttaaaatattgaatccaaggaagagagcccaagggtaggggagaaaccccccacaactgacccctgcctccctgtgctggaattgactttcctgagcatggacaaggaaaggtgaagtctggggagcagaggtgtaaataaggcgactggccttggcactgtgggatgattaggtttaacgcattgtgggcaagataagaatg

SEQ ID NO: 26713 - protein, 1857 aa, Homo sapiens
MEKVVDIPCQAKGVPPPSITWYKDAAVVEVEKLTRFRQRNDGGLQISGLVPDDTGMFQCFARNAAGEVQTSTYLAVTSIAPNITRGPLDSTVIDGMSVVLACETSGAPRPAITWQKGERILASGSVQLPRFTPLESGSLLISPTHISDAGTYTCLATNSRGVDEASADLVVWARTRITKPPQDQSVIKGTQASMVCGVTHDPRVTIRYIWEKDGATLGTESHPRIRLDRNGSLHISQTWSGDIGTYTCRVISAGGNDSRSAHLRVRQLPHAPEHPVATLSTVERRAINLTWTKPFDGNSPLIRYILEMSENNAPWTVLLASVDPKATSVTVKGLVPARSYQFRLCAVNDVGKGQFSKDTERVSLPEEPPTAPPQNVIASGRTNQSIMIQWQPPPESHQNGILKGYIIRYCLAGLPVGYQFKNITDADVNNLLLEDLIIWTNYEIEVAAYNSAGLGVYSSKVTEWTLQGVPTVPPGNVHAEATNSTTIRFTWNAPSPQFINGINQGYKLIAWEPEQEEEVTMVTARPNFQDSIHVGFVSGLKKFTEYFTSVLCFTTPGDGPRSTPQLVRTHEDVPGPVGHLSFSEILDTSLKVSWQEPGEKNGILTGYRISWEEYNRTNTRVTHYLPNVTLEYRVTGLTALTTYTIEVAAMTSKGQGQVSASTISSGVPPELPGPPTNLGISNIGPRSVTLQFRPGYDGKTSISRWLVEAQVGVVGEGEEWLLIHQLSNEPDARSMEVPDLNPFTCYSFRMRQVNIVGTSPPSQPSRKIQTLQAPPDMAPANVSLRTASETSLWLRWMPLPEMEYNGNPESVGYKIKYSRSDGHGKTLSHVVQDRVERDYTIEDLEEWTEYRVQVQAFNAIGSGPWSQTVVGRTRESVPSSGPTNVSALATTSSSMLVRWSEVPEADRNGLVLGYKVMYKEKDSDTQPRFWLVEGNSSRSAQLTGLGKYVLYEVQVLAFTRIGDGSPSHPPILERTLDDVPGPPMGILFPEVRTTSVRLIWQPPAAPNGIILAYQITHRLNTTTANTATVEVLAPSARQYTATGLKPESVYLFRITAQTRKGWGEAAEALVVTTEKRDRPQPPSRPMVQQEDVRARSVLLSWEPGSDGLSPVRYYTIQTRELPSGRWALHSASVSHNASSFIVDRLKPFTSYKFRVKATNDIGDSEFSEESESLTTLQAAPDEAPTILSVTPHTTTSVLIRWQPPAEDKINGILLGFRIRYRELLYEGLRGFTLRGINNPGATWAELTSMYSMRNLSRPSLTQYELDNLNKHRRYEIRMSVYNAVGEGPSSPPQEVFVGEAVPTAAPRNVVVHGATATQLDVTWEPPPLDSQNGDIQGYKIYFWEAQRGNLTERVKTLFLAENSVKLKNLTGYTAYMVSVAAFNAAGDGPRSTPTQGQTQQAAPSAPSSVKFSELTTTSVNVSWEAPQFPNGILEGYRLVYEPCSPVDGVSKIVTVDVKGNSPLWLKVKDLAEGVTYRFRIRAKTFTYGPEIEANVTTGPGEGAPGPPGVPIIVRYSSAIAIHWSSGDPGKGPITRYVIEARPSDEGLWDILIKDIPKEVSSYTFSMDILKPGVSYDFRVIAVNDYGFGTPSSPSQSVPAQKANPFYEEWWFLVVIALVGLIFILLLVFVLIIRGQSKKYAKKTDSGNSAKSGALGHSEMMSLDESSFPALELNNRRLSVKNSFCRKNGLYTRSPPRPSPGSLHYSDEDVTKYNDLIPAESSSLTEKPSEISDSQGSDSEYEVDSNHQKAHSFVNHYISDPTYYNSWRRQQKGISRAQAYSYTESDSGEPDHTTVTNSTSTQQGSLFRPKASRTPTPQNPPNPPSQQSTLYRPPSTKPAFRRREKTVRGCVWPAALQL

SEQ ID NO: 26714 - DNA, 3898 bp, Homo sapiens
gtaggcgtggttggggagggagaggagtggttgctgatccaccagctctccaatgagcccgatgcccgctccatggaggtgcccgacctcaaccccttcacctgctacagcttccgcatgcgccaggtgaacatcgtgggcaccagcccccccagtcagccttctagaaagatccagaccctgcaggcaccccctgacatggccccagccaatgtgtctctgcgcacagccagtgagaccagcctgtggctgcgctggatgcctctcccggagatggaatacaatgggaaccctgagtccgtgggctataagatcaagtacagccggtcagacgggcatggcaagacgctgagccacgtggtgcaggaccgtgtggagcgggactacaccatcgaggacctggaggagtggacagagtaccgcgtccaggtccaggccttcaacgccatcgggagcgggccctggagccagacggtggtgggcaggacccgggagtcagttccctcttccggccccaccaatgtgtctgcactggccaccacctccagcagcatgctggtgcgctggagcgaggtccccgaggctgatcgcaacgggctcgtgctgggctataaggtgatgtataaggagaaggactcggacacccagccccgattctggctggtggaaggcaactcgtctcgcagtgcccagctcaccggcttgggcaaatacgtgctctatgaagtccaggtgctggccttcacacgcatcggggacggcagccccagccaccctcccatcctggagcggacgctggatgatgtcccaggaccacccatgggcatcctgttcccagaggtgcggaccacgtctgtgcggctgatctggcagccccctgccgcccccaatggcatcattcttgcttaccagatcacacaccggctcaacaccaccacggccaacaccgccactgtggaggtgctggcacccagcgcccggcagtacacagccacgggcctcaagccagagtctgtctacctgttccgcatcacggcccagacccgcaagggctggggagaagctgccgaggccttggtggtgaccaccgagaagagagaccgtccgcagccccccagcaggccgatggtgcagcaggaggatgtgagagcacgcagcgtgctgctgtcctgggagccagggagcgacgggctctcccctgtgcgctactacaccatccagacccgcgagctgcccagcggcaggtgggcactgcactcggcctccgtgagccacaatgcctccagcttcattgtggacaggctgaagcccttcacgtcctacaagttccgagtgaaggcgaccaatgacattggcgacagcgagttcagcgaggagtcggagtcactgaccaccctgcaggctgcccccgatgaagcacccaccatcctctccgtgacgccccacaccaccacctccgtgctaatccgatggcagccgccagcagaggacaagatcaatggcatcctcctgggcttccggatccgataccgggagctgctctatgaaggactgaggggcttcacgcttcgaggcatcaacaacccaggggccacatgggctgagcttacctccatgtactccatgcggaacctgagccggcccagcctcacgcagtacgagctggacaacctgaacaagcacaggcggtacgagatacggatgagcgtgtacaacgctgtgggtgaggggccctccagccccccgcaggaggtctttgttggggaggcagtgcccacagcagcacctcgtaacgtggtcgtccacggcgccacggccacacagctggacgtgacttgggagccacctccgctggacagccagaatggagacatccaggggtacaagatttatttctgggaagcccagcgggggaacctcacagagcgagtgaagacgcttttcctggctgagaacagcgtgaagctcaagaacttgactggctacacggcctacatggtcagcgtggccgccttcaacgccgctggggatgggcctcggagcacccccacccaaggccagacccagcaagcagcccccagcgctcccagctcggtcaagttcagtgagctgaccacaacctcagtgaatgtgtcctgggaagccccgcagttccccaatggcatcctggagggctacaggctggtgtacgagccctgcagccccgtggatggagtcagcaagatcgtgaccgtggacgtgaaggggaacagccccctgtggctgaaggtgaaggacctggcggagggggtgacctacaggttccgcatcagagccaagaccttcacctacgggccggagatcgaagccaacgtcaccacgggccccggagaaggtgccccaggaccgcctggcgtgcccatcatcgtgcggtacagctctgccatcgccattcactggtccagcggagacccgggcaaagggcccatcacccgctacgtcatcgaggccagaccttcagacgagggactatgggacatcctcatcaaagacatccccaaggaggtgagctcctacacgttcagcatggacatcctgaagccgggcgtgagctatgacttccgggtcatcgcggtcaacgactatggtttcggcacccccagcagcccctcccagtctgtgccagcccagaaagccaaccccttctatgaggagtggtggttcttggtggtcattgccctggtcggcctcatcttcatcctgcttctggtcttcgtgctcatcatccggggccagagcaagaagtacgccaagaagacagactcggggaacagtgccaagtctggagccctaggccacagcgagatgatgagcttggatgaaagcagcttccctgccctggaactcaacaacaggcggctctccgtcaagaactctttctgccgaaagaacggcctgtacaccaggtctccccccaggcccagcccaggcagcctgcactactcggatgaggatgtcaccaaatacaacgacctcatccctgcagagagcagcagcctgacggagaagccctcagaaatctccgactctcagggaagtgacagcgagtacgaggtcgactcaaaccaccagaaggcccactcctttgtcaaccactacatcagtgaccccacatactacaactcgtggcggcgacagcagaagggcatctcgagggcacaggcctacagctacacggagagcgactcgggtgagccagaccacaccaccgtcaccaacagcaccagcacccagcagggcagcctctttcggcccaaggccagtcggactccaacgccccagaacccccctaaccccccaagtcagcagagcaccctctaccgtccccccagcacaaagccggcgttcagaaggagggagaaaaccgtgagaggatgtgtgtggccagcagctcttcagctttgagatggtggggttcactgctcccttgggaattacacggagctggggaagtggctgtgtcactgctatggacacggagtggggcgggcatctggagagagagagggagcggaggctaaggactggaggccgccaggcaggcgtggccgagggaagaaaaagcttctggatgtccagccagctgcccccttccagcccctccaggacccctggacccactgccgctgctctctgcaaaaagaatgggcatcccggaggccacgcctatcttctctctctgctcctccttccctccatgcaccatcactgtggctggcaggcatcggacagcctcatccagaccccctgccctgtcttggcaacctctactgcccatctcccctgctcaacttctccaccaagcatttggtttatttagaaaaaggaagaaaaacaaaaaacaaaaaactaaagggtg

SEQ ID NO: 26715 - protein, 1123 aa, Homo sapiens
MEVPDLNPFTCYSFRMRQVNIVGTSPPSQPSRKIQTLQAPPDMAPANVSLRTASETSLWLRWMPLPEMEYNGNPESVGYKIKYSRSDGHGKTLSHVVQDRVERDYTIEDLEEWTEYRVQVQAFNAIGSGPWSQTVVGRTRESVPSSGPTNVSALATTSSSMLVRWSEVPEADRNGLVLGYKVMYKEKDSDTQPRFWLVEGNSSRSAQLTGLGKYVLYEVQVLAFTRIGDGSPSHPPILERTLDDVPGPPMGILFPEVRTTSVRLIWQPPAAPNGIILAYQITHRLNTTTANTATVEVLAPSARQYTATGLKPESVYLFRITAQTRKGWGEAAEALVVTTEKRDRPQPPSRPMVQQEDVRARSVLLSWEPGSDGLSPVRYYTIQTRELPSGRWALHSASVSHNASSFIVDRLKPFTSYKFRVKATNDIGDSEFSEESESLTTLQAAPDEAPTILSVTPHTTTSVLIRWQPPAEDKINGILLGFRIRYRELLYEGLRGFTLRGINNPGATWAELTSMYSMRNLSRPSLTQYELDNLNKHRRYEIRMSVYNAVGEGPSSPPQEVFVGEAVPTAAPRNVVVHGATATQLDVTWEPPPLDSQNGDIQGYKIYFWEAQRGNLTERVKTLFLAENSVKLKNLTGYTAYMVSVAAFNAAGDGPRSTPTQGQTQQAAPSAPSSVKFSELTTTSVNVSWEAPQFPNGILEGYRLVYEPCSPVDGVSKIVTVDVKGNSPLWLKVKDLAEGVTYRFRIRAKTFTYGPEIEANVTTGPGEGAPGPPGVPIIVRYSSAIAIHWSSGDPGKGPITRYVIEARPSDEGLWDILIKDIPKEVSSYTFSMDILKPGVSYDFRVIAVNDYGFGTPSSPSQSVPAQKANPFYEEWWFLVVIALVGLIFILLLVFVLIIRGQSKKYAKKTDSGNSAKSGALGHSEMMSLDESSFPALELNNRRLSVKNSFCRKNGLYTRSPPRPSPGSLHYSDEDVTKYNDLIPAESSSLTEKPSEISDSQGSDSEYEVDSNHQKAHSFVNHYISDPTYYNSWRRQQKGISRAQAYSYTESDSGEPDHTTVTNSTSTQQGSLFRPKASRTPTPQNPPNPPSQQSTLYRPPSTKPAFRRREKTVRGCVWPAALQL

SEQ ID NO: 26716 - DNA, 2285 bp, Homo sapiens
tctagatgtgcagaaggtgcaagccagagctcaggcagaacttccagagtgcatctgggatctgcatttgccactggttgcagatcaggcggacgaggagccgggaaggcagagccatgtggctgccccctgctctgctccttctcagcctctcaggctgtttctccatccaaggcccagagtctgtgagagccccagagcaggggtccctgacggttcaatgccactataagcaaggatgggagacctacattaagtggtggtgccgaggggtgcgctgggatacatgcaagatcctcattgaaaccagagggtcggagcaaggagagaagagtgaccgtgtgtccatcaaggacaatcagaaagaccgcacgttcactgtgaccatggaggggctcaggcgagatgacgcagatgtttactggtgtgggattgaaagaagaggacctgaccttgggactcaagtgaaagtgatcgttgacccagagggagcggcttccacaacagcaagctcacctaccaacagcaatatggcagtgttcatcggctcccacaagaggaaccactacatgctcctggtatttgtgaaggtgcccatcttgctcatcttggtcactgccatcctctggttgaaggggtctcagagggtccctgaggagccaggggaacagcctatctacatgaacttctccgaacctctgactaaagacatggccacttagagagatggatctgcagagccttcctgccctggccacgtttccagaagagactcgggctgtggaaggaacatctacgagtcctcgggatgcagtgactgagataggggccctgggcctccgccctggccttggagctggtgggcacctccctgttctgcacagctcagggacttagccaggtcctctcctgagccaccatcacctcctggggtgccagcacctgttctcttggtcaggagctgtagagatggagctcaagcactggacgactctgtccccactgctggaataactcgggcacagagcatgggaccaaagtacagaaagaggttgggggagacccccccagccctagacttccatcattccggagaccaactcaacaccgtctttgcctgagaacctgatatatccgtgtttttaaatttttttttttctagcaaagttgggttttaatgacttatgttcataggaaacctctctgatcccacacacaaggagggtgattctgggatgagttcctggttctagggcatgaggggctggatggaccctgtccccagggaggacatggctctgagtccacagggctgaggaggcaatgggaacctccctggcccggcccggtgcttgtcctccccctcccacctcttcctcctcctagctccccaagctccctgcctattcccccacctccgaggggctgcagcttgggagcctcctcagcatgacagcttgggtctcctccccaaaagagcctgtcaggcctcaagaaccacctccaggtggggagggcagtaacgaaaaccatcgcaggaaatggcaccctcccttttcggtgatgttgaaatcatgttactaatgaaaactgtcctagggaagtggttctgtctcctcacaggcttcacccacggcgatgaggcccttgaatgtggtcactttgtgctgtatggttgagggaccctcacaccaaagggaccttcccatgtgagatgtgctcccgcccccacctgcccacaagcaaacacaccacacatgttcggcatgttgccctttgaacacccatgaggacgcctccaacctgctcttggttctaatagggagtactgactgtcagcagtggataaaggagaggggaccctctggtccctagcatggcacccagagcctcccctcttcttgtccttcagccaaagagaaactttctctgactttgaactgaatttaggtctctggccaatgatgggcctgaaaattccataatggccagagaggagagttcgagcccggctaagatcccctgagtcattctgtgagggaccaagacccacagtccaccagccccagggccctacctcctggaatgctttcctggatccagcttcccgaagatccgaccagacccagggaggacggcaccgctccgcgggagggaaagccaaagcatggtgcttcaccagctggactcaggggcgaggggacatgggcgcttgtcaacgtgatgtcattcttttcccaccgtttcttcctgttgatattcaatgaatccgtcaatctctctgg

SEQ ID NO: 26717 - protein, 238 aa, Homo sapiens
MCRRCKPELRQNFQSASGICICHWLQIRRTRSREGRAMWLPPALLLLSLSGCFSIQGPESVRAPEQGSLTVQCHYKQGWETYIKWWCRGVRWDTCKILIETRGSEQGEKSDRVSIKDNQKDRTFTVTMEGLRRDDADVYWCGIERRGPDLGTQVKVIVDPEGAASTTASSPTNSNMAVFIGSHKRNHYMLLVFVKVPILLILVTAILWLKGSQRVPEEPGEQPIYMNFSEPLTKDMAT

SEQ ID NO: 26718 - DNA, 1558 bp, Homo sapiens
ggaaatggcccagcttggctctgccttctgcagtgtgagtaacacactgaagccagaagctgtgggctgtggggaagtggctgcatcgccacccaagggaccctggactttgccagacgtcagggttgagaggagccactagcaccatcccagagctgtcagcaccggcctcagcccaggcggctctctccctgagcttcctgtaccctgaccctctccagcctcagacctgagacagggctggacaaggaagcagagagcagaagaaaagcagaagcgaagctcagatctgctgggaggagattacattttgtcccctcctggggtcttgcacagtggcaggtgacattcgtgttacaggaatgactgccagggcctgggcctcgtggcggtcttcagctctgctcctcctgcttgtcccaggctattttcctctgagccaccccatgaccgtggcgggccccgtggggggatccctgagtgtgcagtgtcgctatgagaaggaacacaggaccctcaacaaattctggtgcagaccaccacagattctccgatgtgacaagattgtggagaccaaagggtcagcagggaaaaggaatggccgagtgtccatcagggacagtcctgcaaacctcagcttcacagtgaccctggagaatctcacagaggaggacgcaggcacctactggtgtggggtggatacaccgtggctccgagactttcatgatcccattgtcgaggttgaggtgtccgtgttcccggccgggacgaccacagcctccagcccccagagctccatgggcacctcaggtcctcccacgaagctgcccgtgcacacctggcccagcgtgaccagaaaggacagccccgaacccagcccacaccctggctccctgttcagcaatgtccgcttcctgctcctggtcctcttggagctgcccctgctcctgagcatgctgggtgccgtcctctgggtgaacagacctcagagaagctctagaagcaggcagaattggcccaagggtgagaaccagtagcatctgctgtccatcaaggccctgtgctgcaacagagcccctctgggggactggaatgacctcctgaccactccctcccgggctgctctctccacatctcctggaatcctttgtgagcctccttcagccttttccctgtgcccgatcctcatgtgtcacatgtgaacctgacggacatggacgccctgagctgtgagtccacgtctcatgtgcacgccccggccagctaagcctcgggccgtcagcaatacctctgagtgcccggatgccctccctgcacccttccatttctccaggagcctggcactgcttcctccaccgttttcacagggagaagcaggtctaggactcccctgcacctttgccaccataatggcccacactccctgggtccaggagtgtagaatatgcggctgcttccatttgctgagtgtgtcgattcaatgatgctttcaaactttaataaatgacaatgtgtaggtttgggatgtatcaggcccactcagtcagacctgagtgag

SEQ ID NO: 26719 - protein, 224 aa, Homo sapiens; identical to SEQ ID NO: 3571

SEQ ID NO: 26720 - DNA, 1520 bp, Homo sapiens
ggaaatggcccagcttggctctgccttctgcagtgtgagtaacacactgaagccagaagctgtgggctgtggggaagtggctgcatcgccacccaagggaccctggactttgccagacgtcagggttgagaggagccactagcaccatcccagagctgtcagcaccggcctcagcccaggcggctctctccctgagcttcctgtaccctgaccctctccagcctcagacctgagacagggctggacaaggaagcagagagcagaagaaaagcagaagcgaagctcagatctgctgggaggagattacattttgtcccctcctggggtcttgcacagtggcaggtgacattcgtgttacaggaatgactgccagggcctgggcctcgtggcggtcttcagctctgctcctcctgcttgtcccaggctattttcctctgagccaccccatgaccgtggcgggccccgtggggggatccctgagtgtgcagtgtcgctatgagaaggaacacaggaccctcaacaaattctggtgcagaccaccacagattctccgatgtgacaagattgtggagaccaaagggtcagcagggaaaaggaatggccgagtgtccatcagggacagtcctgcaaacctcagcttcacagtgaccctggagaatctcacagaggaggacgcaggcacctactggtgtggggtggatacaccgtggctccgagactttcatgatcccattgtcgaggttgaggtgtccgtgttcccggccgggacgaccacagcctccagcccccagagctccatgggcacctcaggtcctcccacgaagctgcccgtgcacacctggcccagcgtgaccagaaaggacagccccgaacccagcccacaccctggctccctgttcagcaatgtccgcttcctgctcctggtcctcttggagctgcccctgctcctgagcatgctgggtgccgtcctctgggtgaacagacctcagagaagctctagaagcaggcagaattggcccaagggtgagaaccagtagcatctgctgtccatcaaggccctgtgctgcaacagagcccctctgggggactggaatgacctcctgaccactccctcccgggctgctctctccacatctcctggaatcctttgtgagcctccttcagccttttccctgtgcccgatcctcatgtgtcacatgtgaacctgacggacatggacgccctgagctgtgagtccacgtctcatgtgcacgccccggccagctaagcctcgggccgtcagcaatacctctgagtgcccggatgccctccctgcacccttccatttctccaggagcctggcactgcttcctccaccgttttcacagggagaagcaggtctaggactcccctgcacctttgccaccataatggcccacactccctgggtccaggagtgtagaatatgcggctgcttccatttgctgagtgtgtcgattcaatgatgctttcaaactttaataaatgacaatgtgtaggtt

SEQ ID NO: 26721 - protein, 224 aa, Homo sapiens; identical to SEQ ID NO: 3571

SEQ ID NO: 26722 - DNA, 1303 bp, Homo sapiens
gttgacttccgagcttggattcaagtccctgaagggcaccagacacctgtgatcaccaaggagaggagaggagacaggaccatgtggctgtccccatctctgctgcttctcatcctcccaggttactccattgccgctaaaatcactggtccaacaacagtgaatggctcggagcagggctcattgactgtgcagtgtgcttatggctcaggctgggagacctacttgaagtggcggtgtcaaggagctgattggaattactgtaacatccttgttaaaacaaatggatcagagcaggaggtaaagaagaatcgagtttccatcagggacaatcagaaaaaccacgtgttcaccgtgaccatggagaatctcaaaagagatgatgctgacagttattggtgtgggactgagagacctggaattgatcttggggtcaaagttcaagtgaccattaacccaggcacacaaactgcagtctcagaatggacaaccacaacagcaagcctggctttcacagctgcagccacccagaagaccagcagccccctcaccaggtccccgctcaagagcacccacttcctgttcctgttcctcctggagctgcctctgctcctgagcatgctggggaccgtcctctgggtaaacagaccacaaagaaggtcttgaaggaggaggagtcagcccgatgatgagagtcccaatgcccattgacgtcctgtccagggcgaaaggccctcccacagaagaaaaaacattttcttttctcttctttttttctttctagagatagagtcttgctctgtcacccaggctggaatgcaatggtgtaatctctgctcactgcaactttcccctcccaggctcaagcgatcctcctgcctcaacctccagagtagctggggctacaggcacatgccaccacccccagctaatttttaaatttttttgtagagatgggcttccaccacgttgcccaggctggtctcgaactcttgacctcaagagatcctcccgcttcgcctcccaaagtggtgggattacaggtgtgagccaccgcacctggcagaaaaacaacatttctatggggaattgactgtggttctagaggcagtgctggccccagcttcagggaacagcctcctagtcccctatctcctgcagccgtgccacctggggctattcccttctctgcacagtccctggggcctgacagagcccttcttccttctgaggtctccaatgcagtagaaaacatgagaagaatgtgtttcccccgagaggcacctatgccgtagtggacatt

SEQ ID NO: 26723 - protein, 194 aa, Homo sapiens
MWLSPSLLLLILPGYSIAAKITGPTTVNGSEQGSLTVQCAYGSGWETYLKWRCQGADWNYCNILVKTNGSEQEVKKNRVSIRDNQKNHVFTVTMENLKRDDADSYWCGTERPGIDLGVKVQVTINPGTQTAVSEWTTTTASLAFTAAATQKTSSPLTRSPLKSTHFLFLFLLELPLLLSMLGTVLWVNRPQRRS

SEQ ID NO: 26724 - DNA, 2689 bp, Homo sapiens
ggcccttgttcactagaagcaaggagctccctgaccccttctttcaaaacagatctctttgtctttgtcttcatttctgcattcgtcccccctttgttcaatcccctagcaaccaacagcgacaagtggtggccgggacaggaacgtgagcaaagaaggtctgctggagcagagaaagagaaactgacaagacgaacgagaaaccctggaacaagtctgccggcagccaataaaagggtcaccatggtgggagcggaagacaatttcaccataaacaggcagagctccacaacccaaggaattcctggaacagaaattggactccatgcccaaatctgctttctatggcatctgaagggaactaagaaactacacacgacctcctggggaaagatgggtataggggcttcatttgttcactctgaaaaaagttctacatcagaatggaaagacaacaattaagcatctaacacagaacctgtcagataacaaaaacttgattgctatttaatgaatatgggcatggatggatgaattggcgctgtcattttccctgacatgtctccttcctgagaacagagcgtctctgtctccaagccagccgctgtcattccagtgccttaaagctccagccacactcacctgggaggatgagaagcagcagagatggggacagccacatggtcctgtctcctctcctctccttggtgatcacaggtgtctggtgcccttcagggacttgaatccaagctcggaagtcaacaccgcaaacctactcgaatctccttcaagtctcttgctcacttcctgttacatctgtagctacttctctttttacatattaggagaaaagaggtgtcattctttgaaaagactaaggtacagtgtatgttgcaaggtgtgcccaaacttttgtgcatgtggaaaagaaaatgtgtccgggactggtcaggtttgcacgggagtgcacgtaggagccaaggagcaggaggagccaggaggaacccaagcattgaggagctgcgggatctactgcctggaggagaggacggacaaggccagccatgaggagtgcagggagaggagcactttgggaagaccacagtgcacaggactcacacccagccttgctggagaaagcccatgccccaggcttcttccaggcagccccactgtaagacatctcattgcctcttcctgccctgggctgtctgacccactgccccttcccccaggaacacttccactgggatcatgagtcactctgaagccactctgaaatcactctgaagccaaagctgggctcagtggggaaggtcaggaatggagaaattgccttttctcgttagcctcctcttgccctgatttcatcctccctatccctgcacactttcccctggctgctgttgtaatctacttgttctgctgacgcccgaactgacttctttcccggtctctccccactttctttagatggtcccttccctctttctctccctttccctcctgaatcgattcattttttctctcctgttttatattttccatatctgtgggctttgttctacatttggggagctttttatattgtttatttcatgcttgtactttcccttccaatccttggatcaaatattgattttagagactgtatttttatttcgaaaagtttttttggttctttgattactgatgttttcaaactctcttctgttccttgaactatatccctccactcagtggtcacatctttgttttgttgtctgcttcttctatattatgagccttcctcaagtgtctgctgattcttggttatccaatcatagttgagaacaagataaagtgtagctaactgagacctcagagtatgtaggagtaaatagtatataaaatagctctggtggctcatgcctgtaatccagcactttgggaggccaaggcggacagaccacctgaggtcaggagttcgaaaccagcctggccaacatggagaaaccccatctctactaaaaatacaaaaattagccaggtggtggcacacgcctgtaatcccagctactcaggaggctgaggcaggagaatcgcctgaacctgggaggtggagattgcagtgagcccagattgcaccactgctctctagcctgggcaaaaaaactagttccaaaaaagacacttgtacacgcatgtttatagcagcacaatttgcgattgaaaacatagggaaccagcctaaatgcccatcaagcaatgagtggataaagacaatgcggtgtacatatacaccatggaatactattcagccacaaaaaggaacaaaataatggcattcacagcaacctggatggagttggagatcattattctaagtgaaataactcaggaatggagaaccaaatattgtacatcctcacttataagtgggagctgcgctatgaagatacaaaggcacaagaatgatacaatggattttggggacttaggggaaaggatgcaggggatgagggataaaaaaccatacattgggtacagtgtacactgctccagtgaagggtgcaccaaaatctcagaagtcactgctaaagaccttatccttgtaaccaaaagccatctgctccccaaaaactattgaaataaaataaaatataaaaagaaagagaaagaaaagaaaatagttccaatttatcatgcc

SEQ ID NO: 26725 - protein, 243 aa, Homo sapiens; identical to SEQ ID NO: 3573

SEQ ID NO: 26726 - DNA, 811 bp, Homo sapiens
tgagcctgtgggaaggccactggaagctcagcctccgggtggcatgactttgccccttgcatggggcttccctggttggggaccaggcagctgaccagggtggcaggtgttggctcagggaagaggctgctcactcttggcatcttgacccctttgtccaggatcctgctctgcaacatccacttcctgctcccgatctccctgaaggggctgctgctcgtgggcctgctctgcactgtgctgcaagtgagcagtgctaagggggcctccagggggaaataaagtcacagcctgagccggggaaccgcagctcccacaccatcaacaccctcggagggggcaagcagaacctctggcctcctatcaggagcagataaaagaaaggacatcccccttgcacactgattccttggaggcatctgcatctcaccttcatggatcctccctcaggcctcctttccttgtggctccaggatgaccctgtcagagatactggactatcgttcagttgcagaggccccagggcctgtctggacttttccatcccaagaggggctcggctctatcccctttgtgcctgtgaccctctccatcccccacccggctcagaactggcacagccaccaccaaccactcctgattcaacccaagcttcgccctttccacctctcgagctgtgcaacaacaaatgcaggatgctcagccctcatgtgtcagtcccctcaattcacttgtaattaaataacaacacacctctttttctaattttcaaaggtgtatatatttcccctcaataaagttgttaggatta

SEQ ID NO: 26727 - protein, 100 aa, Homo sapiens
MDPPSGLLSLWLQDDPVRDTGLSFSCRGPRACLDFSIPRGARLYPLCACDPLHPPPGSELAQPPPTTPDSTQASPFPPLELCNNKCRMLSPHVSVPSIHL

SEQ ID NO: 26728 - DNA, 3503 bp, Homo sapiens
gtgagaacacaaaggaaacttggacaagtagaaagtggatgacccaggctccgttacatatacttggattccagctgggacctagatttgctgaggacggaagccaaggagacaggaacatgtggctgctcccagctctactccttctctgcctctcaggctgtttgtctctgaagggccccggctctgtgactggcactgcgggggactctctgacagtgtggtgtcagtatgagagcatgtacaagggatataacaagtactggtgccgaggacagtacgacacgtcatgtgagagcattgtggagaccaagggagaagagaaggtggagaggaatggccgcgtgtccatcagagaccacccggaggctctcgccttcactgtgaccatgcagaacctcaatgaagatgatgctggatcttactggtgcaaaattcagacagtgtgggtcctggattcatggtcacgcgatccctcggacctggttagggtgtatgtttccccagcaattacaaccccaaggaggaccacacatccagccacacctcccatcttcctggtggtgaaccctgggcgaaacctcagcaccggggaggtgttgacccaaaattcagggttccggctcagcagccctcacttcctgctcgtggtccttctgaagctgcccctgctcctgagcatgctgggtgctgtcttctgggtgaacaggcctcagtgggctcctcctggaagatagagccaggctgacccgaagccctgcagagccccatccccaggagtgccccgtgcagggagtcaacctttcagactggatgcgagagacctgtggactctggagggatttattgttcctgtgcctcaaaggagggtcctggctcttagaggacactcctctggagtcctcaatgtgcagcttgggggtcctcctttctcctccccagtcccctgcctccctgccctcatgcccacttcccaagggcaagaattccctggaagttggccgggcaccatagcgagtgcctataatcccagctcaggaggctgaggcaggaggatcggctgaacgtaagagttccaggccagcctgggcaacatagagagccctgtctcagagagagagagagagagagagagagagagacagagagagagagagagagagagcgagagagagagagagagagagaaaaggacggaggaagggagggaaaaaattttctggaggagcctggcccttcattcttcttggcacaaatgcttctcaggccagtttcccccagggcaataactacctccttcctgcagacaggagtctccctgaggacacacccctcacagccccagcctttaggctcacagagctccatctcttctctgggacaaccccaagggagcttggtcccggcagagcttgctcatgcagttgcccagtgtcccacatgctcagggctcctctcgtcttctgacgccccttgggtctccctggctttaaggccccttctctccctgtaaccaggcagtgtgtggctgggctcagaacatctctgcctgggtgggccgtggatgagctgctccaggttaaagttctggggcgagttgaaacagtaaagggagaaggagctggtgggtgcccctgatatcactcctggaattcccccacctggaggtgtccaatgcacaaggtcaacagagtcagttctgtccactttagaagtctggctgagaccacctgttagcaattaaccttttccacaggcagagcagatatcgtttttcaaagacaggatggagggcacagaggtgaaggatacttgtccacacttgaagtgcacagtgctatcaccactactggtgacccctggctcgggaatgagctcagttggttttctgaatgtttgtcaattactctgtttccctaaagtttgtggggaggactcccacagtctgccacaagcaagcatcaccatctccacttgctacctacatctggaccagtgctccccctctgcccccaggcctgagctcatcctgagctagtgatgccagtgtccagagcacatggagtgaccctctgagtgccgagtgcttaggcagagctgccgtgctctgaacttgagctctggtggggctcccagctccatcatgcatggtgactaggggaaagatggggctggcccaggactcatgctgaaagagaaattcaatctaacaaggcccatattaattatattaacccgggaaatatgatgatgagcaagaaaggagcttatgattcattttatgagaaggataagctcccaagtcattacagcataggaagaactctagagccacaagagatgcttcctgatgtcagggggttggtgaggagaatatcatgccaagctggccaggtcagggaaagaaggtgacattcatgttgatgttgaaggaggtataggatttcagcggagcagggatggagcaacagggagagagagaggacagagaaacagcataagtgaaagcagagaggcgggaaataatcttcataacaatagtcacttatagaagacctatcagcaaatggactgtactgttcacatacagatgctcatggtaggatgtgtctaagattccaatggagtgaaattttcctgtggcaggccagatggaactaatctagaagaactcaggtggtggcaggttcaggaggcttaggactcaactcttacttaaactttgattagctatggtgggatggatttgagcagaacaagatgggattgcagatgtgctttaggaggacttgcctagcagatgtagcaaagtctgaaaggaagaatctgggagtccggagtcttaagcctggaaaaccagaggaatcgggcatcattgacagaagtaggaaagtcaagagcaggcttggatgatgcagagcttagttttctgtgtgtttggaatcatcaggcagagaggtctagcagatagctagagatgtgggttagcagagtgttgagggctggagaggaatgtgtgtagagagattaactggaacccagcaagaagtgaaaacatggagggaagagttcagaaccaaggacagagccctcggggcacctgcatttaaagacaaagggtaggaggaagacattgatcaaggtgctggagcagaatcaaacaggtggaagatgagaagtcaagagccatgaatgtttcaaggaggagagcagagctagagaggtggaggaggaccgggattgagaggaggctattgaacttatcattcacaaggtcactaatgaagttcagaagagcagatcaacagagcaatgacagcagaagccagaagagaagagttaagaaagagtagacagatggcagacagcaggtgcaggagaaacaaacagtggcttctccatgctttgaattttcccttctcccttactccctttttttcccctattcttcctttcttttttccctttatttactcattcattcaataaacttttattgtgtg

SEQ ID NO: 26729 - protein, 232 aa, Homo sapiens
MTQAPLHILGFQLGPRFAEDGSQGDRNMWLLPALLLLCLSGCLSLKGPGSVTGTAGDSLTVWCQYESMYKGYNKYWCRGQYDTSCESIVETKGEEKVERNGRVSIRDHPEALAFTVTMQNLNEDDAGSYWCKIQTVWVLDSWSRDPSDLVRVYVSPAITTPRRTTHPATPPIFLVVNPGRNLSTGEVLTQNSGFRLSSPHFLLVVLLKLPLLLSMLGAVFWVNRPQWAPPGR

SEQ ID NO: 26730 - DNA, 3805 bp, Homo sapiens
ttcatcccctgccaggagagcatagtagctcacatttattgagttcttagtacacgctgggcactgttctaggctttttacatgaattaactcattaaatactcagaacaaaaccatgaggcaggtactattataatattatctccattttgtggacacttaggaaagattaatttgcccgagtttgcacgactaataattttcagaatcgagatttgaatcctggagcctgtgctcctaaccaaaccaccatctgcctctcctgagcccattgtccttaacttcttgcggtcatgtgtgctggagagaatgtgatcaaagccctggaccttctccctaggaaaacgcaggtaaacagaattttgcatatttcagggactttggggacacctaagacccatctactgtcgacctcagacttagaagctctatttatctcatacatcctggagagaattgtccagggacaaaaacagaagcgccgccagcgccgcaggacttcgcctctgcaaacgtgtgaggagagctgcgctgcgctgagctgcgtggtgacggagatgcccgttcgctcgggatcaggaacggtgagctcctgggaccgcaatgccctgagaacgcagccgggtgctgagcctccggagtccggtagctgaatgaaatacgcagggatcaccagccggacccaaatcttgcgtccctgccagcatcctggagtcctaagaggcagggattggagcggacaggatctcagaactctggtcccgggcgcacaacggcggagtcgctgttcctggtgctgaaacgctcagtcctggaagaacgtggccgcctgcccgcctggtaccgcgccgcggccgctgcggggaactgtccagtgctgaaaacggatgcggcccggcccgcagagctcagacccaagcctgccgcacccagcggagctcgaaccgagctcctggaagcgctgacgcagagcgcagggagagccggagcggcgagctccaagcctggcatggacctgcagagacccgattcctaccagggaggagctggccctgacttcaacgaccacgtcctgcataagaccatcctggtgggtgacagtggtgtgggaaagacgtctctgctggttcagttcgatcagggcaagttcatccccggctccttctcggccactgtgggcatcggattcacgaacaaggtggtgactgtggatggcgtgagagtgaagctgcagatctgggacaccgctgggcaggaacggttccgaagcgtcacccatgcttattacagagatgctcaggccttgcttctgctgtatgacatcaccaacaaatcttctttcgacaacatcagggcctggctcactgagattcatgagtatgcccagagggacgtggtgatcatgctgctaggcaacaaggcggatatgagcagcgaaagagtgatccgttccgaagacggagagaccttggccagggagtacggtgttcccttcctggagaccagcgccaagactggcatgaatgtggagttagcctttctggccatcgccaagtgagagctgggcagggaagggaagtgtgcggggcagggcggcacactccaggaatccagtagggcccggcccctggcccagcccctggacacacctgcattctgcaggctgaggtccatttgctctgggagcactgggccactgggagaggggagggggcggctcagctcctcaccccagcccagcccagcccagcccagcccattgtctcttcttcaagggaactgaaataccgggccgggcatcaggcggatgagcccagcttccagatccgagactatgtagagtcccagaagaagcgctccagctgctgctccttcatgtgaatcccagggggcagagaggaggctctggaggcacacaggatgcagccttccccctcccaggcctggcttattccaagaggctgagccaatggggagaaagatggaggactcactgcacagccgcttcctagcagggagctatactccaactcctacttgagttcctgcggtctccccgcatccacagggagggtaaaacacttagcttttattttaatagtacataatttaataccaaaaaaggcgcctggatccccaaaaaaccgaggctgggagctagtggcccttttgctttctaggacttggggggccggccctccctcctaagcataacaaaggtggtgttgctccagctcagccccaggggacacagatgcactttgggggtgagggcaggtaatgactccatcgcaccctcagttcagctggacagaggctcaggtgaccccagccttcactgtctcccgctctccaggagcttatcttcgccccatctcccaaataagtgggcccttgtgctgtgaggaagaccaaagcctcagggaagataagagatatggagatgggagggggaggacaaggggcagagagtagggtctagctggctatctctggccttactaacacccccctggaggcatgccccttttctccagcacacaagcacattggggcacctggaaatattggttccaggctcctgttctctggacttcagatcctgggggagcccctcccccccctgaatccctggcttagctaccttcctgcctgtgcacctaaaaacctcaggtcagaactaggaaaagagttttgtttttatttttttgaaatggagtctcgttctgtcgcccaggctgaggtgcagtagtgcaatctccgctcactacaacctccactccctggggctcaagcgatcctcccacctcagccgccgaagtagctgggactataggtgtgtaccatcacacctggctaatttttgtattttttgtagacacagggtttcgccatgttgcccaggctggtcttgaattcctgagctcaagcaacctgccggcctcggcctcccaaagtactgggattacacgcagaaggcaccatgcccaggctagatgtgtcttatcccaatcctttggcaggcatgcagctccacaggcgatttcttcaagcagctgaagtgtttagccctcctgggttaagagccagataaggagaaatccctttcctaggtttggaatgtgttgtgaaaaaaaagagaaatccctggctcctggagctggtgggagacaagattaagcaaacctcccctgacatgtatccctttgaccccaagctctgcctcctccctgaccacccatgccctttcctttaacttctcaaacagataccagggcctaaactgctttacctcccctcctactgagtcaggttaggtggtgggaggtcacccatttccgagttaaaccaatgcaatatgagtaaaacaaagtcatgtgggtatgtctggggtagagagaggggtagcaagttcatgtgtcctccttggtcacatatctcccaaagctccgatccctgccatgggaagtggacaggaaacatgaggtcatgacctgcaggcatctttactgcagctctgccggcctggagggggagagggggaggaagaagtatgcgctgcacatttctgaggctactgcatttgctttcaaggcagaaatcttgctctgagcagtcagcggctccagtttgggcccgataaggaagttctccgtggcctccctcaggcagagcagggaggaggctgacattgccagtctcttctggggcccaaggcaggttgcaggagatccaatcccatagacagctctgggcctcttgcatttgagtttttcagaattaaactgcagtattttggaaagca

SEQ ID NO: 26731 - protein, 182 aa, Homo sapiens
MDLQRPDSYQGGAGPDFNDHVLHKTILVGDSGVGKTSLLVQFDQGKFIPGSFSATVGIGFTNKVVTVDGVRVKLQIWDTAGQERFRSVTHAYYRDAQALLLLYDITNKSSFDNIRAWLTEIHEYAQRDVVIMLLGNKADMSSERVIRSEDGETLAREYGVPFLETSAKTGMNVELAFLAIAK

SEQ ID NO: 26732 - DNA, 1730 bp, Homo sapiens
ggagatgcccgttcgctcgggatcaggaacggtgagctcctgggaccgcaatgccctgagaacgcagccgggtgctgagcctccggagtccggtagctgaatgaaatacgcagggatcaccagccggacccaaatcttgcgtccctgccagcatcctggagtcctaagaggcagggattggagcggacaggatctcagaactctggtcccgggcgcacaacggcggagtcgctgttcctggtgctgaaacgctcagtcctggaagaacgtggccgcctgcccgcctggtaccgcgccgcggccgctgcggggaactgtccagtgctgaaaacggatgcggcccggcccgcagagctcagacccaagcctgccgcacccagcggagctcgaaccgagctcctggaagcgctgacgcagagcgcagggagagccggagcggcgagctccaagcctggcatggacctgcagagacccgattcctaccagggaggagctggccctgacttcaacgaccacgtcctgcataagaccatcctggtgggtgacagtggtgtgggaaagacgtctctgctggttcagttcgatcagggcaagttcatccccggctccttctcggccactgtgggcatcggattcacgaacaaggtggtgactgtggatggcgtgagagtgaagctgcagatctgggacaccgctgggcaggaacggttccgaagcgtcacccatgcttattacagagatgctcaggccttgcttctgctgtatgacatcaccaacaaatcttctttcgacaacatcagggcctggctcactgagattcatgagtatgcccagagggacgtggtgatcatgctgctaggcaacaaggcggatatgagcagcgaaagagtgatccgttccgaagacggagagaccttggccagggagtacggtgttcccttcctggagaccagcgccaagactggcatgaatgtggagttagcctttctggccatcgccaaggaactgaaataccgggccgggcatcaggcggatgagcccagcttccagatccgagactatgtagagtcccagaagaagcgctccagctgctgctccttcatgtgaatcccagggggcagagaggaggctctggaggcacacaggatgcagccttcccccacccatgccctttcctttaacttctcaaacagataccagggcctaaactgctttacctcccctcctactgagtcaggttaggtggtgggaggtcacccatttccgagttaaaccaatgcaatatgagtaaaacaaagtcatgtgggtatgtctggggtagagagaggggtagcaagttcatgtgtcctccttggtcacatatctcccaaagctccgatccctgccatgggaagtggacaggaaacatgaggtcatgacctgcaggcatctttactgcagctctgccggcctggagggggagagggggaggaagaagtatgcgctgcacatttctgaggctactgcatttgctttcaaggcagaaatcttgctctgagcagtcagcggctccagtttgggcccgataaggaagttctccgtggcctccctcaggcagagcagggaggaggctgacattgccagtctcttctggggcccaaggcaggttgcaggagatccaatcccatagacagctctgggcctcttgcatttgagtttttcagaattaaactgcagtattttggaaagca

SEQ ID NO: 26733 - protein, 216 aa, Homo sapiens; identical to SEQ ID NO: 3581

SEQ ID NO: 26734 - DNA, 3826 bp, Homo sapiens
gatgcccgttcgctcgggatcaggaacggtgagctcctgggaccgcaatgccctgagaacgcagccgggtgctgagcctccggagtccggtagctgaatgaaatacgcagggatcaccagccggacccaaatcttgcgtccctgccagcatcctggagtcctaagaggcagggattggagcggacaggatctcagaactctggtcccgggcgcacaacggcggagtcgctgttcctggtgctgaaacgctcagtcctggaagaacgtggccgcctgcccgcctggtaccgcgccgcggccgctgcggggaactgtccagtgctgaaaacggatgcggcccggcccgcagagctcagacccaagcctgccgcacccagcggagctcgaaccgagctcctggaagcgctgacgcagagcgcagggagagccggagcggcgagctccaagcctggcatggacctgcagagacccgattcctaccagggaggagctggccctgacttcaacgaccacgtcctgcataagaccatcctggtgggtgacagtggtgtgggaaagacgtctctgctggttcagttcgatcagggcaagttcatccccggctccttctcggccactgtgggcatcggattcacgaacaaggtggtgactgtggatggcgtgagagtgaagctgcagatctgggacaccgctgggcaggaacggttccgaagcgtcacccatgcttattacagagatgctcaggccttgcttctgctgtatgacatcaccaacaaatcttctttcgacaacatcagggcctggctcactgagattcatgagtatgcccagagggacgtggtgatcatgctgctaggcaacaaggtgagtggctccggggcagggtcagcccagccctgcacttcctcagccctagccggccccataaccacccaagaacagttatctaggcatccttcctgaaaaggactctgcagcctccagctcaggggtcagacatatctggaggcttctgcccatcccatctgccccttccagggaaagtccaagttgttgcctgagaaatcaaggggtgcccagttctcagcccccattagagcagagtgaacagggtcccaggtcaggggctaagagtgcaaagggttagccccaactgctgtcctattccaagaccctttaccaaaggtgagatcccagagctgggagctacactgggcagaaaccctggccccaggccaatcacacctgcctgcagtcccttgggccaccagcagagggcaggcaacgcctgcttctggggcaaaatatgggcccgctggggcggaggcctccttccccagagtgacccatttgggcttgacaggcggatatgagcagcgaaagagtgatccgttccgaagacggagagaccttggccagggtaagtgattgtctgtgggacagggtgaagggtgggggcaacccgacgctggccctgaggacactctctcccgggcaggagtacggtgttcccttcctggagaccagcgccaagactggcatgaatgtggagttagcctttctggccatcgccaagtgagagctgggcagggaagggaagtgtgcggggcagggcggcacactccaggaatccagtagggcccggcccctggcccagcccctggacacacctgcattctgcaggctgaggtccatttgctctgggagcactgggccactgggagaggggagggggcggctcagctcctcaccccagcccagcccagcccagcccagcccattgtctcttcttcaagggaactgaaataccgggccgggcatcaggcggatgagcccagcttccagatccgagactatgtagagtcccagaagaagcgctccagctgctgctccttcatgtgaatcccagggggcagagaggaggctctggaggcacacaggatgcagccttccccctcccaggcctggcttattccaagaggctgagccaatggggagaaagatggaggactcactgcacagccgcttcctagcagggagctatactccaactcctacttgagttcctgcggtctccccgcatccacagggagggtaaaacacttagcttttattttaatagtacataatttaataccaaaaaaggcgcctggatccccaaaaaaccgaggctgggagctagtggcccttttgctttctaggacttggggggccggccctccctcctaagcataacaaaggtggtgttgctccagctcagccccaggggacacagatgcactttgggggtgagggcaggtaatgactccatcgcaccctcagttcagctggacagaggctcaggtgaccccagccttcactgtctcccgctctccaggagcttatcttcgccccatctcccaaataagtgggcccttgtgctgtgaggaagaccaaagcctcagggaagataagagatatggagatgggagggggaggacaaggggcagagagtagggtctagctggctatctctggccttactaacacccccctggaggcatgccccttttctccagcacacaagcacattggggcacctggaaatattggttccaggctcctgttctctggacttcagatcctgggggagcccctcccccccctgaatccctggcttagctaccttcctgcctgtgcacctaaaaacctcaggtcagaactaggaaaagagttttgtttttatttttttgaaatggagtctcgttctgtcgcccaggctgaggtgcagtagtgcaatctccgctcactacaacctccactccctggggctcaagcgatcctcccacctcagccgccgaagtagctgggactataggtgtgtaccatcacacctggctaatttttgtattttttgtagacacagggtttcgccatgttgcccaggctggtcttgaattcctgagctcaagcaacctgccggcctcggcctcccaaagtactgggattacacgcagaaggcaccatgcccaggctagatgtgtcttatcccaatcctttggcaggcatgcagctccacaggcgatttcttcaagcagctgaagtgtttagccctcctgggttaagagccagataaggagaaatccctttcctaggtttggaatgtgttgtgaaaaaaaagagaaatccctggctcctggagctggtgggagacaagattaagcaaacctcccctgacatgtatccctttgaccccaagctctgcctcctccctgaccacccatgccctttcctttaacttctcaaacagataccagggcctaaactgctttacctcccctcctactgagtcaggttaggtggtgggaggtcacccatttccgagttaaaccaatgcaatatgagtaaaacaaagtcatgtgggtatgtctggggtagagagaggggtagcaagttcatgtgtcctccttggtcacatatctcccaaagctccgatccctgccatgggaagtggacaggaaacatgaggtcatgacctgcaggcatctttactgcagctctgccggcctggagggggagagggggaggaagaagtatgcgctgcacatttctgaggctactgcatttgctttcaaggcagaaatcttgctctgagcagtcagcggctccagtttgggcccgataaggaagttctccgtggcctccctcaggcagagcagggaggaggctgacattgccagtctcttctggggcccaaggcaggttgcaggagatccaatcccatagacagctctgggcctcttgcatttgagtttttcagaattaaactgcagtattttggaaagca

SEQ ID NO: 26735 - protein, 169 aa, Homo sapiens
MDLQRPDSYQGGAGPDFNDHVLHKTILVGDSGVGKTSLLVQFDQGKFIPGSFSATVGIGFTNKVVTVDGVRVKLQIWDTAGQERFRSVTHAYYRDAQALLLLYDITNKSSFDNIRAWLTEIHEYAQRDVVIMLLGNKVSGSGAGSAQPCTSSALAGPITTQEQLSRHPS

SEQ ID NO: 26736 - DNA, 1722 bp, Homo sapiens
ccagaaccactagaaatcattaggaccaccaggacagcctctccacagccatctgatgtggctgcctcagctcgacctcatgagggtcatcagtgctaagagtcaaggctactccattgtcactcaaatcaccggtccaacaacagtgaatggcttggagcggggctccttgaccgtgcagtgtgtttacagatcaggctgggagacctacttgaagtggtggtgtcgaggagctatttggcgtgactgcaagatccttgttaaaaccagtgggtcagagcaggaggtgaagagggaccgggtgtccatcaaggacaatcagaaaaaccgcacgttcactgtgaccatggaggatctcatgaaaactgatgctgacacttactggtgtggaattgagaaaactggaaatgaccttggggtcacagttcaagtgaccattgacccagcaccagtcacccaagaagaaactagcagctccccaactctgaccggccaccacttggacaacaggcacaagctcctgaagctcagtgtcctcctgcccctcatcttcaccatattgctgctgcttttggtggccgcctcactcttggcttggaggatgatgaagtaccagcagaaagcagccgggatgtccccagagcaggtactgcagcccctggagggcgacctctgctatgcagacctgaccctgcagctggccggaacctccccgcaaaaggctaccacgaagctttcctctgcccaggttgaccaggtggaagtggaatatgtcaccatggcttccttgccgaaggaggacatttcctatgcatctctgaccttgggtgctgaggatcaggaaccgacctactgcaacatgggccacctcagtagccacctccccggcaggggccctgaggagcccacggaatacagcaccatcagcaggccttagcctgcactccaggctccttcttggaccccaggctgtgagcacactcctgcctcatcgaccgtctgccccctgctcccctcatcaggaccaacccggggactggtgcctctgcctgatcagccagcattgcccctagctctgggttgggcttggggccaagtctcagggggcttctaggagttggggttttctaaacgtcccctcctctcctacatagttgaggagggggctagggatatgctctggggctttcatgggaatgatgaagatgataatgagaaaaatgttatcattattatcatgaagtaccattatcgtaatacaatgaacctttatttattgcctaccacatgttatgggctgaataatggcccccaaagatatctgtgtcctaatcctcagaacctgtgactgttaccttctgtggcagaaagggacagtgcagatgtatgtaagttaaggactttgagatagagaggttattcttgctgattcaggtgggcccaaaatatcaccacaagggtcctcataagaaagaggccagaaggtcaaagaggtagagacaaagtgatgatggaagtggacgtgggtgtgacgtgagcaggggccatgaatgccgcagccttcagatgccagaaagggaaaggaatggattcccctgcctggagcctccaaaagaaaccagccctgcccacgccttgacttgagcccattgaaactgatcttgagctcctggcctccagaattgcaggagaataaatttgtgttgtttttaatgagccacg

SEQ ID NO: 26737 - protein, 293 aa, Homo sapiens
MWLPQLDLMRVISAKSQGYSIVTQITGPTTVNGLERGSLTVQCVYRSGWETYLKWWCRGAIWRDCKILVKTSGSEQEVKRDRVSIKDNQKNRTFTVTMEDLMKTDADTYWCGIEKTGNDLGVTVQVTIDPAPVTQEETSSSPTLTGHHLDNRHKLLKLSVLLPLIFTILLLLLVAASLLAWRMMKYQQKAAGMSPEQVLQPLEGDLCYADLTLQLAGTSPQKATTKLSSAQVDQVEVEYVTMASLPKEDISYASLTLGAEDQEPTYCNMGHLSSHLPGRGPEEPTEYSTISRP

SEQ ID NO: 26738 - DNA, 1738 bp, Homo sapiens
aagttcaagggcgagagtgagtaccagcagaaggctgggagtctgtagtttgttcctgctgccaggctccactgaggggaacggggacctgtctgaagagaagatgcccctgctgacactctacctgctcctcttctggctctcaggctactccattgtcactcaaatcaccggtccaacaacagtgaatggcttggagcggggctccttgaccgtgcagtgtgtttacagatcaggctgggagacctacttgaagtggtggtgtcgaggagctatttggcgtgactgcaagatccttgttaaaaccagtgggtcagagcaggaggtgaagagggaccgggtgtccatcaaggacaatcagaaaaaccgcacgttcactgtgaccatggaggatctcatgaaaactgatgctgacacttactggtgtggaattgagaaaactggaaatgaccttggggtcacagttcaagtgaccattgacccagcaccagtcacccaagaagaaactagcagctccccaactctgaccggccaccacttggacaacaggcacaagctcctgaagctcagtgtcctcctgcccctcatcttcaccatattgctgctgcttttggtggccgcctcactcttggcttggaggatgatgaagtaccagcagaaaggtactgcagcccctggagggcgacctctgctatgcagacctgaccctgcagctggccggaacctccccgcaaaaggctaccacgaagctttcctctgcccaggttgaccaggtggaagtggaatatgtcaccatggcttccttgccgaaggaggacatttcctatgcatctctgaccttgggtgctgaggatcaggaaccgacctactgcaacatgggccacctcagtagccacctccccggcaggggccctgaggagcccacggaatacagcaccatcagcaggccttagcctgcactccaggctccttcttggaccccaggctgtgagcacactcctgcctcatcgaccgtctgccccctgctcccctcatcaggaccaacccggggactggtgcctctgcctgatcagccagcattgcccctagctctgggttgggcttggggccaagtctcagggggcttctaggagttggggttttctaaacgtcccctcctctcctacatagttgaggagggggctagggatatgctctggggctttcatgggaatgatgaagatgataatgagaaaaatgttatcattattatcatgaagtaccattatcgtaatacaatgaacctttatttattgcctaccacatgttatgggctgaataatggcccccaaagatatctgtgtcctaatcctcagaacctgtgactgttaccttctgtggcagaaagggacagtgcagatgtatgtaagttaaggactttgagatagagaggttattcttgctgattcaggtgggcccaaaatatcaccacaagggtcctcataagaaagaggccagaaggtcaaagaggtagagacaaagtgatgatggaagtggacgtgggtgtgacgtgagcaggggccatgaatgccgcagccttcagatgccagaaagggaaaggaatggattcccctgcctggagcctccaaaagaaaccagccctgcccacgccttgacttgagcccattgaaactgatcttgagctcctggcctccagaattgcaggagaataaatttgtgttgtttttaatgagccacg

SEQ ID NO: 26739 - protein, 221 aa, Homo sapiens
MPLLTLYLLLFWLSGYSIVTQITGPTTVNGLERGSLTVQCVYRSGWETYLKWWCRGAIWRDCKILVKTSGSEQEVKRDRVSIKDNQKNRTFTVTMEDLMKTDADTYWCGIEKTGNDLGVTVQVTIDPAPVTQEETSSSPTLTGHHLDNRHKLLKLSVLLPLIFTILLLLLVAASLLAWRMMKYQQKGTAAPGGRPLLCRPDPAAGRNLPAKGYHEAFLCPG

SEQ ID NO: 26740 - DNA, 1807 bp, Homo sapiens
aagttcaagggcgagagtgagtaccagcagaaggctgggagtctgtagtttgttcctgctgccaggctccactgaggggaacggggacctgtctgaagagaagatgcccctgctgacactctacctgctcctcttctggctctcaggctactccattgtcactcaaatcaccggtccaacaacagtgaatggcttggagcggggctccttgaccgtgcagtgtgtttacagatcaggctgggagacctacttgaagtggtggtgtcgaggagctatttggcgtgactgcaagatccttgttaaaaccagtgggtcagagcaggaggtgaagagggaccgggtgtccatcaaggacaatcagaaaaaccgcacgttcactgtgaccatggaggatctcatgaaaactgatgctgacacttactggtgtggaattgagaaaactggaaatgaccttggggtcacagttcaagtgaccattgacccagcaccagtcacccaagaagaaactagcagctccccaactctgaccggccaccacttggacaacaggagtgagggttcccaggctgcaaactacagacctgcagctcatcaggcacaagctcctgaagctcagtgtcctcctgcccctcatcttcaccatattgctgctgcttttggtggccgcctcactcttggcttggaggatgatgaagtaccagcagaaagcagccgggatgtccccagagcaggtactgcagcccctggagggcgacctctgctatgcagacctgaccctgcagctggccggaacctccccgcaaaaggctaccacgaagctttcctctgcccaggttgaccaggtggaagtggaatatgtcaccatggcttccttgccgaaggaggacatttcctatgcatctctgaccttgggtgctgaggatcaggaaccgacctactgcaacatgggccacctcagtagccacctccccggcaggggccctgaggagcccacggaatacagcaccatcagcaggccttagcctgcactccaggctccttcttggaccccaggctgtgagcacactcctgcctcatcgaccgtctgccccctgctcccctcatcaggaccaacccggggactggtgcctctgcctgatcagccagcattgcccctagctctgggttgggcttggggccaagtctcagggggcttctaggagttggggttttctaaacgtcccctcctctcctacatagttgaggagggggctagggatatgctctggggctttcatgggaatgatgaagatgataatgagaaaaatgttatcattattatcatgaagtaccattatcgtaatacaatgaacctttatttattgcctaccacatgttatgggctgaataatggcccccaaagatatctgtgtcctaatcctcagaacctgtgactgttaccttctgtggcagaaagggacagtgcagatgtatgtaagttaaggactttgagatagagaggttattcttgctgattcaggtgggcccaaaatatcaccacaagggtcctcataagaaagaggccagaaggtcaaagaggtagagacaaagtgatgatggaagtggacgtgggtgtgacgtgagcaggggccatgaatgccgcagccttcagatgccagaaagggaaaggaatggattcccctgcctggagcctccaaaagaaaccagccctgcccacgccttgacttgagcccattgaaactgatcttgagctcctggcctccagaattgcaggagaataaatttgtgttgtttttaatgagccacg

SEQ ID NO: 26741 - protein, 244 aa, Homo sapiens
MPLLTLYLLLFWLSGYSIVTQITGPTTVNGLERGSLTVQCVYRSGWETYLKWWCRGAIWRDCKILVKTSGSEQEVKRDRVSIKDNQKNRTFTVTMEDLMKTDADTYWCGIEKTGNDLGVTVQVTIDPAPVTQEETSSSPTLTGHHLDNRSEGSQAANYRPAAHQAQAPEAQCPPAPHLHHIAAAFGGRLTLGLEDDEVPAESSRDVPRAGTAAPGGRPLLCRPDPAAGRNLPAKGYHEAFLCPG

SEQ ID NO: 26742 - DNA, 1761 bp, Homo sapiens
aagttcaagggcgagagtgagtaccagcagaaggctgggagtctgtagtttgttcctgctgccaggctccactgaggggaacggggacctgtctgaagagaagatgcccctgctgacactctacctgctcctcttctggctctcaggctactccattgtcactcaaatcaccggtccaacaacagtgaatggcttggagcggggctccttgaccgtgcagtgtgtttacagatcaggctgggagacctacttgaagtggtggtgtcgaggagctatttggcgtgactgcaagatccttgttaaaaccagtgggtcagagcaggaggtgaagagggaccgggtgtccatcaaggacaatcagaaaaaccgcacgttcactgtgaccatggaggatctcatgaaaactgatgctgacacttactggtgtggaattgagaaaactggaaatgaccttggggtcacagttcaagtgaccattgacccagcaccagtcacccaagaagaaactagcagctccccaactctgaccggccaccacttggacaacaggcacaagctcctgaagctcagtgtcctcctgcccctcatcttcaccatattgctgctgcttttggtggccgcctcactcttggcttggaggatgatgaagtaccagcagaaagcagccgggatgtccccagagcaggtactgcagcccctggagggcgacctctgctatgcagacctgaccctgcagctggccggaacctccccgcaaaaggctaccacgaagctttcctctgcccaggttgaccaggtggaagtggaatatgtcaccatggcttccttgccgaaggaggacatttcctatgcatctctgaccttgggtgctgaggatcaggaaccgacctactgcaacatgggccacctcagtagccacctccccggcaggggccctgaggagcccacggaatacagcaccatcagcaggccttagcctgcactccaggctccttcttggaccccaggctgtgagcacactcctgcctcatcgaccgtctgccccctgctcccctcatcaggaccaacccggggactggtgcctctgcctgatcagccagcattgcccctagctctgggttgggcttggggccaagtctcagggggcttctaggagttggggttttctaaacgtcccctcctctcctacatagttgaggagggggctagggatatgctctggggctttcatgggaatgatgaagatgataatgagaaaaatgttatcattattatcatgaagtaccattatcgtaatacaatgaacctttatttattgcctaccacatgttatgggctgaataatggcccccaaagatatctgtgtcctaatcctcagaacctgtgactgttaccttctgtggcagaaagggacagtgcagatgtatgtaagttaaggactttgagatagagaggttattcttgctgattcaggtgggcccaaaatatcaccacaagggtcctcataagaaagaggccagaaggtcaaagaggtagagacaaagtgatgatggaagtggacgtgggtgtgacgtgagcaggggccatgaatgccgcagccttcagatgccagaaagggaaaggaatggattcccctgcctggagcctccaaaagaaaccagccctgcccacgccttgacttgagcccattgaaactgatcttgagctcctggcctccagaattgcaggagaataaatttgtgttgtttttaatgagccacg

SEQ ID NO: 26743 - protein, 290 aa, Homo sapiens; identical to SEQ ID NO: 3583

SEQ ID NO: 26744 - DNA, 1831 bp, Homo sapiens
tgaaggaggaagttcaagggcgagagtgagtaccagcagaaggctgggagtctgtagtttgttcctgctgccaggctccactgaggggaacggggacctgtctgaagagaagatgcccctgctgacactctacctgctcctcttctggctctcagcacatggagaccagttgccgttgctgttttgatcaacttcaaaggcattcatccagggtggtttattccagaaccactagaaatcattaggaccaccaggacagcctctccacagccatctgatgtggctgcctcagctcgacctcatgagggtcatcagtgctaagagtcaaggctactccattgtcactcaaatcaccggtccaacaacagtgaatggcttggagcggggctccttgaccgtgcagtgtgtttacagatcaggctgggagacctacttgaagtggtggtgtcgaggagctatttggcgtgactgcaagatccttgttaaaaccagtgggtcagagcaggaggtgaagagggaccgggtgtccatcaaggacaatcagaaaaaccgcacgttcactgtgaccatggaggatctcatgaaaactgatgctgacacttactggtgtggaattgagaaaactggaaatgaccttggggtcacagttcaagtgaccattgacccagcaccagtcacccaagaagaaactagcagctccccaactctgaccggccaccacttggacaacagcagccgggatgtccccagagcaggtactgcagcccctggagggcgacctctgctatgcagacctgaccctgcagctggccggaacctccccgcaaaaggctaccacgaagctttcctctgcccaggttgaccaggtggaagtggaatatgtcaccatggcttccttgccgaaggaggacatttcctatgcatctctgaccttgggtgctgaggatcaggaaccgacctactgcaacatgggccacctcagtagccacctccccggcaggggccctgaggagcccacggaatacagcaccatcagcaggccttagcctgcactccaggctccttcttggaccccaggctgtgagcacactcctgcctcatcgaccgtctgccccctgctcccctcatcaggaccaacccggggactggtgcctctgcctgatcagccagcattgcccctagctctgggttgggcttggggccaagtctcagggggcttctaggagttggggttttctaaacgtcccctcctctcctacatagttgaggagggggctagggatatgctctggggctttcatgggaatgatgaagatgataatgagaaaaatgttatcattattatcatgaagtaccattatcgtaatacaatgaacctttatttattgcctaccacatgttatgggctgaataatggcccccaaagatatctgtgtcctaatcctcagaacctgtgactgttaccttctgtggcagaaagggacagtgcagatgtatgtaagttaaggactttgagatagagaggttattcttgctgattcaggtgggcccaaaatatcaccacaagggtcctcataagaaagaggccagaaggtcaaagaggtagagacaaagtgatgatggaagtggacgtgggtgtgacgtgagcaggggccatgaatgccgcagccttcagatgccagaaagggaaaggaatggattcccctgcctggagcctccaaaagaaaccagccctgcccacgccttgacttgagcccattgaaactgatcttgagctcctggcctccagaattgcaggagaataaatttgtgttgtttttaatgagccacg

SEQ ID NO: 26745 - protein, 194 aa, Homo sapiens
MWLPQLDLMRVISAKSQGYSIVTQITGPTTVNGLERGSLTVQCVYRSGWETYLKWWCRGAIWRDCKILVKTSGSEQEVKRDRVSIKDNQKNRTFTVTMEDLMKTDADTYWCGIEKTGNDLGVTVQVTIDPAPVTQEETSSSPTLTGHHLDNSSRDVPRAGTAAPGGRPLLCRPDPAAGRNLPAKGYHEAFLCPG

SEQ ID NO: 26746 - DNA, 860 bp, Homo sapiens
ccagaaccactagaaatcattaggaccaccaggacagcctctccacagccatctgatgtggctgcctcagctcgacctcatgagggtcatcagtgctaagagtcaaggctactccattgtcactcaaatcaccggtccaacaacagtgaatggcttggagcggggctccttgaccgtgcagtgtgtttacagatcaggctgggagacctacttgaagtggtggtgtcgaggagctatttggcgtgactgcaagatccttgttaaaaccagtgggtcagagcaggaggtgaagagggaccgggtgtccatcaaggacaatcagaaaaaccgcacgttcactgtgaccatggaggatctcatgaaaactgatgctgacacttactggtgtggaattgagaaaactggaaatgaccttggggtcacagttcaagtgaccattgacccagcaccagtcacccaagaagaaactagcagctccccaactctgaccggccaccacttggacaacaggtactgcagcccctggagggcgacctctgctatgcagacctgaccctgcagctggccggaacctccccgcaaaaggctaccacgaagctttcctctgcccaggttgaccaggtggaagtggaatatgtcaccatggcttccttgccgaaggaggacatttcctatgcatctctgaccttgggtgctgaggatcaggaaccgacctactgcaacatgggccacctcagtagccacctccccggcaggggccctgaggagcccacggaatacagcaccatcagcaggccttagcctgcactccaggctccttcttggaccccaggctgtgagcacactcctgcctcatcgac

SEQ ID NO: 26747 - protein, 165 aa, Homo sapiens
MWLPQLDLMRVISAKSQGYSIVTQITGPTTVNGLERGSLTVQCVYRSGWETYLKWWCRGAIWRDCKILVKTSGSEQEVKRDRVSIKDNQKNRTFTVTMEDLMKTDADTYWCGIEKTGNDLGVTVQVTIDPAPVTQEETSSSPTLTGHHLDNRYCSPWRATSAMQT

SEQ ID NO: 26748 - DNA, 2681 bp, Homo sapiens
gcccaggggtccccagctccccgcctcgccacctggggacagcccacggcccggggctcgggcgccgcctgctgtcgcggtgcgcagcgactacgggaactcttccgcagcagacggggtccccgcggcccgctcccccaggggcaagcaagcgaccacaggggaccggtcccggggctggatgtggctcatgtccgaagcgcacggagccgagccggtgttgctcagggaggctgcccgccccttcacgcagaccctgcggctctgcgtgccctcagggaacagcaagaacaaggtggtgactgtggatggcgtgagagtgaagctgcagatctgggacaccgctgggcaggaacggttccgaagcgtcacccatgcttattacagagatgctcaggccttgcttctgctgtatgacatcaccaacaaatcttctttcgacaacatcagggcctggctcactgagattcatgagtatgcccagagggacgtggtgatcatgctgctaggcaacaaggcggatatgagcagcgaaagagtgatccgttccgaagacggagagaccttggccagggagtacggtgttcccttcctggagaccagcgccaagactggcatgaatgtggagttagcctttctggccatcgccaaggaactgaaataccgggccgggcatcaggcggatgagcccagcttccagatccgagactatgtagagtcccagaagaagcgctccagctgctgctccttcatgtgaatcccagggggcagagaggaggctctggaggcacacaggatgcagccttccccctcccaggcctggcttattccaagaggctgagccaatggggagaaagatggaggactcactgcacagccgcttcctagcagggagctatactccaactcctacttgagttcctgcggtctccccgcatccacagggagggtaaaacacttagcttttattttaatagtacataatttaataccaaaaaaggcgcctggatccccaaaaaaccgaggctgggagctagtggcccttttgctttctaggacttggggggccggccctccctcctaagcataacaaaggtggtgttgctccagctcagccccaggggacacagatgcactttgggggtgagggcaggtaatgactccatcgcaccctcagttcagctggacagaggctcaggtgaccccagccttcactgtctcccgctctccaggagcttatcttcgccccatctcccaaataagtgggcccttgtgctgtgaggaagaccaaagcctcagggaagataagagatatggagatgggagggggaggacaaggggcagagagtagggtctagctggctatctctggccttactaacacccccctggaggcatgccccttttctccagcacacaagcacattggggcacctggaaatattggttccaggctcctgttctctggacttcagatcctgggggagcccctcccccccctgaatccctggcttagctaccttcctgcctgtgcacctaaaaacctcaggtcagaactaggaaaagagttttgtttttatttttttgaaatggagtctcgttctgtcgcccaggctgaggtgcagtagtgcaatctccgctcactacaacctccactccctggggctcaagcgatcctcccacctcagccgccgaagtagctgggactataggtgtgtaccatcacacctggctaatttttgtattttttgtagacacagggtttcgccatgttgcccaggctggtcttgaattcctgagctcaagcaacctgccggcctcggcctcccaaagtactgggattacacgcagaaggcaccatgcccaggctagatgtgtcttatcccaatcctttggcaggcatgcagctccacaggcgatttcttcaagcagctgaagtgtttagccctcctgggttaagagccagataaggagaaatccctttcctaggtttggaatgtgttgtgaaaaaaaagagaaatccctggctcctggagctggtgggagacaagattaagcaaacctcccctgacatgtatccctttgaccccaagctctgcctcctccctgaccacccatgccctttcctttaacttctcaaacagataccagggcctaaactgctttacctcccctcctactgagtcaggttaggtggtgggaggtcacccatttccgagttaaaccaatgcaatatgagtaaaacaaagtcatgtgggtatgtctggggtagagagaggggtagcaagttcatgtgtcctccttggtcacatatctcccaaagctccgatccctgccatgggaagtggacaggaaacatgaggtcatgacctgcaggcatctttactgcagctctgccggcctggagggggagagggggaggaagaagtatgcgctgcacatttctgaggctactgcatttgctttcaaggcagaaatcttgctctgagcagtcagcggctccagtttgggcccgataaggaagttctccgtggcctccctcaggcagagcagggaggaggctgacattgccagtctcttctggggcccaaggcaggttgcaggagatccaatcccatagacagctctgggcctcttgcatttgagtttttcagaattaaactgcagtattttggaaagca

SEQ ID NO: 26749 - protein, 191 aa, Homo sapiens
MWLMSEAHGAEPVLLREAARPFTQTLRLCVPSGNSKNKVVTVDGVRVKLQIWDTAGQERFRSVTHAYYRDAQALLLLYDITNKSSFDNIRAWLTEIHEYAQRDVVIMLLGNKADMSSERVIRSEDGETLAREYGVPFLETSAKTGMNVELAFLAIAKELKYRAGHQADEPSFQIRDYVESQKKRSSCCSFM

SEQ ID NO: 26750 - DNA, 2689 bp, Homo sapiens
tccgcagcagacggggtccccgcggcccgctcccccaggggcaagcaagcgaccacaggggaccggtcccggggctggatgtggctcatgtccgaagcgcacggagccgagccggtgttgctcagggaggctgcccgccccttcacgcagaccctgcggctctgcgtgccctcagggaacagcaaggtgatgcttctgggagacacaggcgtcggcaaaacatgtttcctgatccaattcaaagacggggccttcctgtccggaaccttcatagccaccgtcggcatagacttcaggaacaaggtggtgactgtggatggcgtgagagtgaagctgcagatctgggacaccgctgggcaggaacggttccgaagcgtcacccatgcttattacagagatgctcaggccttgcttctgctgtatgacatcaccaacaaatcttctttcgacaacatcagggcctggctcactgagattcatgagtatgcccagagggacgtggtgatcatgctgctaggcaacaaggcggatatgagcagcgaaagagtgatccgttccgaagacggagagaccttggccagggagtacggtgttcccttcctggagaccagcgccaagactggcatgaatgtggagttagcctttctggccatcgccaaggaactgaaataccgggccgggcatcaggcggatgagcccagcttccagatccgagactatgtagagtcccagaagaagcgctccagctgctgctccttcatgtgaatcccagggggcagagaggaggctctggaggcacacaggatgcagccttccccctcccaggcctggcttattccaagaggctgagccaatggggagaaagatggaggactcactgcacagccgcttcctagcagggagctatactccaactcctacttgagttcctgcggtctccccgcatccacagggagggtaaaacacttagcttttattttaatagtacataatttaataccaaaaaaggcgcctggatccccaaaaaaccgaggctgggagctagtggcccttttgctttctaggacttggggggccggccctccctcctaagcataacaaaggtggtgttgctccagctcagccccaggggacacagatgcactttgggggtgagggcaggtaatgactccatcgcaccctcagttcagctggacagaggctcaggtgaccccagccttcactgtctcccgctctccaggagcttatcttcgccccatctcccaaataagtgggcccttgtgctgtgaggaagaccaaagcctcagggaagataagagatatggagatgggagggggaggacaaggggcagagagtagggtctagctggctatctctggccttactaacacccccctggaggcatgccccttttctccagcacacaagcacattggggcacctggaaatattggttccaggctcctgttctctggacttcagatcctgggggagcccctcccccccctgaatccctggcttagctaccttcctgcctgtgcacctaaaaacctcaggtcagaactaggaaaagagttttgtttttatttttttgaaatggagtctcgttctgtcgcccaggctgaggtgcagtagtgcaatctccgctcactacaacctccactccctggggctcaagcgatcctcccacctcagccgccgaagtagctgggactataggtgtgtaccatcacacctggctaatttttgtattttttgtagacacagggtttcgccatgttgcccaggctggtcttgaattcctgagctcaagcaacctgccggcctcggcctcccaaagtactgggattacacgcagaaggcaccatgcccaggctagatgtgtcttatcccaatcctttggcaggcatgcagctccacaggcgatttcttcaagcagctgaagtgtttagccctcctgggttaagagccagataaggagaaatccctttcctaggtttggaatgtgttgtgaaaaaaaagagaaatccctggctcctggagctggtgggagacaagattaagcaaacctcccctgacatgtatccctttgaccccaagctctgcctcctccctgaccacccatgccctttcctttaacttctcaaacagataccagggcctaaactgctttacctcccctcctactgagtcaggttaggtggtgggaggtcacccatttccgagttaaaccaatgcaatatgagtaaaacaaagtcatgtgggtatgtctggggtagagagaggggtagcaagttcatgtgtcctccttggtcacatatctcccaaagctccgatccctgccatgggaagtggacaggaaacatgaggtcatgacctgcaggcatctttactgcagctctgccggcctggagggggagagggggaggaagaagtatgcgctgcacatttctgaggctactgcatttgctttcaaggcagaaatcttgctctgagcagtcagcggctccagtttgggcccgataaggaagttctccgtggcctccctcaggcagagcagggaggaggctgacattgccagtctcttctggggcccaaggcaggttgcaggagatccaatcccatagacagctctgggcctcttgcatttgagtttttcagaattaaactgcagtattttggaaagca

SEQ ID NO: 26751 - protein, 228 aa, Homo sapiens
MWLMSEAHGAEPVLLREAARPFTQTLRLCVPSGNSKVMLLGDTGVGKTCFLIQFKDGAFLSGTFIATVGIDFRNKVVTVDGVRVKLQIWDTAGQERFRSVTHAYYRDAQALLLLYDITNKSSFDNIRAWLTEIHEYAQRDVVIMLLGNKADMSSERVIRSEDGETLAREYGVPFLETSAKTGMNVELAFLAIAKELKYRAGHQADEPSFQIRDYVESQKKRSSCCSFM

SEQ ID NO: 26752 - DNA, 2652 bp, Homo sapiens
gttcctgcgctctccttcgcctgcgggccggcactgctcacctctcgtccagggacatgacgggcacgccaggcgccgttgccacccgggatggcgaggcccccgagcgctccccgccctgcagtccgagctacgacctcacgggcaaggtgatgcttctgggagacacaggcgtcggcaaaacatgtttcctgatccaattcaaagacggggccttcctgtccggaaccttcatagccaccgtcggcatagacttcaggaacaaggtggtgactgtggatggcgtgagagtgaagctgcagatctgggacaccgctgggcaggaacggttccgaagcgtcacccatgcttattacagagatgctcaggccttgcttctgctgtatgacatcaccaacaaatcttctttcgacaacatcagggcctggctcactgagattcatgagtatgcccagagggacgtggtgatcatgctgctaggcaacaaggcggatatgagcagcgaaagagtgatccgttccgaagacggagagaccttggccagggagtacggtgttcccttcctggagaccagcgccaagactggcatgaatgtggagttagcctttctggccatcgccaaggaactgaaataccgggccgggcatcaggcggatgagcccagcttccagatccgagactatgtagagtcccagaagaagcgctccagctgctgctccttcatgtgaatcccagggggcagagaggaggctctggaggcacacaggatgcagccttccccctcccaggcctggcttattccaagaggctgagccaatggggagaaagatggaggactcactgcacagccgcttcctagcagggagctatactccaactcctacttgagttcctgcggtctccccgcatccacagggagggtaaaacacttagcttttattttaatagtacataatttaataccaaaaaaggcgcctggatccccaaaaaaccgaggctgggagctagtggcccttttgctttctaggacttggggggccggccctccctcctaagcataacaaaggtggtgttgctccagctcagccccaggggacacagatgcactttgggggtgagggcaggtaatgactccatcgcaccctcagttcagctggacagaggctcaggtgaccccagccttcactgtctcccgctctccaggagcttatcttcgccccatctcccaaataagtgggcccttgtgctgtgaggaagaccaaagcctcagggaagataagagatatggagatgggagggggaggacaaggggcagagagtagggtctagctggctatctctggccttactaacacccccctggaggcatgccccttttctccagcacacaagcacattggggcacctggaaatattggttccaggctcctgttctctggacttcagatcctgggggagcccctcccccccctgaatccctggcttagctaccttcctgcctgtgcacctaaaaacctcaggtcagaactaggaaaagagttttgtttttatttttttgaaatggagtctcgttctgtcgcccaggctgaggtgcagtagtgcaatctccgctcactacaacctccactccctggggctcaagcgatcctcccacctcagccgccgaagtagctgggactataggtgtgtaccatcacacctggctaatttttgtattttttgtagacacagggtttcgccatgttgcccaggctggtcttgaattcctgagctcaagcaacctgccggcctcggcctcccaaagtactgggattacacgcagaaggcaccatgcccaggctagatgtgtcttatcccaatcctttggcaggcatgcagctccacaggcgatttcttcaagcagctgaagtgtttagccctcctgggttaagagccagataaggagaaatccctttcctaggtttggaatgtgttgtgaaaaaaaagagaaatccctggctcctggagctggtgggagacaagattaagcaaacctcccctgacatgtatccctttgaccccaagctctgcctcctccctgaccacccatgccctttcctttaacttctcaaacagataccagggcctaaactgctttacctcccctcctactgagtcaggttaggtggtgggaggtcacccatttccgagttaaaccaatgcaatatgagtaaaacaaagtcatgtgggtatgtctggggtagagagaggggtagcaagttcatgtgtcctccttggtcacatatctcccaaagctccgatccctgccatgggaagtggacaggaaacatgaggtcatgacctgcaggcatctttactgcagctctgccggcctggagggggagagggggaggaagaagtatgcgctgcacatttctgaggctactgcatttgctttcaaggcagaaatcttgctctgagcagtcagcggctccagtttgggcccgataaggaagttctccgtggcctccctcaggcagagcagggaggaggctgacattgccagtctcttctggggcccaaggcaggttgcaggagatccaatcccatagacagctctgggcctcttgcatttgagtttttcagaattaaactgcagtattttggaaagca

SEQ ID NO: 26753 - protein, 223 aa, Homo sapiens; identical to SEQ ID NO: 3577

SEQ ID NO: 26754 - DNA, 875 bp, Homo sapiens
cctgcgctctccttcgcctgcgggccggcactgctcacctctcgtccagggacatgacgggcacgccaggcgccgttgccacccgggatggcgaggcccccgagcgctccccgccctgcagtccgagctacgacctcacgggcaaggtgatgcttctgggagacacaggcgtcggcaaaacatgtttcctgatccaattcaaagacggggccttcctgtccggaaccttcatagccaccgtcggcatagacttcaggaacaaggtggtgactgtggatggcgtgagagtgaagctgcagatctgggacaccgctgggcaggaacggttccgaagcgtcacccatgcttattacagagatgctcaggccttgcttctgctgtatgacatcaccaacaaatcttctttcgacaacatcagggcctggctcactgagattcatgagtatgcccagagggacgtggtgatcatgctgctaggcaacaaggcggatatgagcagcgaaagagtgatccgttccgaagacggagagaccttggccagggagtacggtgttcccttcctggagaccagcgccaagactggcatgaatgtggagttagcctttctggccatcgccaagtgagagctgggcagggaagggaagtgtgcggggcagggcggcacactccaggaatccagtagggcccggcccctggcccagcccctggacacacctgcattctgcaggctgaggtccatttgctctgggagcactgggccactgggagaggggagggggcggctcagctcctcaccccagcccagcccagcccagcccagcccattgtctcttcttcaagggaactgaaataccgggccgggcatcaggcggatg

SEQ ID NO: 26755 - protein, 189 aa, Homo sapiens
MTGTPGAVATRDGEAPERSPPCSPSYDLTGKVMLLGDTGVGKTCFLIQFKDGAFLSGTFIATVGIDFRNKVVTVDGVRVKLQIWDTAGQERFRSVTHAYYRDAQALLLLYDITNKSSFDNIRAWLTEIHEYAQRDVVIMLLGNKADMSSERVIRSEDGETLAREYGVPFLETSAKTGMNVELAFLAIAK

SEQ ID NO: 26756 - DNA, 1705 bp, Homo sapiens
cctgcgctctccttcgcctgcgggccggcactgctcacctctcgtccagggacatgacgggcacgccaggcgccgttgccacccgggatggcgaggcccccgagcgctccccgccctgcagtccgagctacgacctcacgggcaaggtgatgcttctgggagacacaggcgtcggcaaaacatgtttcctgatccaattcaaagacggggccttcctgtccggaaccttcatagccaccgtcggcatagacttcaggaacaaggtggtgactgtggatggcgtgagagtgaagctgcagatctgggacaccgctgggcaggaacggttccgaagcgtcacccatgcttattacagagatgctcaggccttgcttctgctgtatgacatcaccaacaaatcttctttcgacaacatcagggcctggctcactgagattcatgagtatgcccagagggacgtggtgatcatgctgctaggcaacaaggcggatatgagcagcgaaagagtgatccgttccgaagacggagagaccttggccagggagtacggtgttcccttcctggagaccagcgccaagactggcatgaatgtggagttagcctttctggccatcgccaaggaactgaaataccgggccgggcatcaggcggatgagcccagcttccagatccgagactatgtagagtcccagaagaagcgctccagctgctgctccttcatgtgaatcccagggggcagagaggaggctctggaggcacacaggatgcagccttccccctcccaggcctggcttattccaagaggctggtcttgaattcctgagctcaagcaacctgccggcctcggcctcccaaagtactgggattacacgcagaaggcaccatgcccaggctagatgtgtcttatcccaatcctttggcaggcatgcagctccacaggcgatttcttcaagcagctgaagtgtttagccctcctgggttaagagccagataaggagaaatccctttcctaggtttggaatgtgttgtgaaaaaaaagagaaatccctggctcctggagctggtgggagacaagattaagcaaacctcccctgacatgtatccctttgaccccaagctctgcctcctccctgaccacccatgccctttcctttaacttctcaaacagataccagggcctaaactgctttacctcccctcctactgagtcaggttaggtggtgggaggtcacccatttccgagttaaaccaatgcaatatgagtaaaacaaagtcatgtgggtatgtctggggtagagagaggggtagcaagttcatgtgtcctccttggtcacatatctcccaaagctccgatccctgccatgggaagtggacaggaaacatgaggtcatgacctgcaggcatctttactgcagctctgccggcctggagggggagagggggaggaagaagtatgcgctgcacatttctgaggctactgcatttgctttcaaggcagaaatcttgctctgagcagtcagcggctccagtttgggcccgataaggaagttctccgtggcctccctcaggcagagcagggaggaggctgacattgccagtctcttctggggcccaaggcaggttgcaggagatccaatcccatagacagctctgggcctcttgcatttgagtttttcagaattaaactgcagtattttggaaagca

SEQ ID NO: 26757 - protein, 223 aa, Homo sapiens; identical to SEQ ID NO: 3577

SEQ ID NO: 26758 - DNA, 568 bp, Homo sapiens
cagcagctgggaaattccagcattggatctagacccctgttatccaagattggagaacagtgggacaaagtgctcctctccaccattcctgcgtgtccctggggaagatgagcagagcagagccagacagtaaaggagagggccacgccccctccacaggttacctccttggtactcctgcccgcactacccacagcaaccccgggatgccgatctgcagccacatgtcccatgtgggaggtttctgctgaaagaacttccaactacacatctccccacttcagtataaatttcaaccttccctaattcatgcaaccttttttttttttttttttttttgagacagagtgtcgctctgtcaccgaggctggagttcagtgatgcaatctcggctcactgcaacctctacctcctgggttcaagctattctccccgtctctactaaaaataaaaaattagccaggcgaggtggtgcatgcctataatcccagctactcaggaggctgaggcaggagaatcatttaaacctgggaggtggaggttgtggtgagccaagatctcgccattg

SEQ ID NO: 26759 - protein, 34 aa, Homo sapiens [sequence omitted]

SEQ ID NO: 26760 - DNA, 2196 bp, Homo sapiens
cttccccagagtgacccatttgggcttgacaggcggatatgagcagcgaaagagtgatccgttccgaagacggagagaccttggccagggagtacggtgttcccttcctggagaccagcgccaagactggcatgaatgtggagttagcctttctggccatcgccaaggaactgaaataccgggccgggcatcaggcggatgagcccagcttccagatccgagactatgtagagtcccagaagaagcgctccagctgctgctccttcatgtgaatcccagggggcagagaggaggctctggaggcacacaggatgcagccttccccctcccaggcctggcttattccaagaggctgagccaatggggagaaagatggaggactcactgcacagccgcttcctagcagggagctatactccaactcctacttgagttcctgcggtctccccgcatccacagggagggtaaaacacttagcttttattttaatagtacataatttaataccaaaaaaggcgcctggatccccaaaaaaccgaggctgggagctagtggcccttttgctttctaggacttggggggccggccctccctcctaagcataacaaaggtggtgttgctccagctcagccccaggggacacagatgcactttgggggtgagggcaggtaatgactccatcgcaccctcagttcagctggacagaggctcaggtgaccccagccttcactgtctcccgctctccaggagcttatcttcgccccatctcccaaataagtgggcccttgtgctgtgaggaagaccaaagcctcagggaagataagagatatggagatgggagggggaggacaaggggcagagagtagggtctagctggctatctctggccttactaacacccccctggaggcatgccccttttctccagcacacaagcacattggggcacctggaaatattggttccaggctcctgttctctggacttcagatcctgggggagcccctcccccccctgaatccctggcttagctaccttcctgcctgtgcacctaaaaacctcaggtcagaactaggaaaagagttttgtttttatttttttgaaatggagtctcgttctgtcgcccaggctgaggtgcagtagtgcaatctccgctcactacaacctccactccctggggctcaagcgatcctcccacctcagccgccgaagtagctgggactataggtgtgtaccatcacacctggctaatttttgtattttttgtagacacagggtttcgccatgttgcccaggctggtcttgaattcctgagctcaagcaacctgccggcctcggcctcccaaagtactgggattacacgcagaaggcaccatgcccaggctagatgtgtcttatcccaatcctttggcaggcatgcagctccacaggcgatttcttcaagcagctgaagtgtttagccctcctgggttaagagccagataaggagaaatccctttcctaggtttggaatgtgttgtgaaaaaaaagagaaatccctggctcctggagctggtgggagacaagattaagcaaacctcccctgacatgtatccctttgaccccaagctctgcctcctccctgaccacccatgccctttcctttaacttctcaaacagataccagggcctaaactgctttacctcccctcctactgagtcaggttaggtggtgggaggtcacccatttccgagttaaaccaatgcaatatgagtaaaacaaagtcatgtgggtatgtctggggtagagagaggggtagcaagttcatgtgtcctccttggtcacatatctcccaaagctccgatccctgccatgggaagtggacaggaaacatgaggtcatgacctgcaggcatctttactgcagctctgccggcctggagggggagagggggaggaagaagtatgcgctgcacatttctgaggctactgcatttgctttcaaggcagaaatcttgctctgagcagtcagcggctccagtttgggcccgataaggaagttctccgtggcctccctcaggcagagcagggaggaggctgacattgccagtctcttctggggcccaaggcaggttgcaggagatccaatcccatagacagctctgggcctcttgcatttgagtttttcagaattaaactgcagtattttggaaagca

SEQ ID NO: 26761 - protein, 77 aa, Homo sapiens
MSSERVIRSEDGETLAREYGVPFLETSAKTGMNVELAFLAIAKELKYRAGHQADEPSFQIRDYVESQKKRSSCCSFM

SEQ ID NO: 26762 - DNA, 1013 bp, Homo sapiens
caaaaaaggcgcctggatccccaaaaaaccgaggctgggagctagtggcccttttgctttctaggacttggggggccggccctccctcctaagcataacaaaggtggtgttgctccagctcagccccaggggacacagatgcactttgggggtgagggcaggtaatgactccatcgcaccctcagttcagctggacagaggctcaggtgaccccagccttcactgtctcccgctctccaggagcttatcttcgccccatctcccaaataagtgggcccttgtgctgtgaggaagaccaaagcctcagggaagataagagatatggagatgggagggggaggacaaggggcagagagtagggtctagctggctatctctggccttactaacacccccctggaggcatgccccttttctccagcacacaagcacattggggcacctggaaatattggttccaggctcctgttctctggacttcagatcctgggggagcccctcccccccctgaatccctggcttagctaccttcctgcctgtgcacctaaaaacctcaggtcagaactaggaaaagagttttgtttttatttttttgaaatggagtctcgttctgtcgcccaggctgaggtgcagtagtgcaatctccgctcactacaacctccactccctggggctcaagcgatcctcccacctcagccgccgaagtagctgggactataggtgtgtaccatcacacctggctaatttttgtattttttgtagacacagggtttcgccatgttgcccaggctggtcttgaattcctgagctcaagcaacctgccggcctcggcctcccaaagtactgggattacacgcagaaggcaccatgcccaggctagatgtgtcttatcccaatcattgccagtctcttctggggcccaaggcaggttgcaggagatccaatcccatagacagctctgggcctcttgcatttgagtttttcagaattaaactgcagtattttggaaagca

SEQ ID NO: 26763 - protein, 47 aa, Homo sapiens [sequence omitted]

SEQ ID NO: 26764 - DNA, 295 bp, Homo sapiens
aaaatactgcagtttaattctgaaaaactcaaatgcaagaggcccagagctgtctatgggattggatctcctgcaacctgccttgggccccagaagagactggcaatgtcagcctcctccctgctctgcctgagggaggccacggagaacttccttatcgggcccaaactggagccgctgactgctcagagcaagatttctgccttgaaagcaaatgcagtagcctcagaaatgtgcagcgcatacttcttcctcccccttggtatctgtttgagaagttaaaggaaagggcatg

SEQ ID NO: 26765 - protein, 86 aa, Homo sapiens
MQEAQSCLWDWISCNLPWAPEETGNVSLLPALPEGGHGELPYRAQTGAADCSEQDFCLESKCSSLRNVQRILLPPPWYLFEKLKER

SEQ ID NO: 26766 - DNA, 712 bp, Homo sapiens
ttctgggcgggtgggcccgccggctccggcctggtttcccctacctgtggcggggagtgaggaaagccggccctcgggtaaaggaccctaacttttttttttttttttgagacggagtctcgctctgtcgcccaggctggactgccgtggcgcgatctcggatcactgcaacctccgcctcccgggttcaagcgattcccctgcctcagcctcccgagcagctggggttacaggcgcgcaccaccacgccccgctaatttttgtatttttagtagagacgaaatttcgccatgttggccaggatggtttcaaactcctgacctcaggtgatccgccctgggattacagacgtgagccaccgcacctggccaacgttttaacagcctttagccaaagcctgggtgcagctccagttgagagggagcggctgttgccggggcaactgctcccgctcggggcagcgagggccggtcagtctcgagaattaagacggagggcctcctcggaccctacagagttgtttgaataacatttttccgtttgtgggaaccctaaccctaatccactttgtgctgtcccaggactcgcatagaggagtgcaggttctgatccctgctgggaagaaaaatgattaggactgtaaagccttctagctccctcttgccaaagagaggctggtcacagaggcgggagacagtctgttgagcgggga

SEQ ID NO: 26767 - protein, 48 aa, Homo sapiens
DGGPPRTLQSCLNNIFPFVGTLTLIHFVLSQDSHRGVQVLIPAGKKND

SEQ ID NO: 26768 - DNA, 1563 bp, Homo sapiens
ggcccgcggaggtccccaccctcagcgcggccccgcccccggggtaaggagccggggcggactctgggacgctcagacgccgcgcggggcggggattggtctgtggtcctctctcggctcctcgcggctcgcggcggccgacggttcctgggacacctgcttgcttggcccgtccggcggctcagggcttctctgctgcgctcccggttcgctggacgggaagaagggctgggccgtcccgtcccgtccccatcggaaccccaagtcgcgccgctgacccgtcgcagggcgagatgagcgcggacgcagcggccggggcgcccctgccccggctctgctgcctggagaagggtccgaacggctacggcttccacctgcacggggagaagggcaagttgggccagtacatccggctggtggagcccggctcgccggccgagaaggcggggctgctggcgggggaccggctggtggaggtgaacggcgaaaacgtggagaaggagacccaccagcaggtggtgagccgcatccgcgccgcactcaacgccgtgcgcctgctggtggtcgaccccgagacggacgagcagctgcagaagctcggcgtccaggtccgagaggagctgctgcgcgcccaggaagcgccggggcaggccgagccgccggccgccgccgaggtgcagggggctggcaacgaaaatgagcctcgcgaggccgacaagagccacccggagcaggagaacagtcgtgaagccctggcagaggcagccttggagagccccaggccagccctggtgagatccgcctccagtgacaccagcgaggagctgaattcccaagacagccccccaaaacaggactccacagcgccctcgtctacctcctcctccgaccccatcctagacttcaacatctccctggccatggccaaagagagggcccaccagaaacgcagcagcaaacgggccccgcagatggactggagcaagaaaaacgaactcttcagcaacctctgagcgccctgctgccacccagtgactggcagggccgagccagcattccaccccacctttttccttctccccaattactcccctgaatcaatgtacaaatcagcacccacatcccctttcttgacaaatgatttttctagagaactatgttcttccctgactttagggaaggtgaatgtgttcccgtcctcccgcagtcagaaaggagactctgcctccctcctcctcactgagtgcctcatcctaccgggtgtccctttgccaccctgcctgggacatcgctggaacctgcaccatgccaggatcatgggaccaggcgagagggcaccctcccttcctcccccatgtgataaatgggtccagggctgatcaaagaactctgactgcagaactgccgctctcagtggacagggcatctgttaccctgagacctgtggcagacacgtcttgttttcatttgatttttgttaagagtgcagtattgcagagtctagaggaatttttgtttccttgattaacatgattttcctggttgttacatccagggcatggc

SEQ ID NO: 26769 - protein, 239 aa, Homo sapiens
MSADAAAGAPLPRLCCLEKGPNGYGFHLHGEKGKLGQYIRLVEPGSPAEKAGLLAGDRLVEVNGENVEKETHQQVVSRIRAALNAVRLLVVDPETDEQLQKLGVQVREELLRAQEAPGQAEPPAAAEVQGAGNENEPREADKSHPEQENSREALAEAALESPRPALVRSASSDTSEELNSQDSPPKQDSTAPSSTSSSDPILDFNISLAMAKERAHQKRSSKRAPQMDWSKKNELFSNL

SEQ ID NO: 26770 - DNA, 1748 bp, Homo sapiens
ggcccgcggaggtccccaccctcagcgcggccccgcccccggggtaaggagccggggcggactctgggacgctcagacgccgcgcggggcggggattggtctgtggtcctctctcggctcctcgcggctcgcggcggccgacggttcctgggacacctgcttgcttggcccgtccggcggctcagggcttctctgctgcgctcccggttcgctggacgggaagaagggctgggccgtcccgtcccgtccccatcggaaccccaagtcgcgccgctgacccgtcgcagggcgagatgagcgcggacgcagcggccggggcgcccctgccccggctctgctgcctggagaagggtccgaacggctacggcttccacctgcacggggagaagggcaagttgggccagtacatccggctggtggagcccggctcgccggccgagaaggcgggctgctgcgcgcccaggaagcgccggggcaggccgagccgccggccgccgccgaggtgcagggggctggcaacgaaaatgagcctcgcgaggccgacaagagccacccggagcagcgcgagcttcggcctcggctctgtaccatgaagaagggccccagtggctatggcttcaacctgcacagcgacaagtccaagccaggccagttcatccggtcagtggacccagactccccggctgaggcttcagggctccgggcccaggatcgcattgtggaggtgaacggggtctgcatggaggggaagcagcatggggacgtggtgtccgccatcagggctggcggggacgagaccaagctgctggtggtggacagggaaactgacgagttcttcaagaaatgcagagtgatcccatctcaggagcacctgaatggtcccctgcctgtgcccttcaccaatggggagatacagaaggagaacagtcgtgaagccctggcagaggcagccttggagagccccaggccagccctggtgagatccgcctccagtgacaccagcgaggagctgaattcccaagacagccccccaaaacaggactccacagcgccctcgtctacctcctcctccgaccccatcctagacttcaacatctccctggccatggccaaagagagggcccaccagaaacgcagcagcaaacgggccccgcagatggactggagcaagaaaaacgaactcttcagcaacctctgagcgccctgctgccacccagtgactggcagggccgagccagcattccaccccacctttttccttctccccaattactcccctgaatcaatgtacaaatcagcacccacatcccctttcttgacaaatgatttttctagagaactatgttcttccctgactttagggaaggtgaatgtgttcccgtcctcccgcagtcagaaaggagactctgcctccctcctcctcactgagtgcctcatcctaccgggtgtccctttgccaccctgcctgggacatcgctggaacctgcaccatgccaggatcatgggaccaggcgagagggcaccctcccttcctcccccatgtgataaatgggtccagggctgatcaaagaactctgactgcagaactgccgctctcagtggacagggcatctgttaccctgagacctgtggcagacacgtcttgttttcatttgatttttgttaagagtgcagtattgcagagtctagaggaatttttgtttccttgattaacatgattttcctggttgttacatccagggcatggc

SEQ ID NO: 26771 - protein, 202 aa, Homo sapiens
MKKGPSGYGFNLHSDKSKPGQFIRSVDPDSPAEASGLRAQDRIVEVNGVCMEGKQHGDVVSAIRAGGDETKLLVVDRETDEFFKKCRVIPSQEHLNGPLPVPFTNGEIQKENSREALAEAALESPRPALVRSASSDTSEELNSQDSPPKQDSTAPSSTSSSDPILDFNISLAMAKERAHQKRSSKRAPQMDWSKKNELFSNL

SEQ ID NO: 26772 - DNA, 1963 bp, Homo sapiens
ggcccgcggaggtccccaccctcagcgcggccccgcccccggggtaaggagccggggcggactctgggacgctcagacgccgcgcggggcggggattggtctgtggtcctctctcggctcctcgcggctcgcggcggccgacggttcctgggacacctgcttgcttggcccgtccggcggctcagggcttctctgctgcgctcccggttcgctggacgggaagaagggctgggccgtcccgtcccgtccccatcggaaccccaagtcgcgccgctgacccgtcgcagggcgagatgagcgcggacgcagcggccggggcgcccctgccccggctctgctgcctggagaagggtccgaacggctacggcttccacctgcacggggagaagggcaagttgggccagtacatccggctggtggagcccggctcgccggccgagaaggcggggctgctggcgggggaccggctggtggaggtgaacggcgaaaacgtggagaaggagacccaccagcaggtggtgagccgcatccgcgccgcactcaacgccgtgcgcctgctggtggtcgaccccgagacggacgagcagctgcagaagctcggcgtccaggtccgagaggagctgctgcgcgcccaggaagcgccggggcaggccgagccgccggccgccgccgaggtgcagggggctggcaacgaaaatgagcctcgcgaggccgacaagagccacccggagcagcgcgagcttcggcctcggctctgtaccatgaagaagggccccagtggctatggcttcaacctgcacagcgacaagtccaagccaggccagttcatccggtcagtggacccagactccccggctgaggcttcagggctccgggcccaggatcgcattgtggaggtgaacggggtctgcatggaggggaagcagcatggggacgtggtgtccgccatcagggctggcggggacgagaccaagctgctggtggtggacagggaaactgacgagttcttcaagaaatgcagagtgatcccatctcaggagcacctgaatggtcccctgcctgtgcccttcaccaatggggagatacagaaggagaacagtcgtgaagccctggcagaggcagccttggagagccccaggccagccctggtgagatccgcctccagtgacaccagcgaggagctgaattcccaagacagccccccaaaacaggactccacagcgccctcgtctacctcctcctccgaccccatcctagacttcaacatctccctggccatggccaaagagagggcccaccagaaacgcagcagcaaacgggccccgcagatggactggagcaagaaaaacgaactcttcagcaacctctgagcgccctgctgccacccagtgactggcagggccgagccagcattccaccccacctttttccttctccccaattactcccctgaatcaatgtacaaatcagcacccacatcccctttcttgacaaatgatttttctagagaactatgttcttccctgactttagggaaggtgaatgtgttcccgtcctcccgcagtcagaaaggagactctggcaccctcccttcctcccccatgtgataaatgggtccagggctgatcaaagaactctgactgcagaactgccgctctcagtggacagggcatctgttaccctgagacctgtggcagacacgtcttgttttcatttgatttttgttaagagtgcagtattgcagagtctagaggaatttttgtttccttgattaacatgattttcctggttgttacatccagggcatggcagtggcctcagccttaaacttttgttcctactcccaccctcagcgaactgggcagcacggggagggtttggctacccctgcccatccctgagccaggtaccaccattgtaaggaaacactttcagaaattcagctggttcctccaaacccttc

SEQ ID NO: 26773 - protein, 358 aa, Homo sapiens; identical to SEQ ID NO: 3585

SEQ ID NO: 26774 - DNA, 1717 bp, Homo sapiens
ggcccgcggaggtccccaccctcagcgcggccccgcccccggggtaaggagccggggcggactctgggacgctcagacgccgcgcggggcggggattggtctgtggtcctctctcggctcctcgcggctcgcggcggccgacggttcctgggacacctgcttgcttggcccgtccggcggctcagggcttctctgctgcgctcccggttcgctggacgggaagaagggctgggccgtcccgtcccgtccccatcggaaccccaagtcgcgccgctgacccgtcgcagggcgagatgagcgcggacgcagcggccggggcgcccctgccccggctctgctgcctggagaagggtccgaacggctacggcttccacctgcacggggagaagggcaagttgggccagtacatccggctggtggagcccggctcgccggccgagaaggcggggctgctggcgggggaccggctggtggaggtgaacggcgaaaacgtggagaaggagacccaccagcaggtggtgagccgcatccgcgccgcactcaacgccgtgcgcctgctggtggtcgaccccgagacggacgagcagctgcagaagctcggcgtccaggtccgagaggagctgctgcgcgcccaggaagcgccggggcaggccgagccgccggccgccgccgaggtgcagggggctggcaacgaaaatgagcctcgcgaggccgacaagagccacccggagcaggagaacagtcgtgaagccctggcagaggcagccttggagagccccaggccagccctggtgagatccgcctccagtgacaccagcgaggagctgaattcccaagacagccccccaaaacaggactccacagcgccctcgtctacctcctcctccgaccccatcctagacttcaacatctccctggccatggccaaagagagggcccaccagaaacgcagcagcaaacgggccccgcagatggactggagcaagaaaaacgaactcttcagcaacctctgagcgccctgctgccacccagtgactggcagggccgagccagcattccaccccacctttttccttctccccaattactcccctgaatcaatgtacaaatcagcacccacatcccctttcttgacaaatgatttttctagagaactatgttcttccctgactttagggaaggtgaatgtgttcccgtcctcccgcagtcagaaaggagactctgcctccctcctcctcactgagtgcctcatcctaccgggtgtccctttgccaccctgcctgggacatcgctggaacctgcaccatgccaggatcatgggaccaggcgagagggcaccctcccttcctcccccatgtgataaatgggtccagggctgatcaaagaactctgactgcagaactgccgctctcagtggacagggcatctgttaccctgagacctgtggcagacacgtcttgttttcatttgatttttgttaagagtgcagtattgcagagtctagaggaatttttgtttccttgattaacatgattttcctggttgttacatccagggcatggcagtggcctcagccttaaacttttgttcctactcccaccctcagcgaactgggcagcacggggagggtttggctacccctgcccatccctgagccaggtaccaccattgtaaggaaacactttcagaaattcagctggttcctccaaacccttca

SEQ ID NO: 26775 - protein, 239 aa, Homo sapiens; identical to SEQ ID NO: 26769

SEQ ID NO: 26776 - DNA, 1902 bp, Homo sapiens
ggcccgcggaggtccccaccctcagcgcggccccgcccccggggtaaggagccggggcggactctgggacgctcagacgccgcgcggggcggggattggtctgtggtcctctctcggctcctcgcggctcgcggcggccgacggttcctgggacacctgcttgcttggcccgtccggcggctcagggcttctctgctgcgctcccggttcgctggacgggaagaagggctgggccgtcccgtcccgtccccatcggaaccccaagtcgcgccgctgacccgtcgcagggcgagatgagcgcggacgcagcggccggggcgcccctgccccggctctgctgcctggagaagggtccgaacggctacggcttccacctgcacggggagaagggcaagttgggccagtacatccggctggtggagcccggctcgccggccgagaaggcgggctgctgcgcgcccaggaagcgccggggcaggccgagccgccggccgccgccgaggtgcagggggctggcaacgaaaatgagcctcgcgaggccgacaagagccacccggagcagcgcgagcttcggcctcggctctgtaccatgaagaagggccccagtggctatggcttcaacctgcacagcgacaagtccaagccaggccagttcatccggtcagtggacccagactccccggctgaggcttcagggctccgggcccaggatcgcattgtggaggtgaacggggtctgcatggaggggaagcagcatggggacgtggtgtccgccatcagggctggcggggacgagaccaagctgctggtggtggacagggaaactgacgagttcttcaagaaatgcagagtgatcccatctcaggagcacctgaatggtcccctgcctgtgcccttcaccaatggggagatacagaaggagaacagtcgtgaagccctggcagaggcagccttggagagccccaggccagccctggtgagatccgcctccagtgacaccagcgaggagctgaattcccaagacagccccccaaaacaggactccacagcgccctcgtctacctcctcctccgaccccatcctagacttcaacatctccctggccatggccaaagagagggcccaccagaaacgcagcagcaaacgggccccgcagatggactggagcaagaaaaacgaactcttcagcaacctctgagcgccctgctgccacccagtgactggcagggccgagccagcattccaccccacctttttccttctccccaattactcccctgaatcaatgtacaaatcagcacccacatcccctttcttgacaaatgatttttctagagaactatgttcttccctgactttagggaaggtgaatgtgttcccgtcctcccgcagtcagaaaggagactctgcctccctcctcctcactgagtgcctcatcctaccgggtgtccctttgccaccctgcctgggacatcgctggaacctgcaccatgccaggatcatgggaccaggcgagagggcaccctcccttcctcccccatgtgataaatgggtccagggctgatcaaagaactctgactgcagaactgccgctctcagtggacagggcatctgttaccctgagacctgtggcagacacgtcttgttttcatttgatttttgttaagagtgcagtattgcagagtctagaggaatttttgtttccttgattaacatgattttcctggttgttacatccagggcatggcagtggcctcagccttaaacttttgttcctactcccaccctcagcgaactgggcagcacggggagggtttggctacccctgcccatccctgagccaggtaccaccattgtaaggaaacactttcagaaattcagctggttcctccaaacccttca

SEQ ID NO: 26777 - protein, 202 aa, Homo sapiens; identical to SEQ ID NO: 26771

SEQ ID NO: 26778 - DNA, 2074 bp, Homo sapiens
ggcccgcggaggtccccaccctcagcgcggccccgcccccggggtaaggagccggggcggactctgggacgctcagacgccgcgcggggcggggattggtctgtggtcctctctcggctcctcgcggctcgcggcggccgacggttcctgggacacctgcttgcttggcccgtccggcggctcagggcttctctgctgcgctcccggttcgctggacgggaagaagggctgggccgtcccgtcccgtccccatcggaaccccaagtcgcgccgctgacccgtcgcagggcgagatgagcgcggacgcagcggccggggcgcccctgccccggctctgctgcctggagaagggtccgaacggctacggcttccacctgcacggggagaagggcaagttgggccagtacatccggctggtggagcccggctcgccggccgagaaggcggggctgctggcgggggaccggctggtggaggtgaacggcgaaaacgtggagaaggagacccaccagcaggtggtgagccgcatccgcgccgcactcaacgccgtgcgcctgctggtggtcgaccccgagacggacgagcagctgcagaagctcggcgtccaggtccgagaggagctgctgcgcgcccaggaagcgccggggcaggccgagccgccggccgccgccgaggtgcagggggctggcaacgaaaatgagcctcgcgaggccgacaagagccacccggagcagcgcgagcttcggcctcggctctgtaccatgaagaagggccccagtggctatggcttcaacctgcacagcgacaagtccaagccaggccagttcatccggtcagtggacccagactccccggctgaggcttcagggctccgggcccaggatcgcattgtggaggtgaacggggtctgcatggaggggaagcagcatggggacgtggtgtccgccatcagggctggcggggacgagaccaagctgctggtggtggacagggaaactgacgagttcttcaagaaatgcagagtgatcccatctcaggagcacctgaatggtcccctgcctgtgcccttcaccaatggggagatacagaaggagaacagtcgtgaagccctggcagaggcagccttggagagccccaggccagccctggtgagatccgcctccagtgacaccagcgaggagctgaattcccaagacagccccccaaaacaggactccacagcgccctcgtctacctcctcctccgaccccatcctagacttcaacatctccctggccatggccaaagagagggcccaccagaaacgcagcagcaaacgggccccgcagatggactggagcaagaaaaacgaactcttcagcaacctctgagcgccctgctgccacccagtgactggcagggccgagccagcattccaccccacctttttccttctccccaattactcccctgaatcaatgtacaaatcagcacccacatcccctttcttgacaaatgatttttctagagaactatgttcttccctgactttagggaaggtgaatgtgttcccgtcctcccgcagtcagaaaggagactctgcctccctcctcctcactgagtgcctcatcctaccgggtgtccctttgccaccctgcctgggacatcgctggaacctgcaccatgccaggatcatgggaccaggcgagagggcaccctcccttcctcccccatgtgataaatgggtccagggctgatcaaagaactctgactgcagaactgccgctctcagtggacagggcatctgttaccctgagacctgtggcagacacgtcttgttttcatttgatttttgttaagagtgcagtattgcagagtctagaggaatttttgtttccttgattaacatgattttcctggttgttacatccagggcatggcagtggcctcagccttaaacttttgttcctactcccaccctcagcgaactgggcagcacggggagggtttggctacccctgcccatccctgagccaggtaccaccattgtaaggaaacactttcagaaattcagctggttcctccaaacccttca

SEQ ID NO: 26779 - protein, 358 aa, Homo sapiens; identical to SEQ ID NO: 3585

SEQ ID NO: 26780 - DNA, 1481 bp, Homo sapiens
agacgccgcgcggggcggggattggtctgtggtcctctctcggctcctcgcggctcgcggcggccgacggttcctgggacacctgcttgcttggcccgtccggcggctcagggcttctctgctgcgctcccggttcgctggacgggaagaagggctgggccgtcccgtcccgtccccatcggaaccccaagtcgcgccgctgacccgtcgcagggcgagatgagcgcggacgcagcggccggggcgcccctgccccggctctgctgcctggagaagggagacccaccagcaggtggtgagccgcatccgcgccgcactcaacgccgtgcgcctgctggtggtcgaccccgagacggacgagcagctgcagaagctcggcgtccaggtccgagaggagctgctgcgcgcccaggaagcgccggggcaggccgagccgccggccgccgccgaggtgcagggggctggcaacgaaaatgagcctcgcgaggccgacaagagccacccggagcagcgcgagcttcggcctcggctctgtaccatgaagaagggccccagtggctatggcttcaacctgcacagcgacaagtccaagccaggccagttcatccggtcagtggacccagactccccggctgaggcttcagggctccgggcccaggatcgcattgtggaggtgaacggggtctgcatggaggggaagcagcatggggacgtggtgtccgccatcagggctggcggggagctgaattcccaagacagccccccaaaacaggactccacagcgccctcgtctacctcctcctccgaccccatcctagacttcaacatctccctggccatggccaaagagagggcccaccagaaacgcagcagcaaacgggccccgcagatggactggagcaagaaaaacgaactcttcagcaacctctgagcgccctgctgccacccagtgactggcagggccgagccagcattccaccccacctttttccttctccccaattactcccctgaatcaatgtacaaatcagcacccacatcccctttcttgacaaatgatttttctagagaactatgttcttccctgactttagggaaggtgaatgtgttcccgtcctcccgcagtcagaaaggagactctgcctccctcctcctcactgagtgcctcatcctaccgggtgtccctttgccaccctgcctgggacatcgctggaacctgcaccatgccaggatcatgggaccaggcgagagggcaccctcccttcctcccccatgtgataaatgggtccagggctgatcaaagaactctgactgcagaactgccgctctcagtggacagggcatctgttaccctgagacctgtggcagacacgtcttgttttcatttgatttttgttaagagtgcagtattgcagagtctagaggaatttttgtttccttgattaacatgattttcctggttgttacatccagggcatggc

SEQ ID NO: 26781 - protein, 130 aa, Homo sapiens
MKKGPSGYGFNLHSDKSKPGQFIRSVDPDSPAEASGLRAQDRIVEVNGVCMEGKQHGDVVSAIRAGGELNSQDSPPKQDSTAPSSTSSSDPILDFNISLAMAKERAHQKRSSKRAPQMDWSKKNELFSNL

SEQ ID NO: 26782 - DNA, 1635 bp, Homo sapiens
agacgccgcgcggggcggggattggtctgtggtcctctctcggctcctcgcggctcgcggcggccgacggttcctgggacacctgcttgcttggcccgtccggcggctcagggcttctctgctgcgctcccggttcgctggacgggaagaagggctgggccgtcccgtcccgtccccatcggaaccccaagtcgcgccgctgacccgtcgcagggcgagatgagcgcggacgcagcggccggggcgcccctgccccggctctgctgcctggagaagggagacccaccagcaggtggtgagccgcatccgcgccgcactcaacgccgtgcgcctgctggtggtcgaccccgagacggacgagcagctgcagaagctcggcgtccaggtccgagaggagctgctgcgcgcccaggaagcgccggggcaggccgagccgccggccgccgccgaggtgcagggggctggcaacgaaaatgagcctcgcgaggccgacaagagccacccggagcagcgcgagcttcggcctcggctctgtaccatgaagaagggccccagtggctatggcttcaacctgcacagcgacaagtccaagccaggccagttcatccggtcagtggacccagactccccggctgaggcttcagggctccgggcccaggatcgcattgtggaggtgaacggggtctgcatggaggggaagcagcatggggacgtggtgtccgccatcagggctggcggggagctgaattcccaagacagccccccaaaacaggactccacagcgccctcgtctacctcctcctccgaccccatcctagacttcaacatctccctggccatggccaaagagagggcccaccagaaacgcagcagcaaacgggccccgcagatggactggagcaagaaaaacgaactcttcagcaacctctgagcgccctgctgccacccagtgactggcagggccgagccagcattccaccccacctttttccttctccccaattactcccctgaatcaatgtacaaatcagcacccacatcccctttcttgacaaatgatttttctagagaactatgttcttccctgactttagggaaggtgaatgtgttcccgtcctcccgcagtcagaaaggagactctgcctccctcctcctcactgagtgcctcatcctaccgggtgtccctttgccaccctgcctgggacatcgctggaacctgcaccatgccaggatcatgggaccaggcgagagggcaccctcccttcctcccccatgtgataaatgggtccagggctgatcaaagaactctgactgcagaactgccgctctcagtggacagggcatctgttaccctgagacctgtggcagacacgtcttgttttcatttgatttttgttaagagtgcagtattgcagagtctagaggaatttttgtttccttgattaacatgattttcctggttgttacatccagggcatggcagtggcctcagccttaaacttttgttcctactcccaccctcagcgaactgggcagcacggggagggtttggctacccctgcccatccctgagccaggtaccaccattgtaaggaaacactttcagaaattcagctggttcctccaaacccttca

SEQ ID NO: 26783 - protein, 130 aa, Homo sapiens; identical to SEQ ID NO: 26781

SEQ ID NO: 26784 - DNA, 3733 bp, Homo sapiens
cacctgaatggtaagccaggtggggccactggccgtcctggggctggagccccccaagtcagggatgtgagccagggctaagactgctgggtcccaggcgaggggtgggcagcttcccggcatgggtgctccctcctcctccttcatgggaggcccagaggtgtgggctgggggagcgggggcctagtgtagggagtggcagtgggtttctgaggacggcttgtgatggggtcagctggcatgaggtcggtgagagagatggacagatcttcttattcccggccaaagctgcagccccaaaggaggcccaagcccccagtcctgtccccaccagcagactttcagggcagtgtcaatgtgaggaaagggttaactccggggaggcctccagcctttgcttggtcagatcagagtccagtgacgggggccggtgcctccccctccctcctctcaggttgtcttggaaactcagccttgctggctctagagagtagtgggtcccccttcaatccctgggcccctgccctccccatcccccaccatcaccctgccaagcctggcgcctccccctgcccaggcccgagccaaacagggcagggctgctgcaccggggcagggaggggttaagcatgctctgctccttggtctggactttctccctgggaagatggctccctggagcgggcaggggtgctcactgggccatactgagggtggaacctcttgggactttgcagtgggtggggcctcctggagactcaaggttgtatgtgtaaaaggagattcacacaaaggtcctgcgactcccatcgccagctgcaagggcccactggggaggccctgtccccttctggcgcaatccaaggcctgaggctcctagaagaggggatggcccctggaagtccctagctggctctgggcatgggaggtggggtaccgccttacccttatctcccaagttcatggaaaccaggtaactcagataatccccttctccactgagggggagactaaggcccagagaagccccagccttcctcctagggatctgatacgaggaagacacagctggaatctggattccactcagctcctgggatactgtcccctgcttcccccaccccttcaccctgcaggtaattggccccctcatctcctgagtagccgggactacagccatgcgccaccacgcccagcaaatttttatatttttagtagagatggggtttcactatgttggccaggatggtctcgatctcttgaccttgtgatccgcccacctcggcctcccaaagtactgcgattacaagtgtgagccaccgcgcctggcctttttttttttttttccggacacagtctctgtcacccaggctagagtgcaatggcacaatcttggctcactgcaacctccacctcctgggttcaagcaattctcctgcctcagcctcctgagtagctgggattacaggcgcctgccaccatgcccggctaatttttgtatttttagtagggatagggtttcgccatgttggccaggctggtcttgaactcctgacctcaggtgatccgcctgccacagtctcccaaagtgctggggtcccagtcatgagccaccgagcccagactattttctctttcagttgaggcaggtactaactatagtctggggtgtggttccaattttggtgtcatcatcatcacctgggaagcgtttggaaaatgttgattcttaggcctgcccactaaaccagaatctgtgctgccaaggtccaggaatctgtactttaacaagcttcccacgtaggagttcccaggtaggaattcccaggtaggaattaggcagccatcctcgaatttcatccccatctgagacaatacattttttaaacaccttgtgacccatcagtgcctcataagatcaatttagtagatagagaccagcaggttttttggtttgttttttttgttttgttttgttttgttttgttttgccagagtcttgctgtgttgcccaggctggagtgtagtggcgtgatctcggctcactgcaacctccaccttctgggttcaaacaattttcccacctcagcctcccaagtagctaggattacaggcgtgtgccaccatgcccagctaattttctttttgtcttttttagtagagacggggtttcaccatgttggccaggctggtctcaaactcctaacctcaagtgatccaggtgcctcggcctcccaaagtgctgggattactggtgtgagccactatgcctggcccagacatttttttgttttttttaatgaaatgaaattaaaaatatcaaagaacactgtagtaagggtgttgctttgtgaaacttttatcacacaaaatctttgtgtgtgctgagtcatcaaaatggcaaacgtaggccagacatttgctcacacctgtaatcccaacactttgggaggccaaggtggaaggattgcttggggctaggagtttgagaccatcctgcatgacatggcaaggccccatctctataaaaaaaaaattttttttaaataaataaggcaaatgtattcatggtgggtggtagtcaaaaaagtttgagatgttgacccagggaacaagatctaataatctgcccaaacccaactcctacctcctctccacgctctattccatccccgttctggactcacctctgctctgtcctttgcctaggtcccctgcctgtgcccttcaccaatggggagatacagaaggagaacagtcgtgaagccctggcagaggcagccttggagagccccaggccagccctggtgagatccgcctccagtgacaccagcgaggagctgaattcccaagacagccccccaaaacaggactccacagcgccctcgtctacctcctcctccgaccccatcctagacttcaacatctccctggccatggccaaagagagggcccaccagaaacgcagcagcaaacgggccccgcagatggactggagcaagaaaaacgaactcttcagcaacctctgagcgccctgctgccacccagtgactggcagggccgagccagcattccaccccacctttttccttctccccaattactcccctgaatcaatgtacaaatcagcacccacatcccctttcttgacaaatgatttttctagagaactatgttcttccctgactttagggaaggtgaatgtgttcccgtcctcccgcagtcagaaaggagactctgcctccctcctcctcactgagtgcctcatcctaccgggtgtccctttgccaccctgcctgggacatcgctggaacctgcaccatgccaggatcatgggaccaggcgagagggcaccctcccttcctcccccatgtgataaatgggtccagggctgatcaaagaactctgactgcagaactgccgctctcagtggacagggcatctgttaccctgagacctgtggcagacacgtcttgttttcatttgatttttgttaagagtgcagtattgcagagtctagaggaatttttgtttccttgattaacatgattttcctggttgttacatccagggcatggcagtggcctcagccttaaacttttgttcctactcccaccctcagcgaactgggcagcacggggagggtttggctacccctgcccatccctgagccaggtaccaccattgtaaggaaacactttcagaaattcagctggttcctccaaacccttca

SEQ ID NO: 26785 - protein, 55 aa, Homo sapiens [sequence omitted]

SEQ ID NO: 26786 - DNA, 1431 bp, Homo sapiens
aggcccgagccaaacagggcagggctgctgcaccggggcagggaggggttaagcatgctctgctccttggtctggactttctccctgggaagatggctccctggagcgggcaggggtgctcactgggccatactgagggtggaacctcttgggactttgcagtgggtggggcctcctggagactcaaggttgtatgtgtaaaaggagattcacacaaaggtcctgcgactcccatcgccagctgcaagggcccactggggaggccctgtccccttctggcgcaatccaaggcctgaggctcctagaagaggggatggcccctggaagtccctagctggctctgggcatgggaggtggggtaccgccttacccttatctcccaagttcatggaaaccaggtaactcagataatccccttctccactgagggggagactaaggcccagagaagccccagccttcctcctagggatctgatacgaggaagacacagctggaatctggattccactcagctcctgggatactgtcccctgcttcccccaccccttcaccctgcaggtcccctgcctgtgcccttcaccaatggggagatacagaaggagaacagtcgtgaagccctggcagaggcagccttggagagccccaggccagccctggtgagatccgcctccagtgacaccagcgaggagctgaattcccaagacagccccccaaaacaggactccacagcgccctcgtctacctcctcctccgaccccatcctagacttcaacatctccctggccatggccaaagagagggcccaccagaaacgcagcagcaaacgggccccgcagatggactggagcaagaaaaacgaactcttcagcaacctctgagcgccctgctgccacccagtgactggcagggccgagccagcattccaccccacctttttccttctccccaattactcccctgaatcaatgtacaaatcagcacccacatcccctttcttgacaaatgatttttctagagaactatgttcttccctgactttagggaaggtgaatgtgttcccgtcctcccgcagtcagaaaggagactctgcctccctcctcctcactgagtgcctcatcctaccgggtgtccctttgccaccctgcctgggacatcgctggaacctgcaccatgccaggatcatgggaccaggcgagagggcaccctcccttcctcccccatgtgataaatgggtccagggctgatcaaagaactctgactgcagaactgccgctctcagtggacagggcatctgttaccctgagacctgtggcagacacgtcttgttttcatttgatttttgttaagagtgcagtattgcagagtctagaggaatttttgtttccttgattaacatgattttcctggttgttacatccagggcatggc

SEQ ID NO: 26787 - protein, 112 aa, Homo sapiens
MCSRPPAVRKETLPPSSSLSASSYRVSLCHPAWDIAGTCTMPGSWDQARGHPPFLPHVINGSRADQRTLTAELPLSVDRASVTLRPVADTSCFHLIFVKSAVLQSLEEFLFP

SEQ ID NO: 26788 - DNA, 1585 bp, Homo sapiens
aggcccgagccaaacagggcagggctgctgcaccggggcagggaggggttaagcatgctctgctccttggtctggactttctccctgggaagatggctccctggagcgggcaggggtgctcactgggccatactgagggtggaacctcttgggactttgcagtgggtggggcctcctggagactcaaggttgtatgtgtaaaaggagattcacacaaaggtcctgcgactcccatcgccagctgcaagggcccactggggaggccctgtccccttctggcgcaatccaaggcctgaggctcctagaagaggggatggcccctggaagtccctagctggctctgggcatgggaggtggggtaccgccttacccttatctcccaagttcatggaaaccaggtaactcagataatccccttctccactgagggggagactaaggcccagagaagccccagccttcctcctagggatctgatacgaggaagacacagctggaatctggattccactcagctcctgggatactgtcccctgcttcccccaccccttcaccctgcaggtcccctgcctgtgcccttcaccaatggggagatacagaaggagaacagtcgtgaagccctggcagaggcagccttggagagccccaggccagccctggtgagatccgcctccagtgacaccagcgaggagctgaattcccaagacagccccccaaaacaggactccacagcgccctcgtctacctcctcctccgaccccatcctagacttcaacatctccctggccatggccaaagagagggcccaccagaaacgcagcagcaaacgggccccgcagatggactggagcaagaaaaacgaactcttcagcaacctctgagcgccctgctgccacccagtgactggcagggccgagccagcattccaccccacctttttccttctccccaattactcccctgaatcaatgtacaaatcagcacccacatcccctttcttgacaaatgatttttctagagaactatgttcttccctgactttagggaaggtgaatgtgttcccgtcctcccgcagtcagaaaggagactctgcctccctcctcctcactgagtgcctcatcctaccgggtgtccctttgccaccctgcctgggacatcgctggaacctgcaccatgccaggatcatgggaccaggcgagagggcaccctcccttcctcccccatgtgataaatgggtccagggctgatcaaagaactctgactgcagaactgccgctctcagtggacagggcatctgttaccctgagacctgtggcagacacgtcttgttttcatttgatttttgttaagagtgcagtattgcagagtctagaggaatttttgtttccttgattaacatgattttcctggttgttacatccagggcatggcagtggcctcagccttaaacttttgttcctactcccaccctcagcgaactgggcagcacggggagggtttggctacccctgcccatccctgagccaggtaccaccattgtaaggaaacactttcagaaattcagctggttcctccaaacccttca

SEQ ID NO: 26789 - protein, 112 aa, Homo sapiens; identical to SEQ ID NO: 26787

SEQ ID NO: 26790 - DNA, 871 bp, Homo sapiens
ggtcccctgcctgtgcccttcaccaatggggagatacagaaggagaacagtcgtgaagccctggcagaggcagccttggagagccccaggccagccctggtgagatccgcctccagtgacaccagcgaggagctgaattcccaagacagccccccaaaacaggactccacagcgccctcgtctacctcctcctccgaccccatcctagacttcaacatctccctggccatggccaaagagagggcccaccagaaacgcagcagcaaacgggccccgcagatggactggagcaagaaaaacgaactcttcagcaacctctgagcgccctgctgccacccagtgactggcagggccgagccagcattccaccccacctttttccttctccccaattactcccctgaatcaatgtacaaatcagcacccacatcccctttcttgacaaatgatttttctagagaactatgttcttccctgactttagggaaggtgaatgtgttcccgtcctcccgcagtcagaaaggagactctgcctccctcctcctcactgagtgcctcatcctaccgggtgtccctttgccaccctgcctgggacatcgctggaacctgcaccatgccaggatcatgggaccaggcgagagggcaccctcccttcctcccccatgtgataaatgggtccagggctgatcaaagaactctgactgcagaactgccgctctcagtggacagggcatctgttaccctgagacctgtggcagacacgtcttgttttcatttgatttttgttaagagtgcagtattgcagagtctagaggaatttttgtttccttgattaacatgattttcctggttgttacatccagggcatggc

SEQ ID NO: 26791 - protein, 112 aa, Homo sapiens; identical to SEQ ID NO: 26787

SEQ ID NO: 26792 - DNA, 871 bp, Homo sapiens; identical to SEQ ID NO: 26790

SEQ ID NO: 26793 - protein, 112 aa, Homo sapiens; identical to SEQ ID NO: 26787

SEQ ID NO: 26794 - DNA, 1025 bp, Homo sapiens
ggtcccctgcctgtgcccttcaccaatggggagatacagaaggagaacagtcgtgaagccctggcagaggcagccttggagagccccaggccagccctggtgagatccgcctccagtgacaccagcgaggagctgaattcccaagacagccccccaaaacaggactccacagcgccctcgtctacctcctcctccgaccccatcctagacttcaacatctccctggccatggccaaagagagggcccaccagaaacgcagcagcaaacgggccccgcagatggactggagcaagaaaaacgaactcttcagcaacctctgagcgccctgctgccacccagtgactggcagggccgagccagcattccaccccacctttttccttctccccaattactcccctgaatcaatgtacaaatcagcacccacatcccctttcttgacaaatgatttttctagagaactatgttcttccctgactttagggaaggtgaatgtgttcccgtcctcccgcagtcagaaaggagactctgcctccctcctcctcactgagtgcctcatcctaccgggtgtccctttgccaccctgcctgggacatcgctggaacctgcaccatgccaggatcatgggaccaggcgagagggcaccctcccttcctcccccatgtgataaatgggtccagggctgatcaaagaactctgactgcagaactgccgctctcagtggacagggcatctgttaccctgagacctgtggcagacacgtcttgttttcatttgatttttgttaagagtgcagtattgcagagtctagaggaatttttgtttccttgattaacatgattttcctggttgttacatccagggcatggcagtggcctcagccttaaacttttgttcctactcccaccctcagcgaactgggcagcacggggagggtttggctacccctgcccatccctgagccaggtaccaccattgtaaggaaacactttcagaaattcagctggttcctccaaacccttca

SEQ ID NO: 26795 - protein, 112 aa, Homo sapiens; identical to SEQ ID NO: 26787

SEQ ID NO: 26796 - DNA, 448 bp, Homo sapiens
gtccatgtgaagagctaccacgagccccagcctcacagtgtccacctccatctctgggagcagctgcacctgactggccacgcgggggcagtggaggcacaggctcagggtggccgggctacctggcaccctatggcttacaaagtagagttggcccagtttccttccacctgaggggagcactctgactcctaacagtcttccttgccctgccatcatctggggtggctggctgtcaagaaaggccgggcatgctttctaaacacagccacaggaggcttgtagggcatcttccaggtggggaaacagtcttagataagtaaggtgacttgcctaaggcctcccagcacccttgatcttggagtctcacagcagactgcatgtgaacaactggaaccgaaaacatgcctcagtataaaacaaacattataaaacgaacgcgttgctt

SEQ ID NO: 26797 - protein, 61 aa, Homo sapiens
PCEELPRAPASQCPPPSLGAAAPDWPRGGSGGTGSGWPGYLAPYGLQSRVGPVSFHLRGAL

SEQ ID NO: 26798 - DNA, 1171 bp, Homo sapiens
gtgaccctcagactgacagtgagtgagtccgagcatcagtggcttctggagcagaccagccacgtggaagagaagccttacagagatgggtcggcagagccctgctgatggctgggccttgtgggcagccactctgtgtgagcagggtgttgggcccatacacttcaaagaccagagccctgcactgggagagtgctcctggcccaggctgggaatcacctttcgaggcccttcagactctggcggggcttgctgtggcctccctccagctagtggtgtggctgagcagactccagggccagggccagttcccttctcccctcccggccaaacccagacccagactctaggaagctggaatggagggcagggatccatgggagatgtcgggatgaaggtgggagctggaggtgcagggggacctggaacatggatgggagtggacaggcctttctccttagaggccagaggtgctgccctggctgggagtgaagctccaggcactaccagctttcctgattttcccgtttggtccatgtgaagagctaccacgagccccagcctcacagtgtccactcaagggcagcttggtcctcttgtcctgcagaggcaggctggtgtgaccctgggaacttgacccgggaacaacaggtggtccagagtgagtgtggcctggcccctcaacctagtgtccgtcctcctctctcctgaagagagcgtcaggccatcagctctgtccctctggtgctcccacgtctgttcctcaccctccatctctgggagcagctgcacctgactggccacgcgggggcagtggaggcacaggctcagggtggccgggctacctggcaccctatggcttacaaagtagagttggcccagtttccttccacctgaggggagcactctgactcctaacagtcttccttgccctgccatcatctggggtggctggctgtcaagaaaggccgggcatgctttctaaacacagccacaggaggcttgtagggcatcttccaggtggggaaacagtcttagataagtaaggtgacttgcctaaggcctcccagcacccttgatcttggagtctcacagcagactgcatgtgaacaactggaaccgaaaacatgcctcagtataaaacaaacattataaaacgaacgcgttgctt

SEQ ID NO: 26799 - protein, 151 aa, Homo sapiens [sequence omitted]

SEQ ID NO: 26800 - DNA, 1832 bp, Homo sapiens
ctttgaagtcaggttgctgggttgcaagctgtgaggcctttcacacttctttgtgcctgtttcctcgtctgcagaatggtaatgatagtagcaacttcagagttgttgagaattaaatgagatggtgtctgccaagtgcccgcactggagcctggcacacggcgtcagcgccgctcctgttgtctctcctagagcccagctgcaggggtaagggccttggcactgaggccgttctcgcgatgctgtcttacggtaagaaagtgtgagcagacaatgcgggaagtgggcaggccccaggtgaactttgttcaggtgtgagggttgggggcaggtgaaggttcctcctctgcagcttgggacaggagggtgggggcaggcgcctccttacttgcccctgtctcatctcctctgcgaggagtgaccacgctaggtctgaccaagtttgaggctaaaattgggcaaggaaatgaaccaagcatccggatgttccagaaacttcactttgagcaggtggctacgagcagtgtttttcaggaggtgaccctcagactgacagtgagtgagtccgagcatcagtggcttctggagcagaccagccacgtggaagagaagccttacagagatgggtcggcagagccctgctgatggctgggccttgtgggcagccactctgtgtgagcagggtgttgggcccatacacttcaaagaccagagccctgcactgggagagtgctcctggcccaggctgggaatcacctttcgaggcccttcagactctggcggggcttgctgtggcctccctccagctagtggtgtggctgagcagactccagggccagggccagttcccttctcccctcccggccaaacccagacccagactctaggaagctggaatggagggcagggatccatgggagatgtcgggatgaaggtgggagctggaggtgcagggggacctggaacatggatgggagtggacaggcctttctccttagaggccagaggtgctgccctggctgggagtgaagctccaggcactaccagctttcctgattttcccgtttggtccatgtgaagagctaccacgagccccagcctcacagtgtccactcaagggcagcttggtcctcttgtcctgcagaggcaggctggtgtgaccctgggaacttgacccgggaacaacaggtggtccagagtgagtgtggcctggcccctcaacctagtgtccgtcctcctctctcctggagccagtcttgagtttaaaggcattagtgttagatacagctccttgtggctggaaaacacccctctgctgataaagctcagggggcactgaggaagcagaggccccttgggggtgccctcctgaagagagcgtcaggccatcagctctgtccctctggtgctcccacgtctgttcctcaccctccatctctgggagcagctgcacctgactggccacgcgggggcagtggaggcacaggctcagggtggccgggctacctggcaccctatggcttacaaagtagagttggcccagtttccttccacctgaggggagcactctgactcctaacagtcttccttgccctgccatcatctggggtggctggctgtcaagaaaggccgggcatgctttctaaacacagccacaggaggcttgtagggcatcttccaggtggggaaacagtcttagataagtaaggtgacttgcctaaggcctcccagcacccttgatcttggagtctcacagcagactgcatgtgaacaactggaaccgaaaacatgcctcagtataaaacaaacattataaaacgaacgcgttgctt

SEQ ID NO: 26801 - protein, 53 aa, Homo sapiens
MFQKLHFEQVATSSVFQEVTLRLTVSESEHQWLLEQTSHVEEKPYRDGSAEPC

SEQ ID NO: 26802 - DNA, 1700 bp, Homo sapiens
aggctgctaccatgaggttgaatcagaacaccttgctgctggggaagaaggtggtccttgtaccctacacctcggagcatgtgcccaggtaccacgagtggatgaaatcagaggagctgcagcgtttgacagcctcggagccgctgaccctggagcaggagtatgccatgcagtgcagctggcaggaagatgcagacaagtgtaccttcattgtgctggatgccgagaagtggcaggcccagccaggcgccaccgaagagagctgcatggtgggagatgtgaacctcttcctcacagatctagaagacctcaccttgggggagatcgaggtcatgattgcagagcccagctgcaggggtaagggccttggcactgaggccgttctcgcgatgctgtcttacggaggtgaccctcagactgacagtgagtgagtccgagcatcagtggcttctggagcagaccagccacgtggaagagaagccttacagagatgggtcggcagagccctgctgatggctgggccttgtgggcagccactctgtgtgagcagggtgttgggcccatacacttcaaagaccagagccctgcactgggagagtgctcctggcccaggctgggaatcacctttcgaggcccttcagactctggcggggcttgctgtggcctccctccagctagtggtgtggctgagcagactccagggccagggccagttcccttctcccctcccggccaaacccagacccagactctaggaagctggaatggagggcagggatccatgggagatgtcgggatgaaggtgggagctggaggtgcagggggacctggaacatggatgggagtggacaggcctttctccttagaggccagaggtgctgccctggctgggagtgaagctccaggcactaccagctttcctgattttcccgtttggtccatgtgaagagctaccacgagccccagcctcacagtgtccactcaagggcagcttggtcctcttgtcctgcagaggcaggctggtgtgaccctgggaacttgacccgggaacaacaggtggtccagagtgagtgtggcctggcccctcaacctagtgtccgtcctcctctctcctggagccagtcttgagtttaaaggcattagtgttagatacagctccttgtggctggaaaacacccctctgctgataaagctcagggggcactgaggaagcagaggccccttgggggtgccctcctgaagagagcgtcaggccatcagctctgtccctctggtgctcccacgtctgttcctcaccctccatctctgggagcagctgcacctgactggccacgcgggggcagtggaggcacaggctcagggtggccgggctacctggcaccctatggcttacaaagtagagttggcccagtttccttccacctgaggggagcactctgactcctaacagtcttccttgccctgccatcatctggggtggctggctgtcaagaaaggccgggcatgctttctaaacacagccacaggaggcttgtagggcatcttccaggtggggaaacagtcttagataagtaaggtgacttgcctaaggcctcccagcacccttgatcttggagtctcacagcagactgcatgtgaacaactggaaccgaaaacatgcctcagtataaaacaaacattataaaacgaacgcgttgctt

SEQ ID NO: 26803 - protein, 139 aa, Homo sapiens
MRLNQNTLLLGKKVVLVPYTSEHVPRYHEWMKSEELQRLTASEPLTLEQEYAMQCSWQEDADKCTFIVLDAEKWQAQPGATEESCMVGDVNLFLTDLEDLTLGEIEVMIAEPSCRGKGLGTEAVLAMLSYGGDPQTDSE

SEQ ID NO: 26804 - DNA, 1742 bp, Homo sapiens
aggctgctaccatgaggttgaatcagaacaccttgctgctggggaagaaggtggtccttgtaccctacacctcggagcatgtgcccaggtaccacgagtggatgaaatcagaggagctgcagcgtttgacagcctcggagccgctgaccctggagcaggagtatgccatgcagtgcagctggcaggaagatgcagacaagtgtaccttcattgtgctggatgccgagaagtggcaggcccagccaggcgccaccgaagagagctgcatggtgggagatgtgaacctcttcctcacagatctagaagacctcaccttgggggagatcgaggtcatgattgcagagcccagctgcaggggtaagggccttggcactgaggccgttctcgcgatgctgtcttacgaaacttcactttgagcaggtggctacgagcagtgtttttcaggaggtgaccctcagactgacagtgagtgagtccgagcatcagtggcttctggagcagaccagccacgtggaagagaagccttacagagatgggtcggcagagccctgctgatggctgggccttgtgggcagccactctgtgtgagcagggtgttgggcccatacacttcaaagaccagagccctgcactgggagagtgctcctggcccaggctgggaatcacctttcgaggcccttcagactctggcggggcttgctgtggcctccctccagctagtggtgtggctgagcagactccagggccagggccagttcccttctcccctcccggccaaacccagacccagactctaggaagctggaatggagggcagggatccatgggagatgtcgggatgaaggtgggagctggaggtgcagggggacctggaacatggatgggagtggacaggcctttctccttagaggccagaggtgctgccctggctgggagtgaagctccaggcactaccagctttcctgattttcccgtttggtccatgtgaagagctaccacgagccccagcctcacagtgtccactcaagggcagcttggtcctcttgtcctgcagaggcaggctggtgtgaccctgggaacttgacccgggaacaacaggtggtccagagtgagtgtggcctggcccctcaacctagtgtccgtcctcctctctcctggagccagtcttgagtttaaaggcattagtgttagatacagctccttgtggctggaaaacacccctctgctgataaagctcagggggcactgaggaagcagaggccccttgggggtgccctcctgaagagagcgtcaggccatcagctctgtccctctggtgctcccacgtctgttcctcaccctccatctctgggagcagctgcacctgactggccacgcgggggcagtggaggcacaggctcagggtggccgggctacctggcaccctatggcttacaaagtagagttggcccagtttccttccacctgaggggagcactctgactcctaacagtcttccttgccctgccatcatctggggtggctggctgtcaagaaaggccgggcatgctttctaaacacagccacaggaggcttgtagggcatcttccaggtggggaaacagtcttagataagtaaggtgacttgcctaaggcctcccagcacccttgatcttggagtctcacagcagactgcatgtgaacaactggaaccgaaaacatgcctcagtataaaacaaacattataaaacgaacgcgttgctt

SEQ ID NO: 26805 - protein, 134 aa, Homo sapiens
MRLNQNTLLLGKKVVLVPYTSEHVPRYHEWMKSEELQRLTASEPLTLEQEYAMQCSWQEDADKCTFIVLDAEKWQAQPGATEESCMVGDVNLFLTDLEDLTLGEIEVMIAEPSCRGKGLGTEAVLAMLSYETSL

SEQ ID NO: 26806 - DNA, 1696 bp, Homo sapiens
gtagatcaccctttctgcgggggacgatttcgtcggtggtaggtaccacgagtggatgaaatcagaggagctgcagcgtttgacagcctcggagccgctgaccctggagcaggagtatgccatgcagtgcagctggcaggaagatgcagacaagtgtaccttcattgtgctggatgccgagaagtggcaggcccagccaggcgccaccgaagagagctgcatggtgggagatgtgaacctcttcctcacagatctagaagacctcaccttgggggagatcgaggtcatgattgcagagcccagctgcaggggtaagggccttggcactgaggccgttctcgcgatgctgtcttacgaaacttcactttgagcaggtggctacgagcagtgtttttcaggaggtgaccctcagactgacagtgagtgagtccgagcatcagtggcttctggagcagaccagccacgtggaagagaagccttacagagatgggtcggcagagccctgctgatggctgggccttgtgggcagccactctgtgtgagcagggtgttgggcccatacacttcaaagaccagagccctgcactgggagagtgctcctggcccaggctgggaatcacctttcgaggcccttcagactctggcggggcttgctgtggcctccctccagctagtggtgtggctgagcagactccagggccagggccagttcccttctcccctcccggccaaacccagacccagactctaggaagctggaatggagggcagggatccatgggagatgtcgggatgaaggtgggagctggaggtgcagggggacctggaacatggatgggagtggacaggcctttctccttagaggccagaggtgctgccctggctgggagtgaagctccaggcactaccagctttcctgattttcccgtttggtccatgtgaagagctaccacgagccccagcctcacagtgtccactcaagggcagcttggtcctcttgtcctgcagaggcaggctggtgtgaccctgggaacttgacccgggaacaacaggtggtccagagtgagtgtggcctggcccctcaacctagtgtccgtcctcctctctcctggagccagtcttgagtttaaaggcattagtgttagatacagctccttgtggctggaaaacacccctctgctgataaagctcagggggcactgaggaagcagaggccccttgggggtgccctcctgaagagagcgtcaggccatcagctctgtccctctggtgctcccacgtctgttcctcaccctccatctctgggagcagctgcacctgactggccacgcgggggcagtggaggcacaggctcagggtggccgggctacctggcaccctatggcttacaaagtagagttggcccagtttccttccacctgaggggagcactctgactcctaacagtcttccttgccctgccatcatctggggtggctggctgtcaagaaaggccgggcatgctttctaaacacagccacaggaggcttgtagggcatcttccaggtggggaaacagtcttagataagtaaggtgacttgcctaaggcctcccagcacccttgatcttggagtctcacagcagactgcatgtgaacaactggaaccgaaaacatgcctcagtataaaacaaacattataaaacgaacgcgttgctt

SEQ ID NO: 26807 - protein, 104 aa, Homo sapiens
MKSEELQRLTASEPLTLEQEYAMQCSWQEDADKCTFIVLDAEKWQAQPGATEESCMVGDVNLFLTDLEDLTLGEIEVMIAEPSCRGKGLGTEAVLAMLSYETSL

SEQ ID NO: 26808 - DNA, 2019 bp, Homo sapiens
ggctggttggaggaggtagatcaccctttctgcgggggacgatttcgtcggtggtagaattttggagtctgtattctttgaagtgtctagacggaactaatgacggaagtcaacttagccccagcaggaaagctggagcgcctacccaaagttggaggaaattcagggtcctgaagtctttgctctccccatctgcatgcaggctgctaccatgaggttgaatcagaacaccttgctgctggggaagaaggtggtccttgtaccctacacctcggagcatgtgcccaggtaccacgagtggatgaaatcagaggagctgcagcgtttgacagcctcggagccgctgaccctggagcaggagtatgccatgcagtgcagctggcaggaagatgcagacaagtgtaccttcattgtgctggatgccgagaagtggcaggcccagccaggcgccaccgaagagagctgcatggtgggagatgtgaacctcttcctcacagatctagaagacctcaccttgggggagatcgaggtcatgattgcagagcccagctgcaggggtaagggccttggcactgaggccgttctcgcgatgctgtcttacggagtgaccacgctaggtctgaccaagtttgaggctaaaattgggcaaggaaatgaaccaagcatccggatgttccagaaacttcactttgagcaggtggctacgagcagtgtttttcaggaggtgaccctcagactgacagtgagtgagtccgagcatcagtggcttctggagcagaccagccacgtggaagagaagccttacagagatgggtcggcagagccctgctgatggctgggccttgtgggcagccactctgtgtgagcagggtgttgggcccatacacttcaaagaccagagccctgcactgggagagtgctcctggcccaggctgggaatcacctttcgaggcccttcagactctggcggggcttgctgtggcctccctccagctagtggtgtggctgagcagactccagggccagggccagttcccttctcccctcccggccaaacccagacccagactctaggaagctggaatggagggcagggatccatgggagatgtcgggatgaaggtgggagctggaggtgcagggggacctggaacatggatgggagtggacaggcctttctccttagaggccagaggtgctgccctggctgggagtgaagctccaggcactaccagctttcctgattttcccgtttggtccatgtgaagagctaccacgagccccagcctcacagtgtccactcaagggcagcttggtcctcttgtcctgcagaggcaggctggtgtgaccctgggaacttgacccgggaacaacaggtggtccagagtgagtgtggcctggcccctcaacctagtgtccgtcctcctctctcctggagccagtcttgagtttaaaggcattagtgttagatacagctccttgtggctggaaaacacccctctgctgataaagctcagggggcactgaggaagcagaggccccttgggggtgccctcctgaagagagcgtcaggccatcagctctgtccctctggtgctcccacgtctgttcctcaccctccatctctgggagcagctgcacctgactggccacgcgggggcagtggaggcacaggctcagggtggccgggctacctggcaccctatggcttacaaagtagagttggcccagtttccttccacctgaggggagcactctgactcctaacagtcttccttgccctgccatcatctggggtggctggctgtcaagaaaggccgggcatgctttctaaacacagccacaggaggcttgtagggcatcttccaggtggggaaacagtcttagataagtaaggtgacttgcctaaggcctcccagcacccttgatcttggagtctcacagcagactgcatgtgaacaactggaaccgaaaacatgcctcagtataaaacaaacattataaaacgaacgcgttgctt

SEQ ID NO: 26809 - protein, 211 aa, Homo sapiens
MQAATMRLNQNTLLLGKKVVLVPYTSEHVPRYHEWMKSEELQRLTASEPLTLEQEYAMQCSWQEDADKCTFIVLDAEKWQAQPGATEESCMVGDVNLFLTDLEDLTLGEIEVMIAEPSCRGKGLGTEAVLAMLSYGVTTLGLTKFEAKIGQGNEPSIRMFQKLHFEQVATSSVFQEVTLRLTVSESEHQWLLEQTSHVEEKPYRDGSAEPC

SEQ ID NO: 26810 - DNA, 1815 bp, Homo sapiens
ggccgggcctgggaacgtggctggttggaggaggtagatcaccctttctgcgggggacgatttcgtcggtggtaggctgctaccatgaggttgaatcagaacaccttgctgctggggaagaaggtggtccttgtaccctacacctcggagcatgtgcccaggtaccacgagtggatgaaatcagaggagctgcagcgtttgacagcctcggagccgctgaccctggagcaggagtatgccatgcagtgcagctggcaggaagatgcagacaagtgtaccttcattgtgctggatgccgagaagtggcaggcccagccaggcgccaccgaagagagctgcatggtgggagatgtgaacctcttcctcacagatctagaagacctcaccttgggggagatcgaggtcatgattgcagagcccagctgcaggggtaagggccttggcactgaggccgttctcgcgatgctgtcttacgaaacttcactttgagcaggtggctacgagcagtgtttttcaggaggtgaccctcagactgacagtgagtgagtccgagcatcagtggcttctggagcagaccagccacgtggaagagaagccttacagagatgggtcggcagagccctgctgatggctgggccttgtgggcagccactctgtgtgagcagggtgttgggcccatacacttcaaagaccagagccctgcactgggagagtgctcctggcccaggctgggaatcacctttcgaggcccttcagactctggcggggcttgctgtggcctccctccagctagtggtgtggctgagcagactccagggccagggccagttcccttctcccctcccggccaaacccagacccagactctaggaagctggaatggagggcagggatccatgggagatgtcgggatgaaggtgggagctggaggtgcagggggacctggaacatggatgggagtggacaggcctttctccttagaggccagaggtgctgccctggctgggagtgaagctccaggcactaccagctttcctgattttcccgtttggtccatgtgaagagctaccacgagccccagcctcacagtgtccactcaagggcagcttggtcctcttgtcctgcagaggcaggctggtgtgaccctgggaacttgacccgggaacaacaggtggtccagagtgagtgtggcctggcccctcaacctagtgtccgtcctcctctctcctggagccagtcttgagtttaaaggcattagtgttagatacagctccttgtggctggaaaacacccctctgctgataaagctcagggggcactgaggaagcagaggccccttgggggtgccctcctgaagagagcgtcaggccatcagctctgtccctctggtgctcccacgtctgttcctcaccctccatctctgggagcagctgcacctgactggccacgcgggggcagtggaggcacaggctcagggtggccgggctacctggcaccctatggcttacaaagtagagttggcccagtttccttccacctgaggggagcactctgactcctaacagtcttccttgccctgccatcatctggggtggctggctgtcaagaaaggccgggcatgctttctaaacacagccacaggaggcttgtagggcatcttccaggtggggaaacagtcttagataagtaaggtgacttgcctaaggcctcccagcacccttgatcttggagtctcacagcagactgcatgtgaacaactggaaccgaaaacatgcctcagtataaaacaaacattataaaacgaacgcgttgctt

SEQ ID NO: 26811 - protein, 134 aa, Homo sapiens; identical to SEQ ID NO: 26805

SEQ ID NO: 26812 - DNA, 1773 bp, Homo sapiens
ggccgggcctgggaacgtggctggttggaggaggtagatcaccctttctgcgggggacgatttcgtcggtggtaggctgctaccatgaggttgaatcagaacaccttgctgctggggaagaaggtggtccttgtaccctacacctcggagcatgtgcccaggtaccacgagtggatgaaatcagaggagctgcagcgtttgacagcctcggagccgctgaccctggagcaggagtatgccatgcagtgcagctggcaggaagatgcagacaagtgtaccttcattgtgctggatgccgagaagtggcaggcccagccaggcgccaccgaagagagctgcatggtgggagatgtgaacctcttcctcacagatctagaagacctcaccttgggggagatcgaggtcatgattgcagagcccagctgcaggggtaagggccttggcactgaggccgttctcgcgatgctgtcttacggaggtgaccctcagactgacagtgagtgagtccgagcatcagtggcttctggagcagaccagccacgtggaagagaagccttacagagatgggtcggcagagccctgctgatggctgggccttgtgggcagccactctgtgtgagcagggtgttgggcccatacacttcaaagaccagagccctgcactgggagagtgctcctggcccaggctgggaatcacctttcgaggcccttcagactctggcggggcttgctgtggcctccctccagctagtggtgtggctgagcagactccagggccagggccagttcccttctcccctcccggccaaacccagacccagactctaggaagctggaatggagggcagggatccatgggagatgtcgggatgaaggtgggagctggaggtgcagggggacctggaacatggatgggagtggacaggcctttctccttagaggccagaggtgctgccctggctgggagtgaagctccaggcactaccagctttcctgattttcccgtttggtccatgtgaagagctaccacgagccccagcctcacagtgtccactcaagggcagcttggtcctcttgtcctgcagaggcaggctggtgtgaccctgggaacttgacccgggaacaacaggtggtccagagtgagtgtggcctggcccctcaacctagtgtccgtcctcctctctcctggagccagtcttgagtttaaaggcattagtgttagatacagctccttgtggctggaaaacacccctctgctgataaagctcagggggcactgaggaagcagaggccccttgggggtgccctcctgaagagagcgtcaggccatcagctctgtccctctggtgctcccacgtctgttcctcaccctccatctctgggagcagctgcacctgactggccacgcgggggcagtggaggcacaggctcagggtggccgggctacctggcaccctatggcttacaaagtagagttggcccagtttccttccacctgaggggagcactctgactcctaacagtcttccttgccctgccatcatctggggtggctggctgtcaagaaaggccgggcatgctttctaaacacagccacaggaggcttgtagggcatcttccaggtggggaaacagtcttagataagtaaggtgacttgcctaaggcctcccagcacccttgatcttggagtctcacagcagactgcatgtgaacaactggaaccgaaaacatgcctcagtataaaacaaacattataaaacgaacgcgttgctt

SEQ ID NO: 26813 - protein, 139 aa, Homo sapiens; identical to SEQ ID NO: 26803

SEQ ID NO: 26814 - DNA, 1896 bp, Homo sapiens
agccggccgggcctgggaacgtggctggttggaggaggtagatcaccctttctgcgggggacgatttcgtcggtggtaggctgctaccatgaggttgaatcagaacaccttgctgctggggaagaaggtggtccttgtaccctacacctcggagcatgtgcccaggtaccacgagtggatgaaatcagaggagctgcagcgtttgacagcctcggagccgctgaccctggagcaggagtatgccatgcagtgcagctggcaggaagatgcagacaagtgtaccttcattgtgctggatgccgagaagtggcaggcccagccaggcgccaccgaagagagctgcatggtgggagatgtgaacctcttcctcacagatctagaagacctcaccttgggggagatcgaggtcatgattgcagagcccagctgcaggggtaagggccttggcactgaggccgttctcgcgatgctgtcttacggagtgaccacgctaggtctgaccaagtttgaggctaaaattgggcaaggaaatgaaccaagcatccggatgttccagaaacttcactttgagcaggtggctacgagcagtgtttttcaggaggtgaccctcagactgacagtgagtgagtccgagcatcagtggcttctggagcagaccagccacgtggaagagaagccttacagagatgggtcggcagagccctgctgatggctgggccttgtgggcagccactctgtgtgagcagggtgttgggcccatacacttcaaagaccagagccctgcactgggagagtgctcctggcccaggctgggaatcacctttcgaggcccttcagactctggcggggcttgctgtggcctccctccagctagtggtgtggctgagcagactccagggccagggccagttcccttctcccctcccggccaaacccagacccagactctaggaagctggaatggagggcagggatccatgggagatgtcgggatgaaggtgggagctggaggtgcagggggacctggaacatggatgggagtggacaggcctttctccttagaggccagaggtgctgccctggctgggagtgaagctccaggcactaccagctttcctgattttcccgtttggtccatgtgaagagctaccacgagccccagcctcacagtgtccactcaagggcagcttggtcctcttgtcctgcagaggcaggctggtgtgaccctgggaacttgacccgggaacaacaggtggtccagagtgagtgtggcctggcccctcaacctagtgtccgtcctcctctctcctggagccagtcttgagtttaaaggcattagtgttagatacagctccttgtggctggaaaacacccctctgctgataaagctcagggggcactgaggaagcagaggccccttgggggtgccctcctgaagagagcgtcaggccatcagctctgtccctctggtgctcccacgtctgttcctcaccctccatctctgggagcagctgcacctgactggccacgcgggggcagtggaggcacaggctcagggtggccgggctacctggcaccctatggcttacaaagtagagttggcccagtttccttccacctgaggggagcactctgactcctaacagtcttccttgccctgccatcatctggggtggctggctgtcaagaaaggccgggcatgctttctaaacacagccacaggaggcttgtagggcatcttccaggtggggaaacagtcttagataagtaaggtgacttgcctaaggcctcccagcacccttgatcttggagtctcacagcagactgcatgtgaacaactggaaccgaaaacatgcctcagtataaaacaaacattataaaacgaacgcgttgctt

SEQ ID NO: 26815 - protein, 206 aa, Homo sapiens
MRLNQNTLLLGKKVVLVPYTSEHVPRYHEWMKSEELQRLTASEPLTLEQEYAMQCSWQEDADKCTFIVLDAEKWQAQPGATEESCMVGDVNLFLTDLEDLTLGEIEVMIAEPSCRGKGLGTEAVLAMLSYGVTTLGLTKFEAKIGQGNEPSIRMFQKLHFEQVATSSVFQEVTLRLTVSESEHQWLLEQTSHVEEKPYRDGSAEPC

SEQ ID NO: 26816 - DNA, 2065 bp, Homo sapiens
ggcggtagccggccgggcctgggaacgtggctggttggaggaggtagatcaccctttctgcgggggacgatttcgtcggtggtaggctgctaccatgaggttgaatcagaacaccttgctgctggggaagaaggtggtccttgtaccctacacctcggagcatgtgcccaggtaccacgagtggatgaaatcagaggagctgcagcgtttgacagcctcggagccgctgaccctggagcaggagtatgccatgcagtgcagctggcaggaagatgcagacaagtgtaccttcattgtgctggatgccgagaagtggcaggcccagccaggcgccaccgaagagagctgcatggtgggagatgtgaacctcttcctcacagatctagaagacctcaccttgggggagatcgaggtcatgattgcagagcccagctgcaggggtaagggccttggcactgaggccgttctcgcgatgctgtcttacggtaagaaagtgtgagcagacaatgcgggaagtgggcaggccccaggtgaactttgttcaggtgtgagggttgggggcaggtgaaggttcctcctctgcagcttgggacaggagggtgggggcaggcgcctccttacttgcccctgtctcatctcctctgcgaggagtgaccacgctaggtctgaccaagtttgaggctaaaattgggcaaggaaatgaaccaagcatccggatgttccagaaacttcactttgagcaggtggctacgagcagtgtttttcaggaggtgaccctcagactgacagtgagtgagtccgagcatcagtggcttctggagcagaccagccacgtggaagagaagccttacagagatgggtcggcagagccctgctgatggctgggccttgtgggcagccactctgtgtgagcagggtgttgggcccatacacttcaaagaccagagccctgcactgggagagtgctcctggcccaggctgggaatcacctttcgaggcccttcagactctggcggggcttgctgtggcctccctccagctagtggtgtggctgagcagactccagggccagggccagttcccttctcccctcccggccaaacccagacccagactctaggaagctggaatggagggcagggatccatgggagatgtcgggatgaaggtgggagctggaggtgcagggggacctggaacatggatgggagtggacaggcctttctccttagaggccagaggtgctgccctggctgggagtgaagctccaggcactaccagctttcctgattttcccgtttggtccatgtgaagagctaccacgagccccagcctcacagtgtccactcaagggcagcttggtcctcttgtcctgcagaggcaggctggtgtgaccctgggaacttgacccgggaacaacaggtggtccagagtgagtgtggcctggcccctcaacctagtgtccgtcctcctctctcctggagccagtcttgagtttaaaggcattagtgttagatacagctccttgtggctggaaaacacccctctgctgataaagctcagggggcactgaggaagcagaggccccttgggggtgccctcctgaagagagcgtcaggccatcagctctgtccctctggtgctcccacgtctgttcctcaccctccatctctgggagcagctgcacctgactggccacgcgggggcagtggaggcacaggctcagggtggccgggctacctggcaccctatggcttacaaagtagagttggcccagtttccttccacctgaggggagcactctgactcctaacagtcttccttgccctgccatcatctggggtggctggctgtcaagaaaggccgggcatgctttctaaacacagccacaggaggcttgtagggcatcttccaggtggggaaacagtcttagataagtaaggtgacttgcctaaggcctcccagcacccttgatcttggagtctcacagcagactgcatgtgaacaactggaaccgaaaacatgcctcagtataaaacaaacattataaaacgaacgcgttgctt

SEQ ID NO: 26817 - protein, 134 aa, Homo sapiens
MRLNQNTLLLGKKVVLVPYTSEHVPRYHEWMKSEELQRLTASEPLTLEQEYAMQCSWQEDADKCTFIVLDAEKWQAQPGATEESCMVGDVNLFLTDLEDLTLGEIEVMIAEPSCRGKGLGTEAVLAMLSYGKKV

SEQ ID NO: 26818 - DNA, 2048 bp, Homo sapiens
atgcggaaggggcggtagccggccgggcctgggaacgtggctggttggaggaggtagatcaccctttctgcgggggacgatttcgtcggtggtaggctgctaccatgaggttgaatcagaacaccttgctgctggggaagaaggtggtccttgtaccctacacctcggagcatgtgcccaggtaccacgagtggatgaaatcagaggagctgcagcgtttgacagcctcggagccgctgaccctggagcaggagtatgccatgcagtgcagctggcaggaagatgcagacaagtgtaccttcattgtgctggatgccgagaagtggcaggcccagccaggcgccaccgaagagagctgcatggtgggagatgtgaacctcttcctcacagatctagaagacctcaccttgggggagatcgaggtcatgattgcagaatggtaatgatagtagcaacttcagagttgttgagaattaaatgagatggtgtctgccaagtgcccgcactggagcctggcacacggcgtcagcgccgctcctgttgtctctcctagagcccagctgcaggggtaagggccttggcactgaggccgttctcgcgatgctgtcttacggtaagaaagtgtgagcagacaatgcgggaagtgggcaggccccaggtgaactttgttcaggtgtgagggttgggggcaggtgaaggttcctcctctgcagcttgggacaggagggtgggggcaggcgcctccttacttgcccctgtctcatctcctctgcgaggagtgaccacgctaggtctgaccaagtttgaggctaaaattgggcaaggaaatgaaccaagcatccggatgttccagaaacttcactttgagcaggtggctacgagcagtgtttttcaggaggtgaccctcagactgacagtgagtgagtccgagcatcagtggcttctggagcagaccagccacgtggaagagaagccttacagagatgggtcggcagagccctgctgatggctgggccttgtgggcagccactctgtgtgagcagggtgttgggcccatacacttcaaagaccagagccctgcactgggagagtgctcctggcccaggctgggaatcacctttcgaggcccttcagactctggcggggcttgctgtggcctccctccagctagtggtgtggctgagcagactccagggccagggccagttcccttctcccctcccggccaaacccagacccagactctaggaagctggaatggagggcagggatccatgggagatgtcgggatgaaggtgggagctggaggtgcagggggacctggaacatggatgggagtggacaggcctttctccttagaggccagaggtgctgccctggctgggagtgaagctccaggcactaccagctttcctgattttcccgtttggtccatgtgaagagctaccacgagccccagcctcacagtgtccactcaagggcagcttggtcctcttgtcctgcagaggcaggctggtaaaacacccctctgctgataaagctcagggggcactgaggaagcagaggccccttgggggtgccctcctgaagagagcgtcaggccatcagctctgtccctctggtgctcccacgtctgttcctcaccctccatctctgggagcagctgcacctgactggccacgcgggggcagtggaggcacaggctcagggtggccgggctacctggcaccctatggcttacaaagtagagttggcccagtttccttccacctgaggggagcactctgactcctaacagtcttccttgccctgccatcatctggggtggctggctgtcaagaaaggccgggcatgctttctaaacacagccacaggaggcttgtagggcatcttccaggtggggaaacagtcttagataagtaaggtgacttgcctaaggcctcccagcacccttgatcttggagtctcacagcagactgcatgtgaacaactggaaccgaaaacatgcctcagtataaaacaaacattataaaacgaacgcgttgctt

SEQ ID NO: 26819 - protein, 112 aa, Homo sapiens
MRLNQNTLLLGKKVVLVPYTSEHVPRYHEWMKSEELQRLTASEPLTLEQEYAMQCSWQEDADKCTFIVLDAEKWQAQPGATEESCMVGDVNLFLTDLEDLTLGEIEVMIAEW

SEQ ID NO: 26820 - DNA, 419 bp, Homo sapiens
gccctggtactgggagggctgactccacagtcagtctccaggttccttccctttcccagccccggccatagaagctttgtgaaaagcctggaaggtgctggaactcctgtattctcatggccctgaagccagtccctgtggctgacccttctgtcctcttccccacccactgcatcgggggggcttgctgtggcctccctccagctagtggtgtggtgtcaagaaaggccgggcatgctttctaaacacagccacaggaggcttgtagggcatcttccaggtggggaaacagtcttagataagtaaggtgacttgcctaaggcctcccagcacccttgatcttggagtctcacagcagactgcatgtgaacaactggaaccgaaaacatgcctcagtataaaacaaacattataaaacg

SEQ ID NO: 26821 - protein, 42 aa, Homo sapiens
MALKPVPVADPSVLFPTHCIGGACCGLPPASGVVSRKAGHAF

SEQ ID NO: 26822 - DNA, 777 bp, Homo sapiens
ggccgggcctgggaacgtggctggttggaggaggtagatcaccctttctgcgggggacgatttcgtcggtggtaggctgctaccatgaggttgaatcagaacaccttgctgctggggaagaaggtggtccttgtaccctacacctcggagcatgtgcccaggtaccacgagtggatgaaatcagaggagctgcagcgtttgacagcctcggagccgctgaccctggagcaggagtatgccatgcagtgcagctggcaggaagatgcagacaagtgtaccttcattgtgctggatgccgagaagtggcaggcccagccaggcgccaccgaagagagctgcatggtgggagatgtgaacctcttcctcacagatctagaagacctcaccttgggggagatcgaggtcatgattgcagagcccagctgcaggggtaagggccttggcactgaggccgttctcgcgatgctgtcttacggtaagaaagtgtgagcagacaatgcgggaagtgggcaggccccaggtgaactttgttcaggtgtgagggttgggggcaggtgaaggttcctcctctgcagcttgggacaggagggtgggggcaggcgcctccttacttgcccctgtctcatctcctctgcgaggagtgaccacgctaggtctgaccaagtttgaggctaaaattgggcaaggaaatgaaccaagcatccggatgttccagaaacttcactttgagcaggtaaggatgtcctggggcagagtggggcttagacctgggtggtg

SEQ ID NO: 26823 - protein, 134 aa, Homo sapiens; identical to SEQ ID NO: 26817

SEQ ID NO: 26824 - DNA, 844 bp, Homo sapiens
ggtagccggccgggcctgggaacgtggctggttggaggaggtagatcaccctttctgcgggggacgatttcgtcggtggtaggctgctaccatgaggttgaatcagaacaccttgctgctggggaagaaggtggtccttgtaccctacacctcggagcatgtgcccaggtaccacgagtggatgaaatcagaggagctgcagcgtttgacagcctcggagccgctgaccctggagcaggagtatgccatgcagtgcagctggcaggaagatgcagacaagtgtaccttcattgtgctggatgccgagaagtggcaggcccagccaggcgccaccgaagagagctgcatggtgggagatgtgaacctcttcctcacagatctagaagacctcaccttgggggagatcgaggtcatgattgcaggtttgtttcacctagccctgccttccgctgactcccggctctcagatctgctgactgagcctgccgaggctgcaaagggtgggcactcacagggttcactgggaggctccatgtggtgagtccagggcctggctgggcagcctgcccacctagccccctcagcctggtggtacaccctcagcctcatcactttagtccttatgcttaggcgtgaacttaacccttggtttggggtagattcaagtatggttagtcccatagttggggtgggctggggaccctcagaaaaaggtctctggagcatgttgtcatattacaggaggaggccctcctgtttctgctccttcatggtcctcagtttcccccaagtggctactgactatccccatgaggcagcatactgactccatgaggtaaagagg

SEQ ID NO: 26825 - protein, 149 aa, Homo sapiens
MRLNQNTLLLGKKVVLVPYTSEHVPRYHEWMKSEELQRLTASEPLTLEQEYAMQCSWQEDADKCTFIVLDAEKWQAQPGATEESCMVGDVNLFLTDLEDLTLGEIEVMIAGLFHLALPSADSRLSDLLTEPAEAAKGGHSQGSLGGSMW

SEQ ID NO: 26826 - DNA, 868 bp, Homo sapiens
ggctggttggaggaggtagatcaccctttctgcgggggacgatttcgtcggtggtaggctgctaccatgaggttgaatcagaacaccttgctgctggggaagaaggtggtccttgtaccctacacctcggagcatgtgcccagactgctcctccgcactgacccgagacaggataggaaattggacagatagaactgactcgtcctgctgttcttgtcaggtaccacgagtggatgaaatcagaggagctgcagcgtttgacagcctcggagccgctgaccctggagcaggagtatgccatgcagtgcagctggcaggaagatgcagacaagtgtaccttcattgtgctggatgccgagaagtggcaggcccagccaggcgccaccgaagagagctgcatggtgggagatgtgaacctcttcctcacagatctagaagacctcaccttgggggagatcgaggtcatgattgcaggtttgtttcacctagccctgccttccgctgactcccggctctcagatctgctgactgagcctgccgaggctgcaaagggtgggcactcacagggttcactgggaggctccatgtggtgagtccagggcctggctgggcagcctgcccacctagccccctcagcctggtggtacaccctcagcctcatcactttagtccttatgcttaggcgtgaacttaacccttggtttggggtagattcaagtatggttagtcccatagttggggtgggctggggaccctcagaaaaaggtctctggagcatgttgtcatattacaggaggaggccctcctgtttctgctccttcatggtcctcagtttcccccaagtggctactgactatccccatgaggc

SEQ ID NO: 26827 - protein, 123 aa, Homo sapiens
MCPDCSSALTRDRIGNWTDRTDSSCCSCQVPRVDEIRGAAAFDSLGAADPGAGVCHAVQLAGRCRQVYLHCAGCREVAGPARRHRRELHGGRCEPLPHRSRRPHLGGDRGHDCRFVSPSPAFR

SEQ ID NO: 26828 - DNA, 981 bp, Homo sapiens
aggctgctaccatgaggttgaatcagaacaccttgctgctggggaagaaggtggtccttgtaccctacacctcggagcatgtgcccaggtaccacgagtggatgaaatcagaggagctgcagcgtttgacagcctcggagccgctgaccctggagcaggagtatgccatgcagtgcagctggcaggaagatgcagacagtgaggagtgcccccccacttcccctagccctggtactgggagggctgactccacagtcagtctccaggttccttccctttcccagccccggccatagaagctttgtgaaaagcctggaaggtgctggaactcctgtattctcatggccctgaagccagtccctgtggctgacccttctgtcctcttccccacccactgcatcgggcttggaaggatttggagaaagtagagcatttggggctctggctgtaaattgaggccctgcccctcatgtccctcaccacagcctagtgtggtgactgccctcctctgtgttccctgctctctgagaatttggttgctggttggagaggctttttctgtatgaggcagatttggaattttgtaatgagctgaaggaagctctgggaccccctcttctcctggcagactcagagatgctggtgttctgcagtgctctggcttgggtaggagtaccatcctctcttctctcctctggggagtgtgtgtgatagccctgtcacctcctcctcagagtgtaccttcattgtgctggatgccgagaagtggcaggcccagccaggcgccaccgaagagagctgcatggtgggagatgtgaacctcttcctcacagatctagaagacctcaccttgggggagatcgaggtcatgattgcaggtttgtttcacctagccctgccttccgctgactcccggctctcagatctgctgactgagcctgccgaggctgcaaagggtgggcactcacagggttcactggg

SEQ ID NO: 26829 - protein, 94 aa, Homo sapiens [sequence omitted]

SEQ ID NO: 26830 - DNA, 966 bp, Homo sapiens
gcggaaggggcggtagccggccgggcctgggaacgtggctggttggaggaggtagatcaccctttctgcgggggacgatttcgtcggtggtaggctgctaccatgaggttgaatcagaacaccttgctgctggggaagaaggtggtccttgtaccctacacctcggagcatgtgcccaggtaccacgagtggatgaaatcagaggagctgcagcgtttgacagcctcggagccgctgaccctggagcaggagtatgccatgcagtgcagctggcaggaagatgcagacagtgaggagtgcccccccacttcccctagccctggtactgggagggctgactccacagtcagtctccaggttccttccctttcccagccccggccatagaagctttgtgaaaagcctggaaggtgctggaactcctgtattctcatggccctgaagccagtccctgtggctgacccttctgtcctcttccccacccactgcatcgggcttggaaggatttggagaaagtagagcatttggggctctggctgtaaattgaggccctgcccctcatgtccctcaccacagcctagtgtggtgactgccctcctctgtgttccctgctctctgagaatttggttgctggttggagaggctttttctgtatgaggcagatttggaattttgtaatgagctgaaggaagctctgggaccccctcttctcctggcagactcagagatgctggtgttctgcagtgctctggcttgggtaggagtaccatcctctcttctctcctctggggagtgtgtgtgatagccctgtcacctcctcctcagagtgtaccttcattgtgctggatgccgagaagtggcaggcccagccaggcgccaccgaagagagctgcatggtgggagatgtgaacctcttcctcacagatctagaagacctcaccttgggggagatcgaggtcatgattg

SEQ ID NO: 26831 - protein, 94 aa, Homo sapiens [sequence omitted]

SEQ ID NO: 26832 - DNA, 418 bp, Homo sapiens
ggcctgggaacgtggctggttggaggaggtagatcaccctttctgcgggggacgatttcgtcggtggtaggctgctaccatgaggttgaatcagaacaccttgctgctggggaagaaggtggtccttgtaccctacacctcggagcatgtgcccaggtatctttcccgcttgacatggggtgcgtatcagcacccagagctgtgtaaggtacagccccagtctcagggctatttcccctaagaagaaacattggttgtgagaaataattatatatgaggggggaaaaaaggctgggtgccgtggctcacgcctgtaattccaggactttgggaggctgtggcaggaggattgcttgagcccagcagttcgagaccagcttgggtaacgtagcgagaccttgtctctacaaaaaaatac

SEQ ID NO: 26833 - protein, 53 aa, Homo sapiens
MRLNQNTLLLGKKVVLVPYTSEHVPRYLSRLTWGAYQHPELCKVQPQSQGYFP

SEQ ID NO: 26834 - DNA, 3443 bp, Homo sapiens
cgcatgcgcgctgcggaagctggtgctggacagctggcgccggcagcagcggaccggcgggagacggcggcttgggagctggctgtgctgcaggagctgcggcagccgccgtccttgcacctaaggaacctctgctgccagcccttcctcacttttggaaatggcgggtgaaattacagagaccggggaactctactcttcctacgttgggctggtgtacatgtttaacctcatcgtgggcacgggcgcactcaccatgcccaaggcattcgccactgccgggtggcttgtcagcctcgtcctgctggtgttcctgggcttcatgagcttcgtgaccaccacctttgtgatagaggccatggctgcagccaacgcgcagctccactggaagaggatggagaacctcaaggaggaggaagatgacgactcctccacagcctcagacagcgatgttctcatccgggacaactacgagcgggcagagaagcggcccatcctgtctgtgcagagacgtggatctcccaacccgtttgaaatcacagaccgggtggaaatgggacaaatggcctccatgttcttcaataaagtgggggtcaacttgttctatttctgcatcatcgtttacctgtatggagacctcgccatctatgctgctgccgtgcccttctccctcatgcaggtgacctgcagcgccactggcaatgactcctgcggtgtggaagcagacaccaaatacaatgacactgaccggtgctgggggcccctgcgccgagtggacgcctaccgcatctacttggcgatcttcactctcctcctcggaccgttcaccttctttgacgtccagaagaccaagtacctgcagatcctgacctctctgatgagatggatcgctttcgccgtcatgattgtgctggccctgatccgcatcgggcacggacaaggggaggggcacccgcccctggctgacttctcgggggtccggaacctgtttggggtgtgcgtctactccttcatgtgccagcactctctgccatccctcattacccccgtctcctccaagcgccacctcacaaggctggtgttcctggactacgtgctgatcctggccttctacggcctcctctccttcaccgccatcttctgcttccgcggcgacagcctcatggacatgtacaccctcaacttcgcgcgctgtgacgtcgtgggcctggccgctgtgcgctttttcctgggcctcttccccgtcttcaccatcagcaccaacttccccatcattgccgtgaccctgcgcaacaactggaagacactcttccaccgcgagggcggcacgtacccgtgggtggtggaccgcgtcgtgtttcccaccatcaccctggtgccgcctgtgctggtggccttctgcacccacgacctggagtccctggtgggcatcacaggggcctacgcgggcaccggcatccagtacgtcatccccgccttcctggtgtaccactgccgcagggacacccagctggcctttggctgtggggtcagcaacaagcacaggtcccctttccgccacaccttctgggtgggcttcgtgctgctctgggctttctcctgcttcattttcgtcacggccaatatcatcctcagcgagaccaagctctgatggcaggacaggcaggtctagtgacaggaggcataggggccccagccccacccctcgcccgcagagcccagatttagttgctcccaggtcttcatggggcaggtgggactgtggctctaggggaaaccccctgtccagctggggttgttctccccacccaccttccacccagtctgcacctgtcctcactcccccgggcagctctcccaccaggtccttctgcctgggtgacgcgtggctgctcccaagttctaagactcattactggaatcacacctctcccacatcttccaacacgcttcacccccaaccctacttccagggcgggctactccctgcacaatgggagatgcagtgctggcactgccatcatttgtcccagacccatgcccctcccctctcctgccccatcctgcgtccttgtctaagaaacctccactagcagctgctgcctcttcagaggcgaatcccaggctggaagtatcctagccaggtctgcctgtgacggcagggcccaccctcccaccaggcctgggaggcggtaggtgccacctcagagagggcctggctggccccatgacaagaacaagaagtgctaactggtaccagagtccccagatagagctgcgagggccctcgctgtgggcgcgagctccggagtagcaggctggatggagcatcccttctacagggacacagccgcctgccagctgggcctaaagtctggagcttgtctctgaaagggaccgtctgctgccctcgctgccccactggagccctcagggcctcctacagtgcaggtggtcctactagagggaagccatccccacctggcacctcagcggcttggcagtgacatggcagtgggagggctctgaggttcccaccctgacaatggtcaggctgcccgtgctcccactccaacactaaaagcggctcccttaggggctgagcgtgggtgctcagtgttcacgctatatcccttgggcaatgtggggttggatggggcccccacttccattcccatggaaggaggccaggtccccagccacctcccactcagccatgcacgcacttgctgggctggcctcctgggaaacacaggtgactcgaatgaactctgcattttcaacgtgccttctactgcttcaggacctgggggtccccctgaccctcactggcttgcccccagccctgggcctggccccacctgtcctggagcccagagcccctggcctggagctacctctctggggtgggtctcaggccccacccctccctcttttgagttcagtgccttgctcagcccctcccctgtatctcagcgtcttcagacctctgacagagcgacgatgtagggtctcccggggcccaaggtggtctcagggtcaggggtgggatttgcagggaactcggggagcccacgggctgcgccacctctgccctggcagctgaagcctgggagagtccctgcgtggtgtaattggcctcagcccgctttctctgtgccgtcgcacctcagtgtttctcatagcttgtccccacgtgtcactttccatccacgggaaaaacaaatgccccttctccatctatcattgcgacttcctcccaggaggcctctcaggttgggtagagcaggggcctgcagtggtcaggccaagagcaaggaagacctggctgccccactgtggctgaaaactcaaaacatctggaactacccttctccaattacgttccctcttgcttaaagacaaagctaattaaatcatcctgccacccgaggctccaaacc

SEQ ID NO: 26835 - protein, 496 aa, Homo sapiens
MAGEITETGELYSSYVGLVYMFNLIVGTGALTMPKAFATAGWLVSLVLLVFLGFMSFVTTTFVIEAMAAANAQLHWKRMENLKEEEDDDSSTASDSDVLIRDNYERAEKRPILSVQRRGSPNPFEITDRVEMGQMASMFFNKVGVNLFYFCIIVYLYGDLAIYAAAVPFSLMQVTCSATGNDSCGVEADTKYNDTDRCWGPLRRVDAYRIYLAIFTLLLGPFTFFDVQKTKYLQILTSLMRWIAFAVMIVLALIRIGHGQGEGHPPLADFSGVRNLFGVCVYSFMCQHSLPSLITPVSSKRHLTRLVFLDYVLILAFYGLLSFTAIFCFRGDSLMDMYTLNFARCDVVGLAAVRFFLGLFPVFTISTNFPIIAVTLRNNWKTLFHREGGTYPWVVDRVVFPTITLVPPVLVAFCTHDLESLVGITGAYAGTGIQYVIPAFLVYHCRRDTQLAFGCGVSNKHRSPFRHTFWVGFVLLWAFSCFIFVTANIILSETKL

SEQ ID NO: 26836 - DNA, 4716 bp, Homo sapiens
cgcatgcgcgctgcggaagctggtgctggacagctggcgccggcagcagcggaccggcgggagacggcggcttgggagctggctgtgctgcaggagctgcggcagccgccgtccttgcacctaaggaacctctgctgccagcccttcctcacttttggaaatggcgggtgaaattacagagaccggggaactctactcttcctacgttgggctggtgtacatgtttaacctcatcgtgggcacgggcgcactcaccatgcccaaggcattcgccactgccgggtggcttgtcagcctcgtcctgctggtgttcctgggcttcatgagcttcgtgaccaccacctttgtgatagaggccatggctgcagccaacgcgcagctccactggaagaggatggagaacctcaaggaggaggaagatgacgactcctccacagcctcagacagcgatgttctcatccgggacaactacgagcgggcagagaagcggcccatcctgtctgtgcagagacgtggatctcccaacccgtttgaaatcacagaccgggtggaaatgggacaaatggcctccatgttcttcaataaagtgggggtcaacttgttctatttctgcatcatcgtttacctgtatggagacctcgccatctatgctgctgccgtgcccttctccctcatgcaggtgacctgcagcgccactggcaatgactcctgcggtgtggaagcagacaccaaatacaatgacactgaccggtgctgggggcccctgcgccgagtggacgcctaccgcatctacttggcgatcttcactctcctcctcggaccgttcaccttctttgacgtccagaagaccaagtacctgcagatcctgacctctctgatgagatggatcgctttcgccgtcatgattgtgctggccctgatccgcatcgggcacggacaaggggaggggcacccgcccctggctgacttctcgggggtccggaacctgtttggggtgtgcgtctactccttcatgtgccagcactctctgccatccctcattacccccgtctcctccaagcgccacctcacaaggctggtgttcctggactacgtgctgatcctggccttctacggcctcctctccttcaccgccatcttctgcttccgcggcgacagcctcatggacatgtacaccctcaacttcgcgcgctgtgacgtcgtgggcctggccgctgtgcgctttttcctgggcctcttccccgtcttcaccatcagcaccaacttccccatcattgccgtgaccctgcgcaacaactggaagacactcttccaccgcgagggcggcacgtacccgtgggtggtggaccgcgtcgtgtttcccaccatcaccctggtgccgcctgtgctggtggccttctgcacccacgacctggagtccctggtgggcatcacaggggcctacgcgggcaccggcatccagtacgtcatccccgccttcctggtgtaccactgccgcagggacacccagctggcctttggctgtggggtcagcaacaagcacaggtcccctttccgccacaccttctgggtgggcttcgtgctgctctgggctttctcctgcttcattttcgtcacggccaatatcatcctcagcgagaccaagctctgatggcaggacaggcaggtctagtgacaggaggcataggggccccagccccacccctcgcccgcagagcccagatttagttgctcccaggtcttcatggggcaggtgggactgtggctctaggggaaaccccctgtccagctggggttgttctccccacccaccttccacccagtctgcacctgtcctcactcccccgggcagctctcccaccaggtccttctgcctgggtgacgcgtggctgctcccaagttctaagactcattactggaatcacacctctcccacatcttccaacacgcttcacccccaaccctacttccagggcgggctactccctgcacaatgggagatgcagtgctggcactgccatcatttgtcccagacccatgcccctcccctctcctgccccatcctgcgtccttgtctaagaaacctccactagcagctgctgcctcttcagaggcgaatcccaggctggaagtatcctagccaggtctgcctgtgacggcagggcccaccctcccaccaggcctgggaggcggtaggtgccacctcagagagggcctggctggccccatgacaagaacaagaagtgctaactggtaccagagtccccagatagagctgcgagggccctcgctgtgggcgcgagctccggagtagcaggctggatggagcatcccttctacagggacacagccgcctgccagctgggcctaaagtctggagcttgtctctgaaagggaccgtctgctgccctcgctgccccactggagccctcagggcctcctacagtgcaggtggtcctactagagggaagccatccccacctggcacctcagcggcttggcagtgacatggcagtgggagggctctgaggttcccaccctgacaatggtcaggctgcccgtgctcccactccaacactaaaagcggctcccttaggggctgagcgtgggtgctcagtgttcacgctatatcccttgggcaatgtggggttggatggggcccccacttccattcccatggaaggaggccaggtccccagccacctcccactcagccatgcacgcacttgctgggctggcctcctgggaaacacaggtgactcgaatgaactctgcattttcaacgtgccttctactgcttcaggacctgggggtccccctgaccctcactggcttgcccccagccctgggcctggccccacctgtcctggagcccagagcccctggcctggagctacctctctggggtgggtctcaggccccacccctccctcttttgagttcagtgccttgctcagcccctcccctgtatctcagcgtcttcagacctctgacagagcgacgatgtagggtctcccggggcccaaggtggtctcagggtcaggggtgggatttgcagggaactcggggagcccacgggctgcgccacctctgccctggcagctgaagcctgggagagtccctgcgtggtgtaattggcctcagcccgctttctctgtgccgtcgcacctcagtgtttctcatagcttgtccccacgtgtcactttccatccacgggaaaaacaaatgccccttctccatctatcattgcgacttcctcccaggaggcctctcaggttgggtagagcaggggcctgcagtggtcaggccaagagcaaggaagacctggctgccccactgtggctgaaaactcaaaacatctggaactacccttctccaattacgttccctcttgcttaaagacaaagctaattaaatcatcctgccacccgaggctccaaaccaaatcttggacgcaaattcattagcttcataaagcccaggttgatttatgtgacagtctggaaccgcccagccatggagtcggtggccgtgttccctgccctggagggaactggccagcagtgaccacatcgctgatgccaagtggggaccctcaccactgccgttgtctagctgctttgctcctcagtgtcctcctgctgtaagtcagatgaggtcaccttcctctccatcgatgccaggcttctgccgctgacggccaatggggcttggggccaggggcagagaaccccaacagcaagagagccccaggtgatgctggctctccacgtgcatccggcacgtttcactgcagccatcatcaacttggcaaagtaggcaagctcagcttgtggtttccattttgcagatgggcccccggggtcagtgatgggaagagcagaagaggatgccagcccagcctggcccaggagcaggtgtcgttgtggaggaaagcttaaactcaacagcctctacccaacatctgccacctgcatggccccagatgcccccggtgcaggccaggtcaaggtgggagtaaactttctttgcctccctccccacagaagcaccagacccacctgagccccagagcctcatgccagcagctcctggctgttcctcacctgaggctagagcagcagctgccagcttatagatggggcggatggcaggtgatagactgggaagcactgctgggtggtggaggtgggcagtggcaccatgacgggcccctagccacacagctgtcctcactacggggcagggagcagcctcggcaacaggcaaaggccagagtcagagtggtggggaggacaggggctgctgccccgctcctggaaagccactgcagaggggcagtggctggcagtgccaggcctgggggaagtggaagcgtcctgtctgggggcagattcccaagcaagggtgacccatggttaagggccactggaaagctggagagagcttgggatcccttccacctggggccaatggtgttgattgcagactggaggggtaacctccgctgagggtcattatgtgccaggcatggcattgggtactttctgcattgggaccaggcagccgggcctgccatttgaggcagcgagcctccgtgacctgtcctccctcatttgtaaagtggggtaacagctatgtcactggccagttgtggggattaaagtgctgagcttagtgcccagcccaaaatgctcaataaagctattcagtgat

SEQ ID NO: 26837 - protein, 496 aa, Homo sapiens; identical to SEQ ID NO: 26835

SEQ ID NO: 26838 - DNA, 1756 bp, Homo sapiens
cgcatgcgcgctgcggaagctggtgctggacagctggcgccggcagcagcggaccggcgggagacggcggcttgggagctggctgtgctgcaggagctgcggcagccgccgtccttgcacctaaggaacctctgctgccagcccttcctcacttttggaaatggcgggtgaaattacagagaccggggaactctactcttcctacgttgggctggtgtacatgtttaacctcatcgtgggcacgggcgcactcaccatgcccaaggcattcgccactgccgggtggcttgtcagcctcgtcctgctggtgttcctgggcttcatgagcttcgtgaccaccacctttgtgatagaggccatggctgcagccaacgcgcagctccactggaagaggatggagaacctcaaggaggaggaagatgacgactcctccacagcctcagacagcgatgttctcatccgggacaactacgagcgggcagagaagcggcccatcctgtctgtgcagagacgtggatctcccaacccgtttgaaatcacagaccgggtggaaatgggacaaatggcctccatgttcttcaataaagtgggggtcaacttgttctatttctgcatcatcgtttacctgtatggagacctcgccatctatgctgctgccgtgcccttctccctcatgcaggtgacctgcagcgccactggcaatgactcctgcggtgtggaagcagacaccaaatacaatgacactgaccggtgctgggggcccctgcgccgagtggacgcctaccgcatctacttggcgatcttcactctcctcctcggaccgttcaccttctttgacgtccagaagaccaagtacctgcagatcctgacctctctgatgagatggatcgatgggcccccggggtcagtgatgggaagagcagaagaggatgccagcccagcctggcccaggagcaggtgtcgttgtggaggaaagcttaaactcaacagcctctacccaacatctgccacctgcatggccccagatgcccccggtgcaggccaggtcaaggtgggagtaaactttctttgcctccctccccacagaagcaccagacccacctgagccccagagcctcatgccagcagctcctggctgttcctcacctgaggctagagcagcagctgccagcttatagatggggcggatggcaggtgatagactgggaagcactgctgggtggtggaggtgggcagtggcaccatgacgggcccctagccacacagctgtcctcactacggggcagggagcagcctcggcaacaggcaaaggccagagtcagagtggtggggaggacaggggctgctgccccgctcctggaaagccactgcagaggggcagtggctggcagtgccaggcctgggggaagtggaagcgtcctgtctgggggcagattcccaagcaagggtgacccatggttaagggccactggaaagctggagagagcttgggatcccttccacctggggccaatggtgttgattgcagactggaggggtaacctccgctgagggtcattatgtgccaggcatggcattgggtactttctgcattgggaccaggcagccgggcctgccatttgaggcagcgagcctccgtgacctgtcctccctcatttgtaaagtggggtaacagctatgtcactggccagttgtggggattaaagtgctgagcttagtgcccagcccaaaatgctcaataaagctattcagtgat

SEQ ID NO: 26839 - protein, 314 aa, Homo sapiens
MAGEITETGELYSSYVGLVYMFNLIVGTGALTMPKAFATAGWLVSLVLLVFLGFMSFVTTTFVIEAMAAANAQLHWKRMENLKEEEDDDSSTASDSDVLIRDNYERAEKRPILSVQRRGSPNPFEITDRVEMGQMASMFFNKVGVNLFYFCIIVYLYGDLAIYAAAVPFSLMQVTCSATGNDSCGVEADTKYNDTDRCWGPLRRVDAYRIYLAIFTLLLGPFTFFDVQKTKYLQILTSLMRWIDGPPGSVMGRAEEDASPAWPRSRCRCGGKLKLNSLYPTSATCMAPDAPGAGQVKVGVNFLCLPPHRSTRPT

SEQ ID NO: 26840 - DNA, 4732 bp, Homo sapiens
cgcatgcgcgctgcggaagctggtgctggacagctggcgccggcagcagcggaccggcgggagacggcggcttgggagctggctgtgctgcaggagctgcggcagccgccgtccttgcacctaaggaacctctgctgccagcccttcctcacttttggaaatggcgggtgaaattacagagaccggggaactctactcttcctacgttgggctggtgtacatgtttaacctcatcgtgggcacgggcgcactcaccatgcccaaggcattcgccactgccgggtggcttgtcagcctcgtcctgctggtgttcctgggcttcatgagcttcgtgaccaccacctttgtgatagaggccatggctgcagccaacgcgcagctccactggaagaggatggagaacctcaaggaggaggaagatgacgactcctccacagcctcagacagcgatgttctcatccgggacaactacgagcgggcagagaagcggcccatcctgtctgtgcagagacgtggatctcccaacccgtttgaaatcacagaccgggtggaaatgggacaaatggcctccatgttcttcaataaagtgggggtcaacttgttctatttctgcatcatcgtttacctgtatggagacctcgccatctatgctgctgccgtgcccttctccctcatgcaggtgacctgcagcgccactggcaatgactcctgcggtgtggaagcagacaccaaatacaatgacactgaccggtgctgggggcccctgcgccgagtggacgcctaccgcatctacttggcgatcttcactctcctcctcggaccgttcaccttctttgacgtccagaagaccaagtacctgcagatcctgacctctctgatgagatggatcgctttcgccgtcatgattgtgctggccctgatccgcatcgggcacggacaaggggaggggcacccgcccctggctgacttctcgggggtccggaacctgtttggggtgtgcgtctactccttcatgtgccagcactctctgccatccctcattacccccgtctcctccaagcgccacctcacaaggctggtgttcctggactacgtgctgatcctggccttctacggcctcctctccttcaccgccatcttctgcttccgcggcgacagcctcatggacatgtacaccctcaacttcgcgcgctgtgacgtcgtgggcctggccgctgtgcgctttttcctgggcctcttccccgtcttcaccatcagcaccaacttccccatcattgccgtgaccctgcgcaacaactggaagacactcttccaccgcgagggcggcacgtacccgtgggtggtggaccgcgtcgtgtttcccaccatcaccctggtgccgcctgtgctggtggccttctgcacccacgacctggagtccctggtgggcatcacaggggcctacgcgggcaccggcatccagtacgtcatccccgccttcctggtgtaccactgccgcagggacacccagctggcctttggctgtggggtcagcaacaagcacaggtcccctttccgccacaccttctgggtgggcttcgtgctgctctgggctttctcctgcttcattttcgtcacggccaatatcatcctcagcgagaccaagctctgatggcaggacaggcaggtctagtgacaggaggcataggggccccagccccacccctcgcccgcagagcccagatttagttgctcccaggtcttcatggggcaggtgggactgtggctctaggggaaaccccctgtccagctggggttgttctccccacccaccttccacccagtctgcacctgtcctcactcccccgggcagctctcccaccaggtccttctgcctgggtgacgcgtggctgctcccaagttctaagactcattactggaatcacacctctcccacatcttccaacacgcttcacccccaaccctacttccagggcgggctactccctgcacaatgggagatgcagtgctggcactgccatcatttgtcccagacccatgcccctcccctctcctgccccatcctgcgtccttgtctaagaaacctccactagcagctgctgcctcttcagaggcgaatcccaggctggaagtatcctagccaggtctgcctgtgacggcagggcccaccctcccaccaggcctgggaggcggtaggtgccacctcagagagggcctggctggccccatgacaagaacaagaagtgctaactggtaccagagtccccagatagagctgcgagggccctcgctgtgggcgcgagctccggagtagcaggctggatggagcatcccttctacagggacacagccgcctgccagctgggcctaaagtctggagcttgtctctgaaagggaccgtctgctgccctcgctgccccactggagccctcagggcctcctacagtgcaggtggtcctactagagggaagccatccccacctggcacctcagcggcttggcagtgacatggcagtgggagggctctgaggttcccaccctgacaatggtcaggctgcccgtgctcccactccaacactaaaagcggctcccttaggggctgagcgtgggtgctcagtgttcacgctatatcccttgggcaatgtggggttggatggggcccccacttccattcccatggaaggaggccaggtccccagccacctcccactcagccatgcacgcacttgctgggctggcctcctgggaaacacaggtgactcgaatgaactctgcattttcaacgtgccttctactgcttcaggacctgggggtccccctgaccctcactggcttgcccccagccctgggcctggccccacctgtcctggagcccagagcccctggcctggagctacctctctggggtgggtctcaggccccacccctccctcttttgagttcagtgccttgctcagcccctcccctgtatctcagcgtcttcagacctctgacagagcgacgatgtagggtctcccggggcccaaggtggtctcagggtcaggggtgggatttgcagggaactcggggagcccacgggctgcgccacctctgccctggcagctgaagcctgggagagtccctgcgtggtgtaattggcctcagcccgctttctctgtgccgtcgcacctcagtgtttctcatagcttgtccccacgtgtcactttccatccacgggaaaaacaaatgccccttctccatctatcattgcgacttcctcccaggaggcctctcaggttgggtagagcaggggcctgcagtggtcaggccaagagcaaggaagacctggctgccccactgtggctgaaaactcaaaacatctggaactacccttctccaattacgttccctcttgcttaaagacaaagctaattaaatcatcctgccacccgaggctccaaaccaaatcttggacgcaaattcattagcttcataaagcccaggttgatttatgtgacagtctggaaccgcccagccatggagtcggtggccgtgttccctgccctggagggaactggccagcagtgaccacatcgctgatgccaagtggggaccctcaccactgccgttgtctagctgctttgctcctcagtgtcctcctgctgtaagtcagatgaggtcaccttcctctccatcgatgccaggcttctgccgctgacggccaatggggcttggggccaggggcagagaaccccaacagcaagagagccccaggtgatgctggctctccacgtgcatccggcacgtttcactgcagccatcatcaacttggcaaagtaggcaagctcagcttgtggtttccattttgcagatgggcccccggggtcagtgatgggaagagcagaagaggatgccagcccagcctggcccaggagcaggtgtcgttgtggaggaaagcttaaactcaacagcctctacccaacatctgccacctgcatggccccagatgcccccggtgcaggccaggtcaaggtgggagtaaactttctttgcctccctccccacagaagcaccagacccacctgagccccagagcctcatgccagcagctcctggctgttcctcacctgaggctagagcagcagctgccagcttatagatggggcggatggcaggtgatagactgggaagcactgctgggtggtggaggtgggcagtggcaccatgacgggcccctagccacacagctgtcctcactacggggcagggagcagcctcggcaacaggcaaaggccagagtcagagtggtggggaggacaggggctgctgccccgctcctggaaagccactgcagaggggcagtggctggcagtgccaggcctgggggaagtggaagcgtcctgtctgggggcagattcccaagcaagggtgacccatggttaagggccactggaaagctggagagagcttgggatcccttccacctggggccaatggtgttgattgcagactggaggggtaacctccgctgagggtcattatgtgccaggcatggcattgggtactttctgcattgggaccaggcagccgggcctgccatttgaggcagcgagcctccgtgacctgtcctccctcatttgtaaagtggggtaacagctatgtcactggccagttgtggggattaaagtgctgagcttagtgcccagcccaaaatgctcaataaagctattcagtgatacctgtttcccacatc

SEQ ID NO: 26841 - protein, 496 aa, Homo sapiens; identical to SEQ ID NO: 26835

SEQ ID NO: 26842 - DNA, 285 bp, Homo sapiens
gcgcaggctgtcttggcggctgtggctgagccccgggcgtcggtgtggctcttggagccctgctccccatcgcgcatcctggcagggtctccataacctgtcatcctcgtttcatcttgatttatgatcagacctaatgagtttttggagcagctgtctcccagggatgtggcgatcaatctaggagatggctgttgaactttgctcctcccttcctcccttccttcctcctttccttccttttctcccttccctccctttcctccatctcccagggaaacgagc

SEQ ID NO: 26843 - protein, 31 aa, Homo sapiens
MAVELCSSLPPFLPPFLPFLPSLPFLHLPGK

SEQ ID NO: 26844 - DNA, 1774 bp, Homo sapiens
caggggcctacgcgggcaccggcatccagtacgtcatccccgccttcctggtgtaccactgccgcagggacacccagctggcctttggctgtggggtcagcaacaagcacaggtcccctttccgccacaccttctgggtgggcttcgtgctgctctgggctttctcctgcttcattttcgtcacggccaatatcatcctcagcgagaccaagctctgatggcaggacaggcaggtctagtgacaggaggcataggggccccagccccacccctcgcccgcagagcccagatttagttgctcccaggtcttcatggggcaggtgggactgtggctctaggggaaaccccctgtccagctggggttgttctccccacccaccttccacccagtctgcacctgtcctcactcccccgggcagctctcccaccaggtccttctgcctgggtgacgcgtggctgctcccaagttctaagactcattactggaatcacacctctcccacatcttccaacacgcttcacccccaaccctacttccagggcgggctactccctgcacaatgggagatgcagtgctggcactgccatcatttgtcccagacccatgcccctcccctctcctgccccatcctgcgtccttgtctaagaaacctccactagcagctgctgcctcttcagaggcgaatcccaggctggaagtatcctagccaggtctgcctgtgacggcagggcccaccctcccaccaggcctgggaggcggtaggtgccacctcagagagggcctggctggccccatgacaagaacaagaagtgctaactggtaccagagtccccagatagagctgcgagggccctcgctgtgggcgcgagctccggagtagcaggctgcccgtgctcccactccaacactaaaagcggctcccttaggggctgagcgtgggtgctcagtgttcacgctatatcccttgggcaatgtggggttggatggggcccccacttccattcccatggaaggaggccaggtccccagccacctcccactcagccatgcacgcacttgctgggctggcctcctgggaaacacaggtgactcgaatgaactctgcattttcaacgtgccttctactgcttcaggacctgggggtccccctgaccctcactggcttgcccccagccctgggcctggccccacctgtcctggagcccagagcccctggcctggagctacctctctggggtgggtctcaggccccacccctccctcttttgagttcagtgccttgctcagcccctcccctgtatctcagcgtcttcagacctctgacagagcgacgatgtagggtctcccggggcccaaggtggtctcagggtcaggggtgggatttgcagggaactcggggagcccacgggctgcgccacctctgccctggcagctgaagcctgggagagtccctgcgtggtgtaattggcctcagcccgctttctctgtgccgtcgcacctcagtgtttctcatagcttgtccccacgtgtcactttccatccacgggaaaaacaaatgccccttctccatctatcattgcgacttcctcccaggaggcctctcaggttgggtagagcaggggcctgcagtggtcaggccaagagcaaggaagacctggctgccccactgtggctgaaaactcaaaacatctggaactacccttctccaattacgttccctcttgcttaaagacaaagctaattaaatcatcctgccacccgaggctccaaacc

SEQ ID NO: 26845 - protein, 154 aa, Homo sapiens
MWGWMGPPLPFPWKEARSPATSHSAMHALAGLASWETQVTRMNSAFSTCLLLLQDLGVPLTLTGLPPALGLAPPVLEPRAPGLELPLWGGSQAPPLPLLSSVPCSAPPLYLSVFRPLTERRCRVSRGPRWSQGQGWDLQGTRGAHGLRHLCPGS

SEQ ID NO: 26846 - DNA, 3047 bp, Homo sapiens
caggggcctacgcgggcaccggcatccagtacgtcatccccgccttcctggtgtaccactgccgcagggacacccagctggcctttggctgtggggtcagcaacaagcacaggtcccctttccgccacaccttctgggtgggcttcgtgctgctctgggctttctcctgcttcattttcgtcacggccaatatcatcctcagcgagaccaagctctgatggcaggacaggcaggtctagtgacaggaggcataggggccccagccccacccctcgcccgcagagcccagatttagttgctcccaggtcttcatggggcaggtgggactgtggctctaggggaaaccccctgtccagctggggttgttctccccacccaccttccacccagtctgcacctgtcctcactcccccgggcagctctcccaccaggtccttctgcctgggtgacgcgtggctgctcccaagttctaagactcattactggaatcacacctctcccacatcttccaacacgcttcacccccaaccctacttccagggcgggctactccctgcacaatgggagatgcagtgctggcactgccatcatttgtcccagacccatgcccctcccctctcctgccccatcctgcgtccttgtctaagaaacctccactagcagctgctgcctcttcagaggcgaatcccaggctggaagtatcctagccaggtctgcctgtgacggcagggcccaccctcccaccaggcctgggaggcggtaggtgccacctcagagagggcctggctggccccatgacaagaacaagaagtgctaactggtaccagagtccccagatagagctgcgagggccctcgctgtgggcgcgagctccggagtagcaggctgcccgtgctcccactccaacactaaaagcggctcccttaggggctgagcgtgggtgctcagtgttcacgctatatcccttgggcaatgtggggttggatggggcccccacttccattcccatggaaggaggccaggtccccagccacctcccactcagccatgcacgcacttgctgggctggcctcctgggaaacacaggtgactcgaatgaactctgcattttcaacgtgccttctactgcttcaggacctgggggtccccctgaccctcactggcttgcccccagccctgggcctggccccacctgtcctggagcccagagcccctggcctggagctacctctctggggtgggtctcaggccccacccctccctcttttgagttcagtgccttgctcagcccctcccctgtatctcagcgtcttcagacctctgacagagcgacgatgtagggtctcccggggcccaaggtggtctcagggtcaggggtgggatttgcagggaactcggggagcccacgggctgcgccacctctgccctggcagctgaagcctgggagagtccctgcgtggtgtaattggcctcagcccgctttctctgtgccgtcgcacctcagtgtttctcatagcttgtccccacgtgtcactttccatccacgggaaaaacaaatgccccttctccatctatcattgcgacttcctcccaggaggcctctcaggttgggtagagcaggggcctgcagtggtcaggccaagagcaaggaagacctggctgccccactgtggctgaaaactcaaaacatctggaactacccttctccaattacgttccctcttgcttaaagacaaagctaattaaatcatcctgccacccgaggctccaaaccaaatcttggacgcaaattcattagcttcataaagcccaggttgatttatgtgacagtctggaaccgcccagccatggagtcggtggccgtgttccctgccctggagggaactggccagcagtgaccacatcgctgatgccaagtggggaccctcaccactgccgttgtctagctgctttgctcctcagtgtcctcctgctgtaagtcagatgaggtcaccttcctctccatcgatgccaggcttctgccgctgacggccaatggggcttggggccaggggcagagaaccccaacagcaagagagccccaggtgatgctggctctccacgtgcatccggcacgtttcactgcagccatcatcaacttggcaaagtaggcaagctcagcttgtggtttccattttgcagatgggcccccggggtcagtgatgggaagagcagaagaggatgccagcccagcctggcccaggagcaggtgtcgttgtggaggaaagcttaaactcaacagcctctacccaacatctgccacctgcatggccccagatgcccccggtgcaggccaggtcaaggtgggagtaaactttctttgcctccctccccacagaagcaccagacccacctgagccccagagcctcatgccagcagctcctggctgttcctcacctgaggctagagcagcagctgccagcttatagatggggcggatggcaggtgatagactgggaagcactgctgggtggtggaggtgggcagtggcaccatgacgggcccctagccacacagctgtcctcactacggggcagggagcagcctcggcaacaggcaaaggccagagtcagagtggtggggaggacaggggctgctgccccgctcctggaaagccactgcagaggggcagtggctggcagtgccaggcctgggggaagtggaagcgtcctgtctgggggcagattcccaagcaagggtgacccatggttaagggccactggaaagctggagagagcttgggatcccttccacctggggccaatggtgttgattgcagactggaggggtaacctccgctgagggtcattatgtgccaggcatggcattgggtactttctgcattgggaccaggcagccgggcctgccatttgaggcagcgagcctccgtgacctgtcctccctcatttgtaaagtggggtaacagctatgtcactggccagttgtggggattaaagtgctgagcttagtgcccagcccaaaatgctcaataaagctattcagtgat

SEQ ID NO: 26847 - protein, 154 aa, Homo sapiens; identical to SEQ ID NO: 26845

SEQ ID NO: 26848 - DNA, 3063 bp, Homo sapiens
caggggcctacgcgggcaccggcatccagtacgtcatccccgccttcctggtgtaccactgccgcagggacacccagctggcctttggctgtggggtcagcaacaagcacaggtcccctttccgccacaccttctgggtgggcttcgtgctgctctgggctttctcctgcttcattttcgtcacggccaatatcatcctcagcgagaccaagctctgatggcaggacaggcaggtctagtgacaggaggcataggggccccagccccacccctcgcccgcagagcccagatttagttgctcccaggtcttcatggggcaggtgggactgtggctctaggggaaaccccctgtccagctggggttgttctccccacccaccttccacccagtctgcacctgtcctcactcccccgggcagctctcccaccaggtccttctgcctgggtgacgcgtggctgctcccaagttctaagactcattactggaatcacacctctcccacatcttccaacacgcttcacccccaaccctacttccagggcgggctactccctgcacaatgggagatgcagtgctggcactgccatcatttgtcccagacccatgcccctcccctctcctgccccatcctgcgtccttgtctaagaaacctccactagcagctgctgcctcttcagaggcgaatcccaggctggaagtatcctagccaggtctgcctgtgacggcagggcccaccctcccaccaggcctgggaggcggtaggtgccacctcagagagggcctggctggccccatgacaagaacaagaagtgctaactggtaccagagtccccagatagagctgcgagggccctcgctgtgggcgcgagctccggagtagcaggctgcccgtgctcccactccaacactaaaagcggctcccttaggggctgagcgtgggtgctcagtgttcacgctatatcccttgggcaatgtggggttggatggggcccccacttccattcccatggaaggaggccaggtccccagccacctcccactcagccatgcacgcacttgctgggctggcctcctgggaaacacaggtgactcgaatgaactctgcattttcaacgtgccttctactgcttcaggacctgggggtccccctgaccctcactggcttgcccccagccctgggcctggccccacctgtcctggagcccagagcccctggcctggagctacctctctggggtgggtctcaggccccacccctccctcttttgagttcagtgccttgctcagcccctcccctgtatctcagcgtcttcagacctctgacagagcgacgatgtagggtctcccggggcccaaggtggtctcagggtcaggggtgggatttgcagggaactcggggagcccacgggctgcgccacctctgccctggcagctgaagcctgggagagtccctgcgtggtgtaattggcctcagcccgctttctctgtgccgtcgcacctcagtgtttctcatagcttgtccccacgtgtcactttccatccacgggaaaaacaaatgccccttctccatctatcattgcgacttcctcccaggaggcctctcaggttgggtagagcaggggcctgcagtggtcaggccaagagcaaggaagacctggctgccccactgtggctgaaaactcaaaacatctggaactacccttctccaattacgttccctcttgcttaaagacaaagctaattaaatcatcctgccacccgaggctccaaaccaaatcttggacgcaaattcattagcttcataaagcccaggttgatttatgtgacagtctggaaccgcccagccatggagtcggtggccgtgttccctgccctggagggaactggccagcagtgaccacatcgctgatgccaagtggggaccctcaccactgccgttgtctagctgctttgctcctcagtgtcctcctgctgtaagtcagatgaggtcaccttcctctccatcgatgccaggcttctgccgctgacggccaatggggcttggggccaggggcagagaaccccaacagcaagagagccccaggtgatgctggctctccacgtgcatccggcacgtttcactgcagccatcatcaacttggcaaagtaggcaagctcagcttgtggtttccattttgcagatgggcccccggggtcagtgatgggaagagcagaagaggatgccagcccagcctggcccaggagcaggtgtcgttgtggaggaaagcttaaactcaacagcctctacccaacatctgccacctgcatggccccagatgcccccggtgcaggccaggtcaaggtgggagtaaactttctttgcctccctccccacagaagcaccagacccacctgagccccagagcctcatgccagcagctcctggctgttcctcacctgaggctagagcagcagctgccagcttatagatggggcggatggcaggtgatagactgggaagcactgctgggtggtggaggtgggcagtggcaccatgacgggcccctagccacacagctgtcctcactacggggcagggagcagcctcggcaacaggcaaaggccagagtcagagtggtggggaggacaggggctgctgccccgctcctggaaagccactgcagaggggcagtggctggcagtgccaggcctgggggaagtggaagcgtcctgtctgggggcagattcccaagcaagggtgacccatggttaagggccactggaaagctggagagagcttgggatcccttccacctggggccaatggtgttgattgcagactggaggggtaacctccgctgagggtcattatgtgccaggcatggcattgggtactttctgcattgggaccaggcagccgggcctgccatttgaggcagcgagcctccgtgacctgtcctccctcatttgtaaagtggggtaacagctatgtcactggccagttgtggggattaaagtgctgagcttagtgcccagcccaaaatgctcaataaagctattcagtgatacctgtttcccacatc

SEQ ID NO: 26849 - protein, 154 aa, Homo sapiens; identical to SEQ ID NO: 26845

SEQ ID NO: 26850 - DNA, 1387 bp, Homo sapiens
ggaactcggggagcccacgggctgcgccacctctgccctggcagctgaagcctgggagagtccctgcgtggtgtaattggcctcagcccgctttctctgtgccgtcgcacctcagtgtttctcatagcttgtccccacgtgtcactttccatccacgggaaaaacaaatgccccttctccatctatcattgcgacttcctcccaggaggcctctcaggttgggtagagcaggggcctgcagtggtcaggccaagagcaaggaagacctggctgccccactgtggctgaaaactcaaaacatctggaactacccttctccaattacgttccctcttgcttaaagacaaagctaattaaatcatcctgccacccgaggctccaaaccaaatcttggacgcaaattcattagcttcataaagcccaggttgatttatgtgacagtctggaaccgcccagccatggagtcggtggccgtgttccctgccctggagggaactggccagcagtgaccacatcgctgatgccaagtggggaccctcaccactgccgttgtctagctgctttgctcctcagtgtcctcctgctgtaagtcagatgaggtcaccttcctctccatcgatgccaggcttctgccgctgacggccaatggggcttggggccaggggcagagaaccccaacagcaagagagccccaggtgatgctggctctccacgtgcatccggcacgtttcactgcagccatcatcaacttggcaaagtaggcaagctcagcttgtggtttccattttgcagatgggcccccggggtcagtgatgggaagagcagaagaggatgccagcccagcctggcccaggagcaggtgtcgttgtggaggaaagcttaaactcaacagcctctacccaacatctgccacctgcatggccccagatgcccccggcaaaggccagagtcagagtggtggggaggacaggggctgctgccccgctcctggaaagccactgcagaggggcagtggctggcagtgccaggcctgggggaagtggaagcgtcctgtctgggggcagattcccaagcaagggtgacccatggttaagggccactggaaagctggagagagcttgggatcccttccacctggggccaatggtgttgattgcagactggaggggtaacctccgctgagggtcattatgtgccaggcatggcattgggtactttctgcattgggaccaggcagccgggcctgccatttgaggcagcgagcctccgtgacctgtcctccctcatttgtaaagtggggtaacagctatgtcactggccagttgtggggattaaagtgctgagcttagtgcccagcccaaaatgctcaataaagctattcagtgat

SEQ ID NO: 26851 - protein, 116 aa, Homo sapiens
MPAQPGPGAGVVVEESLNSTASTQHLPPAWPQMPPAKARVRVVGRTGAAAPLLESHCRGAVAGSARPGGSGSVLSGGRFPSKGDPWLRATGKLERAWDPFHLGPMVLIADWRGNLR

SEQ ID NO: 26852 - DNA, 1403 bp, Homo sapiens
ggaactcggggagcccacgggctgcgccacctctgccctggcagctgaagcctgggagagtccctgcgtggtgtaattggcctcagcccgctttctctgtgccgtcgcacctcagtgtttctcatagcttgtccccacgtgtcactttccatccacgggaaaaacaaatgccccttctccatctatcattgcgacttcctcccaggaggcctctcaggttgggtagagcaggggcctgcagtggtcaggccaagagcaaggaagacctggctgccccactgtggctgaaaactcaaaacatctggaactacccttctccaattacgttccctcttgcttaaagacaaagctaattaaatcatcctgccacccgaggctccaaaccaaatcttggacgcaaattcattagcttcataaagcccaggttgatttatgtgacagtctggaaccgcccagccatggagtcggtggccgtgttccctgccctggagggaactggccagcagtgaccacatcgctgatgccaagtggggaccctcaccactgccgttgtctagctgctttgctcctcagtgtcctcctgctgtaagtcagatgaggtcaccttcctctccatcgatgccaggcttctgccgctgacggccaatggggcttggggccaggggcagagaaccccaacagcaagagagccccaggtgatgctggctctccacgtgcatccggcacgtttcactgcagccatcatcaacttggcaaagtaggcaagctcagcttgtggtttccattttgcagatgggcccccggggtcagtgatgggaagagcagaagaggatgccagcccagcctggcccaggagcaggtgtcgttgtggaggaaagcttaaactcaacagcctctacccaacatctgccacctgcatggccccagatgcccccggcaaaggccagagtcagagtggtggggaggacaggggctgctgccccgctcctggaaagccactgcagaggggcagtggctggcagtgccaggcctgggggaagtggaagcgtcctgtctgggggcagattcccaagcaagggtgacccatggttaagggccactggaaagctggagagagcttgggatcccttccacctggggccaatggtgttgattgcagactggaggggtaacctccgctgagggtcattatgtgccaggcatggcattgggtactttctgcattgggaccaggcagccgggcctgccatttgaggcagcgagcctccgtgacctgtcctccctcatttgtaaagtggggtaacagctatgtcactggccagttgtggggattaaagtgctgagcttagtgcccagcccaaaatgctcaataaagctattcagtgatacctgtttcccacatc

SEQ ID NO: 26853 - protein, 116 aa, Homo sapiens; identical to SEQ ID NO: 26851

SEQ ID NO: 26854 - DNA, 4270 bp, Homo sapiens
catcgcgagtgtccttgagccgcgggtgacggtggctctcgctgctcgcgccccctcctcccgcggggggagcctgatgccacgttccctatgaattatttatcgccggcctaaaaataccccgaacttcacagcccgagtgaccctccggtggacatgggtggggccctggggccggccctgttgctcacctcgctcttcggtgcctgggcagggctgggtccggggcagggcgagcagggcatgacggtggctgtggtgtttagcagctcagggccgccccaggcccagttccgtgcccgcctcaccccccagagcttcctggacctacccctggagatccagccgctcacagttggggtcaacaccaccaaccccagcagcctcctcacccagatctgcggcctcctgggtgctgcccacgtccacggcattgtctttgaggacaacgtggacaccgaggcggtggcccagatccttgacttcatctcctcccagacccatgtgcccatcctcagcatcagcggaggctctgctgtggtcctcacccccaaggagccgggctccgccttcctgcagctgggcgtgtccctggagcagcagctgcaggtgctgttcaaggtgctggaagagtacgactggagcgccttcgccgtcatcaccagcctgcacccgggccacgcgctcttcctggagggcgtgcgcgccgtcgccgacgccagccacgtgagttggcggctgctggacgtggtcacgctggagctgggcccgggagggccgcgcgcgcgcacgcagcgcctgctgcgccagctcgacgcgcccgtgtttgtggcctactgctcgcgcgaggaggccgaggtgctcttcgccgaggcggcgcaggccggtctggtggggcccggccacgtgtggctggtgcccaacctggcgctgggcagcaccgatgcgccccccgccaccttccccgtgggcctcatcagcgtcgtcaccgagagctggcgcctcagcctgcgccagaaggtgcgcgacggcgtggccattctggccctgggcgcccacagctactggcgccagcatggaaccctgccagccccggccggggactgccgtgttcaccctgggcccgtcagccctgcccgggaggccttctacaggcacctactgaatgtcacctgggagggccgagacttctccttcagccctggtgggtacctggtccagcccaccatggtggtgatcgccctcaaccggcaccgcctctgggagatggtggggcgctgggagcatggcgtcctatacatgaagtaccccgtgtggcctcgctacagtgcctctctgcagcctgtggtggacagtcggcacctgacggtggccacgctggaagagcggccctttgtcatcgtggagagccctgaccctggcacaggaggctgtgtccccaacaccgtgccctgccgcaggcagagcaaccacaccttcagcagcggggacgtggccccctacaccaagctctgctgtaagggattctgcatcgacatcctcaagaagctggccagagtggtcaaattctcctacgacctgtacctggtgaccaacggcaagcatggcaagcgggtgcgcggcgtatggaacggcatgattggggaggtgtactacaagcgggcagacatggccatcggctccctcaccatcaatgaggaacgctccgagatcgtagacttctctgtaccctttgtggagacgggcatcagtgtgatggtggctcgcagcaatggcaccgtctccccctcggccttcttggagccatatagccctgcagtgtgggtgatgatgtttgtcatgtgcctcactgtggtggccatcaccgtcttcatgttcgagtacttcagccctgtcagctacaaccagaacctcaccagaggcaagaagtccgggggcccagctttcactatcggcaagtccgtgtggctgctgtgggcgctggtcttcaacaactcagtgcccatcgagaacccgcggggcaccaccagcaagatcatggttctggtctgggccttctttgctgtcatcttcctcgccagctacacggccaacctggccgccttcatgatccaagagcaatacatcgacactgtgtcgggcctcagtgacaagaagtttcagcggcctcaagatcagtacccacctttccgcttcggcacggtgcccaacggcagcacggagcggaacatccgcagtaactaccgtgacatgcacacccacatggtcaagttcaaccagcgctcggtggaggacgcgctcaccagcctcaagatggggaagctggatgccttcatctatgatgctgctgtcctcaactacatggcaggcaaggacgagggctgcaagctggtcaccattgggtctggcaaggtctttgctaccactggctacggcatcgccatgcagaaggactcccactggaagcgggccatagacctggcgctcttgcagttcctgggggacggagagacacagaaactggagacagtgtggctctcagggatctgccagaatgagaagaacgaggtgatgagcagcaagctggacatcgacaacatggcaggcgtcttctacatgctgctggtggccatggggctggccctgctggtcttcgcctgggagcacctggtctactggaagctgcgccactcggtgcccaactcatcccagctggacttcctgctggctttcagcaggggcatctacagctgcttcagcggggtgcagagcctcgccagcccaccgcggcaggccagcccggacctcacggccagctcggcccaggccagcgtgctcaagatgctgcaggcagcccgcgacatggtgaccacggcgggcgtaagcagctccctggaccgcgccactcgcaccatcgagaattggggtggcggccgccgtgcgcccccaccgtccccctgcccgaccccgcggtctggccccagcccatgcctgcccacccccgacccgcccccagagccgagccccacgggctggggaccgccagacgggggtcgcgcggcgcttgtgcgcagggctccgcagcccccgggccgccccccgacgccggggccgcccctgtccgacgtctcccgagtgtcgcgccgcccagcctgggaggcgcggtggccggtgcggaccgggcactgcgggaggcacctctcggcctccgagcggcccctgtcgcccgcgcgctgtcactacagctcctttcctcgagccgaccgatccggccgccccttcctcccgctcttcccggagctggaggacctgccgctgctcggtccggagcagctggcccggcgggaggccctgctgcacgcggcctgggcccggggctcgcgcccgcgtcacgcttccctgcccagctccgtggccgaggccttcgctcggcccagctcgctgcccgctgggtgcaccggccccgcctgcgcccgccccgacggccactcggcctgcaggcgcttggcgcaggcgcagtcgatgtgcttgccgatctaccgggaggcctgccaggagggcgagcaggcaggggcccccgcctggcagcacagacagcacgtctgcctgcacgcccacgcccacctgccattttgctggggggctgtctgtcctcaccttccaccctgtgccagccacggctcctggctctccggggcctgggggcctctggggcacaggggcaggactctggggctgggcacaggctacagagacagtgggggactggacgagatcagcagggtagcccgtgggacgcaaggcttcccgggaccctgcacctggagacggatctccagtctggagtcagaagtgtgagttatcagccactcaggctccgagccagctggattctctgcctgccactgtcagggttaagcggcaggcaggattgggcttttctggcttctgccatgaaatcctggccatgggaccccagtgacagatgatgtcttccatggtcatcagtgacctcagtagcctcaaatcatggtgagggctgggcttttgctgtcctcttctcacgcagagttctgccaggagggtgtgctgtgggggtcagactcctgaggctctcccttccctggggctagccagttactggtcatggctgctgtgggcatggaggctggaacttgtggttgaggcagggccatcccgatccttgctctacctggctagagtttcttctcatcagagcactgggacattaaaccaaccttttacaaca

SEQ ID NO: 26855 - protein, 1233 aa, Homo sapiens; identical to SEQ ID NO: 3591

SEQ ID NO: 26856 - DNA, 3237 bp, Homo sapiens
gcgagtcccgcttcttccccttccagctctgccccatctcctttgccccagcctagctctctccttcctgcgacctgggagaatcggagtgggcttccagagtagtggcatcttgcagatgctggcccgtgcccggctcccgggcttccagagcgcaaagggaagggtaggcagagagggcactgggcgagcaagacctggcgctgggccctggctgcgcaccagccgcctgcgccggtctctgggggcttcgcccaggatccccgacggcggggaggggaagccccgagtctcctgtttcctgcctacgcgggcagggcggggacacgcggagcaaaggcacccggcaacctgaacccccaggtgcgtcccgcgaccctgcaaggagctgctgggaccctccggtggacatgggtggggccctggggccggccctgttgctcacctcgctcttcggtgcctgggcagggctgggtccggggcagggcgagcagggcatgacggtggctgtggtgtttagcagctcagggccgccccaggcccagttccgtgcccgcctcaccccccagagcttcctggacctacccctggagatccagccgctcacagttggggtcaacaccaccaaccccagcagcctcctcacccagatctgcggcctcctgggtgctgcccacgtccacggcattgtctttgaggacaacgtggacaccgaggcggtggcccagatccttgacttcatctcctcccagacccatgtgcccatcctcagcatcagcggaggctctgctgtggtcctcacccccaaggagccgggctccgccttcctgcagctgggcgtgtccctggagcagcagctgcaggtgctgttcaaggtgctggaagagtacgactggagcgccttcgccgtcatcaccagcctgcacccgggccacgcgctcttcctggagggcgtgcgcgccgtcgccgacgccagccacgtgagttggcggctgctggacgtggtcacgctggagctgggcccgggagggccgcgcgcgcgcacgcagcgcctgctgcgccagctcgacgcgcccgtgtttgtggcctactgctcgcgcgaggaggccgaggtgctcttcgccgaggcggcgcaggccggtctggtggggcccggccacgtgtggctggtgcccaacctggcgctgggcagcaccgatgcgccccccgccaccttccccgtgggcctcatcagcgtcgtcaccgagagctggcgcctcagcctgcgccagaaggtgcgcgacggcgtggccattctggccctgggcgcccacagctactggcgccagcatggaaccctgccagccccggccggggactgccgtgttcaccctgggcccgtcagccctgcccgggaggccttctacaggcacctactgaatgtcacctgggagggccgagacttctccttcagccctggtgggtacctggtccagcccaccatggtggtgatcgccctcaaccggcaccgcctctgggagatggtggggcgctgggagcatggcgtcctatacatgaagtaccccgtgtggcctcgctacagtgcctctctgcagcctgtggtggacagtcggcacctgacggtggccacgctggaagagcggccctttgtcatcgtggagagccctgaccctggcacaggaggctgtgtccccaacaccgtgccctgccgcaggcagagcaaccacaccttcagcagcggggacgtggccccctacaccaagctctgctgtaagggattctgcatcgacatcctcaagaagctggccagagtggtcaaattctcctacgacctgtacctggtgaccaacggcaagcatggcaagcgggtgcgcggcgtatggaacggcatgattggggaggtgtactacaagcgggcagacatggccatcggctccctcaccatcaatgaggaacgctccgagatcgtagacttctctgtaccctttgtggagacgggcatcagtgtgatggtggctcgcagcaatggcaccgtctccccctcggccttcttggagccatatagccctgcagtgtgggtgatgatgtttgtcatgtgcctcactgtggtggccatcaccgtcttcatgttcgagtacttcagccctgtcagctacaaccagaacctcaccagaggcaagaagtccgggggcccagctttcactatcggcaagtccgtgtggctgctgtgggcgctggtcttcaacaactcagtgcccatcgagaacccgcggggcaccaccagcaagatcatggttctggtctgggccttctttgctgtcatcttcctcgccagctacacggccaacctggccgccttcatgatccaagagcaatacatcgacactgtgtcgggcctcagtgacaagaagtttcagcggcctcaagatcagtacccacctttccgcttcggcacggtgcccaacggcagcacggagcggaacatccgcagtaactaccgtgacatgcacacccacatggtcaagttcaaccagcgctcggtggaggacgcgctcaccagcctcaagatggggaagctggatgccttcatctatgatgctgctgtcctcaactacatggcaggcaaggacgagggctgcaagctggtcaccattgggtctggcaaggtctttgctaccactggctacggcatcgccatgcagaaggactcccactggaagcgggccatagacctggcgctcttgcagttcctgggggacggagagacacagaaactggagacagtgtggctctcagggatctgccagaatgagaagaacgaggtgatgagcagcaagctggacatcgacaacatggcaggcgtcttctacatgctgctggtggccatggggctggccctgctggtcttcgcctgggagcacctggtctactggaagctgcgccactcggtgcccaactcatcccagctggacttcctgctggctttcagcagggtgggtgcccacccctccccacacaggccaaagttttaagggcacctacccagataagtccgggctggccatggcccatttccagaggtaaaaccaaggttctggcccggctcatggctcacacctgtaatctcaacactttgagaggcttaggccagtggatcccttgagtccagaagtttgagaccagcctgggcaacatggcgaaaacccatctctacagaaaataaaagaattagctggg

SEQ ID NO: 26857 - protein, 873 aa, Homo sapiens
MGGALGPALLLTSLFGAWAGLGPGQGEQGMTVAVVFSSSGPPQAQFRARLTPQSFLDLPLEIQPLTVGVNTTNPSSLLTQICGLLGAAHVHGIVFEDNVDTEAVAQILDFISSQTHVPILSISGGSAVVLTPKEPGSAFLQLGVSLEQQLQVLFKVLEEYDWSAFAVITSLHPGHALFLEGVRAVADASHVSWRLLDVVTLELGPGGPRARTQRLLRQLDAPVFVAYCSREEAEVLFAEAAQAGLVGPGHVWLVPNLALGSTDAPPATFPVGLISVVTESWRLSLRQKVRDGVAILALGAHSYWRQHGTLPAPAGDCRVHPGPVSPAREAFYRHLLNVTWEGRDFSFSPGGYLVQPTMVVIALNRHRLWEMVGRWEHGVLYMKYPVWPRYSASLQPVVDSRHLTVATLEERPFVIVESPDPGTGGCVPNTVPCRRQSNHTFSSGDVAPYTKLCCKGFCIDILKKLARVVKFSYDLYLVTNGKHGKRVRGVWNGMIGEVYYKRADMAIGSLTINEERSEIVDFSVPFVETGISVMVARSNGTVSPSAFLEPYSPAVWVMMFVMCLTVVAITVFMFEYFSPVSYNQNLTRGKKSGGPAFTIGKSVWLLWALVFNNSVPIENPRGTTSKIMVLVWAFFAVIFLASYTANLAAFMIQEQYIDTVSGLSDKKFQRPQDQYPPFRFGTVPNGSTERNIRSNYRDMHTHMVKFNQRSVEDALTSLKMGKLDAFIYDAAVLNYMAGKDEGCKLVTIGSGKVFATTGYGIAMQKDSHWKRAIDLALLQFLGDGETQKLETVWLSGICQNEKNEVMSSKLDIDNMAGVFYMLLVAMGLALLVFAWEHLVYWKLRHSVPNSSQLDFLLAFSRVGAHPSPHRPKF

SEQ ID NO: 26858 - DNA, 501 bp, Homo sapiens
tacaagcgggcagacatggccatcggctccctcaccatcaatgaggaacgctccgagatcgtagacttctctgtaccctttgtggagacgggcatcagtgtgatggtggctcgcagcaatggcaccgtctccccctcggccttcttggagccatatagccctgcagtgtgggtgatgatgtttgtcatgtgcctcactgtggtggccatcaccgtcttcatgttcgagtacttcagccctgtcagctacaaccagaacctcaccagaggcaagaagtccgggggcccagctttcactatcggcaagtccgtgtggctgctgtgggcgctggtcttcaacaactcagtgcccatcgagaacccgcggggcaccaccagcaagatcatggttctggtctgggccttctttgctgtcatcttcctcgccagctacacggccaacctggccgccttcatgatccaagagcaatacatcgacactgtgtcgggcctcagtgacaag

SEQ ID NO: 26859 - protein, 161 aa, Homo sapiens
MAIGSLTINEERSEIVDFSVPFVETGISVMVARSNGTVSPSAFLEPYSPAVWVMMFVMCLTVVAITVFMFEYFSPVSYNQNLTRGKKSGGPAFTIGKSVWLLWALVFNNSVPIENPRGTTSKIMVLVWAFFAVIFLASYTANLAAFMIQEQYIDTVSGLSD

SEQ ID NO: 26860 - DNA, 351 bp, Homo sapiens
cgcgggtgacggtggctctcgctgctcgcgccccctcctcccgcggggggagcctgatgccacgttccctatgaattatttatcgccggcctaaaaataccccgaacttcacagcccgagtgtggggcgctgggagcatggcgtcctatacatgaagtaccccgtgtggcctcgctacagtgcctctctgcagcctgtggtggacagtcggcacctgacggtggccacgctggaagagcggccctttgtcatcgtggagagccctgaccctggcacaggaggctgtgtccccaacaccgtgccctgccgcaggcagagcaaccacaccttcagcagcggggacgtggcccc

SEQ ID NO: 26861 - protein, 65 aa, Homo sapiens
MKYPVWPRYSASLQPVVDSRHLTVATLEERPFVIVESPDPGTGGCVPNTVPCRRQSNHTFSSGDV

SEQ ID NO: 26862 - DNA, 1971 bp, Homo sapiens
gcgagtcccgcttcttccccttccagctctgccccatctcctttgccccagcctagctctctccttcctgcgacctgggagaatcggagtgggcttccagagtagtggcatcttgcagatgctggcccgtgcccggctcccgggcttccagagcgcaaagggaagggtaggcagagagggcactgggcgagcaagacctggcgctgggccctggctgcgcaccagccgcctgcgccggtctctgggggcttcgcccaggatccccgacggcggggaggggaagccccgagtctcctgtttcctgcctacgcgggcagggcggggacacgcggagcaaaggcacccggcaacctgaacccccaggtgcgtcccgcgaccctgcaaggagctgctgggaccctccggtggacatgggtggggccctggggccggccctgttgctcacctcgctcttcggtgcctgggcagggctgggtccggggcagggcgagcagggcatgacggtggctgtggtgtttagcagctcagggccgccccaggcccagttccgtgcccgcctcaccccccagagcttcctggacctacccctggagatccagccgctcacagttggggtcaacaccaccaaccccagcagcctcctcacccagatctgcggcctcctgggtgctgcccacgtccacggcattgtctttgaggacaacgtggacaccgaggcggtggcccagatccttgacttcatctcctcccagacccatgtgcccatcctcagcatcagcggaggctctgctgtggtcctcacccccaaggtgcatgtccaaactcatgtcccctcgtgcctcaggcctggaaccaggctggggtcgggggtgctttggttctgggaagctgggattagacgggatgggcagggaggtgggggctgagggcatgatgtgggtgatggggagatggttatgggaatgacatcccatgttctagaggagagatattctgggctgacctcacattgtgtctggatgaggggtgggcagggtgcaggcccaccctctggctgtggggctcaggccccagccctcctcctctctgcttccctcagcttcctaggtcagggtgaagacccagagggccagccgggcatggaggtggtgccatgccctctgggcagtggtagttgacctgtagggtgagcaccagggaaccctgggagccctgggggaggcagaaacggccctgcccttgcagggctcaggggagaacgttccaaacacacattcatcagcagttacaactaggacaagcgttctgaaggaaagacacaggatgctgtgagggagctcactcatggctcatgcatagggtgttggccagggaaagtctctggagaaatgatgtctaggctgagggcctaagggcgagccggtggggagggggagaggcccaggcagagaagcaggtgggatgaaggtcccaaggcgaggaaggagctcagagctttggaggaatagagggaaaagcctggagaaggaggcgggggcctggccacctgggaagacatttgggcttttccctaagcaagtgagcagacagggcagcgcaagccggctgtgacagtggccgtggtctgtgcctgccttagccctgtgagcttcctggccctgcccctgttgatctagccactcagggaagagcggaggagagttgagggaagagactgatctgattcgcctttgtttcattaatttttatatgaagaattttgagtatacattaaaaagtataaggaagactcatatatcccccattcgccctggccatccaccccagcctcaccagcacccccttccccttcttctgtgttaatttgaatcaaagcccaggcatcctcttattccatccataaatatttcagtatgtatccctggcagataagggcttaagaacgtaaaaccaccatacattatcacgtct

SEQ ID NO: 26863 - protein, 171 aa, Homo sapiens
MGGALGPALLLTSLFGAWAGLGPGQGEQGMTVAVVFSSSGPPQAQFRARLTPQSFLDLPLEIQPLTVGVNTTNPSSLLTQICGLLGAAHVHGIVFEDNVDTEAVAQILDFISSQTHVPILSISGGSAVVLTPKVHVQTHVPSCLRPGTRLGSGVLWFWEAGIRRDGQGGGG

SEQ ID NO: 26864 - DNA, 2163 bp, Homo sapiens
acagatccacttgcaggttgctgttcccagccatggcttcgcgctgctggcgctggtggggctggtcggcgtggcctcggacccggctgcctcccgccgggagcaccccgagtaggagcagggcgcctttggggctggatgggagcgcggggaggcctgcgagcgctgagtaggggtcggagcagagctggggcagggctggagaagggcttctgccaccatttctccacacaggagaagaccccccagatctgtgtggtgggcagtggcccagctggcttctacacggcccaacacctgctaaagggagctccaagctactggctgtgctcctaagacaggaccacatgcagcacgtttgggacagtggcccttagcttgagtcaggcactgagcacagcatctcgtagcatcctcatgacaacctgcaaagcaggtgtcgtgcctcttgcttcacagcagcacccccaggcccacgtggacatctacgagaaacagcctgtgccctttggcctggtgcgctttggtgtggcgcctgatcaccccgaggtgaagaatgtcatcaacacatttacccagacggcccattctggccgctgtgccttctggggcaacgtggaggtgggcagggacgtgacggtgccggagctgcgggaggcctaccacgctgtggtgctgagctacggggcagaggaccatcgggccctggaaattcctggtgaggagctgccaggtgtgtgctccgcccgggccttcgtgggctggtacaacgggcttcctgagaaccaggagctggagccagacctgagctgtgacacagccgtgattctggggcaggggaacgtggctctggacgtggcccgcatcctactgaccccacctgagcacctggagagaacggacatcacgaaggcagccctgggtgtactgaggcagagtcgagtgaagacagtgtggctagtgggccggcgtggacccctgcaagtggccttcaccattaaggagcttcgggagatgattcagttaccgggagcccggcccattttggatcctgtggatttcttgggtctccaggacaagatcaaggaggtcccccgcccgaggaagcggctgacggaactgctgcttcgaacggccacagagaagccagggccggcggaagctgcccgccaggcatcggcctcccgtgcctggggcctccgctttttccgaagcccccagcaggtgctgccctcaccagatgggcggcgggcagcaggtgtccgcctagcagtcactagactggaggtgagtctcatgtttctcaaagacacccccttcccaggcctctgccacccgcctggtgttgcccacactctccccaacagggtgtcgatgaggccacccgtgcagtgcccacgggagacatggaagacctcccttgtgggctggtgctcagcagcattgggtataagagccgccctgtcgacccaagcgtgccctttgactccaagcttggggtcatccccaatgtggagggccgggttatggatgtgccaggcctctactgcagcggctgggtgaagagaggacctacaggtgtcatagccacaaccatgactgacagcttcctcaccggccagatgctgctgcaggacctgaaggctgggttgctcccctctggccccaggcctggctacgcagccatccaggccctgctcagcagccgaggggtccggccagtctctttctcagactgggagaagctggatgccgaggaggtggcccggggccagggcacggggaagcccagggagaagctggtggatcctcaggagatgctgcgcctcctgggccactgagcccagccccagccccggcccccagcagggaagggatgagtgttgggaggggaagggctgggtccgtctgagtgggactttgcacctctgctgatcccggccggccctggcttggaggcttggctgctcttccagcgtctctcctccctcctggggaaggtcgcccttgcgcgcaaggttttagctttcagcaactgaggtaaccttagggacaggtggaggtgtgggccgatctaaccccttacccatctctctactgctggactgtggagggtcaccaggttgggaacatgctggaaataaaacagctgcaaccaagagc

SEQ ID NO: 26865 - protein, 381 aa, Homo sapiens [sequence omitted]

SEQ ID NO: 26866 - DNA, 2483 bp, Homo sapiens
cgggcttgccctgcggagcagtagctaggaacagatccacttgcaggttgctgttcccagccatggcttcgcgctgctggcgctggtggggctggtcggcgtggcctcggacccggctgcctcccgccgggagcaccccgagtaggagcagggcgcctttggggctggatgggagcgcggggaggcctgcgagcgctgagtaggggtcggagcagagctggggcagggctggagaagggtgagactgaaggggtgtcttcctgctggcgagatcccggtggtgtacgggggtgggcggagatctgtgcgtgagatgtgaggcttctagggttagagacggaggtcaacaaaggtgaaaaggagagactttgagatctacaggtgtgagacggggtgaatggaggatgatacggaggtctgtggggcgagaggaaagtctgagtcgaaacagggatctgtaggaataagacgggtctatatgggcaatatagcgttttgtggagagagagaggggttagaggagggacaccgtggggagacccacgggggcgagattgggatgatatggaggccgttggaaggatgtgggattctagccgattggatagggaatgaagtgttgttgggcaggccattggcagtggtgtagtaggttcatgggtgagatgtgggctctggatgaacccacagcctttgggggttcagatgaagtaagagaccctgcaaatgccaaagccttgaggaacaagagaaggaggatgcaggcttctgccaccatttctccacacaggagaagaccccccagatctgtgtggtgggcagtggcccagctggcttctacacggcccaacacctgctaaagcacccccaggcccacgtggacatctacgagaaacagcctgtgccctttggcctggtgcgctttggtgtggcgcctgatcaccccgaggtgaagaatgtcatcaacacatttacccagacggcccattctggccgctgtgccttctggggcaacgtggaggtgggcagggacgtgacggtgccggagctgcgggaggcctaccacgctgtggtgctgagctacggggcagaggaccatcgggccctggaaattcctggtgaggagctgccaggtgtgtgctccgcccgggccttcgtgggctggtacaacgggcttcctgagaaccaggagctggagccagacctgagctgtgacacagccgtgattctggggcaggggaacgtggctctggacgtggcccgcatcctactgaccccacctgagcacctggagagaacggacatcacgaaggcagccctgggtgtactgaggcagagtcgagtgaagacagtgtggctagtgggccggcgtggacccctgcaagtggccttcaccattaaggagcttcgggagatgattcagttaccgggagcccggcccattttggatcctgtggatttcttgggtctccaggacaagatcaaggaggtcccccgcccgaggaagcggctgacggaactgctgcttcgaacggccacagagaagccagggccggcggaagctgcccgccaggcatcggcctcccgtgcctggggcctccgctttttccgaagcccccagcaggtgctgccctcaccagatgggcggcgggcagcaggtgtccgcctagcagtcactagactggagggtgtcgatgaggccacccgtgcagtgcccacgggagacatggaagacctcccttgtgggctggtgctcagcagcattgggtataagagccgccctgtcgacccaagcgtgccctttgactccaagcttggggtcatccccaatgtggagggccgggttatggatgtgccaggcctctactgcagcggctgggtgaagagaggacctacaggtgtcatagccacaaccatgactgacagcttcctcaccggccagatgctgctgcaggacctgaaggctgggttgctcccctctggccccaggcctggctacgcagccatccaggccctgctcagcagccgaggggtccggccagtctctttctcagactgggagaagctggatgccgaggaggtggcccggggccagggcacggggaagcccagggagaagctggtggatcctcaggagatgctgcgcctcctgggccactgagcccagccccagccccggcccccagcagggaagggatgagtgttgggaggggaagggctgggtccgtctgagtgggactttgcacctctgctgatcccggccggccctggcttggaggcttggctgctcttccagcgtctctcctccctcctggggaaggtcgcccttgcgcgcaaggttttagctttcagcaactgaggtaaccttagggacaggtggaggtgtgggccgatctaaccccttacccatctctctactgctggactgtggagggtcaccaggttgggaacatgctggaaataaaacagctgcaaccaagagc

SEQ ID NO: 26867 - protein, 248 aa, Homo sapiens
MIQLPGARPILDPVDFLGLQDKIKEVPRPRKRLTELLLRTATEKPGPAEAARQASASRAWGLRFFRSPQQVLPSPDGRRAAGVRLAVTRLEGVDEATRAVPTGDMEDLPCGLVLSSIGYKSRPVDPSVPFDSKLGVIPNVEGRVMDVPGLYCSGWVKRGPTGVIATTMTDSFLTGQMLLQDLKAGLLPSGPRPGYAAIQALLSSRGVRPVSFSDWEKLDAEEVARGQGTGKPREKLVDPQEMLRLLGH

SEQ ID NO: 26868 - DNA, 1871 bp, Homo sapiens
ccgggcaggagcgggcttgccctgcggagcagtagctaggaacagatccacttgcaggttgctgttcccagccatggcttcgcgctgctggcgctggtggggctggtcggcgtggcctcggacccggctgcctcccgccgggagcaccccgagcttctgccaccatttctccacacaggagaagaccccccagatctgtgtggtgggcagtggcccagctggcttctacacggcccaacacctgctaaagcacccccaggcccacgtggacatctacgagaaacagcctgtgccctttggcctggtgcgctttggtgtggcgcctgatcaccccgaggtgaagaatgtcatcaacacatttacccagacggcccattctggccgctgtgccttctggggcaacgtggaggtgggcagggacgtgacggtgccggagctgcgggaggcctaccacgctgtggtgctgagctacggggcagaggaccatcgggccctggaaattcctggtgaggagctgccaggtgtgtgctccgcccgggccttcgtgggctggtacaacgggcttcctgagaaccaggagctggagccagacctgagctgtgacacagccgtgattctggggcaggggaacgtggctctggacgtggcccgcatcctactgaccccacctgagcacctggagagaacggacatcacgaaggcagccctgggtgtactgaggcagagtcgagtgaagacagtgtggctagtgggccggcgtggacccctgcaagtggccttcaccattaaggagcttcgggagatgattcagttaccgggagcccggcccattttggatcctgtggatttcttgggtctccaggacaagatcaaggaggtcccccgcccgaggaagcggctgacggaactgctgcttcgaacggccacagagaagccagggccggcggaagctgcccgccaggcatcggcctcccgtgcctggggcctccgctttttccgaagcccccagcaggtgctgccctcaccagatgggcggcgggcagcaggtgtccgcctagcagtcactagactggagggtgtcgatgaggccacccgtgcagtgcccacgggagacatggaagacctcccttgtgggctggtgctcagcagcattgggtataagagccgccctgtcgacccaagcgtgccctttgactccaagcttggggtcatccccaatgtggagggccgggttatggatgtgccaggcctctactgcagcggctgggtgaagagaggacctacaggtgtcatagccacaaccatgactgacagcttcctcaccggccagatgctgctgcaggacctgaaggctgggttgctcccctctggccccaggcctggctacgcagccatccaggccctgctcagcagccgaggggtccggccagtctctttctcagactgggagaagctggatgccgaggaggtggcccggggccagggcacggggaagcccagggagaagctggtggatcctcaggagatgctgcgcctcctgggccactgagcccagccccagccccggcccccagcagggaagggatgagtgttgggaggggaagggctgggtccgtctgagtgggactttgcacctctgctgatcccggccggccctggcttggaggcttggctgctcttccagcgtctctcctccctcctggggaaggtcgcccttgcgcgcaaggttttagctttcagcaactgaggtaaccttagggacaggtggaggtgtgggccgatctaaccccttacccatctctctactgctggactgtggagggtcaccaggttgggaacatgctggaaataaaacagctgcaaccaagagc

SEQ ID NO: 26869 - protein, 491 aa, Homo sapiens
MASRCWRWWGWSAWPRTRLPPAGSTPSFCHHFSTQEKTPQICVVGSGPAGFYTAQHLLKHPQAHVDIYEKQPVPFGLVRFGVAPDHPEVKNVINTFTQTAHSGRCAFWGNVEVGRDVTVPELREAYHAVVLSYGAEDHRALEIPGEELPGVCSARAFVGWYNGLPENQELEPDLSCDTAVILGQGNVALDVARILLTPPEHLERTDITKAALGVLRQSRVKTVWLVGRRGPLQVAFTIKELREMIQLPGARPILDPVDFLGLQDKIKEVPRPRKRLTELLLRTATEKPGPAEAARQASASRAWGLRFFRSPQQVLPSPDGRRAAGVRLAVTRLEGVDEATRAVPTGDMEDLPCGLVLSSIGYKSRPVDPSVPFDSKLGVIPNVEGRVMDVPGLYCSGWVKRGPTGVIATTMTDSFLTGQMLLQDLKAGLLPSGPRPGYAAIQALLSSRGVRPVSFSDWEKLDAEEVARGQGTGKPREKLVDPQEMLRLLGH

SEQ ID NO: 26870 - DNA, 1614 bp, Homo sapiens
ccgggcaggagcgggcttgccctgcggagcagtagctaggaacagatccacttgcaggttgctgttcccagccatggcttcgcgctgctggcgctggtggggctggtcggcgtggcctcggacccggctgcctcccgccgggagcaccccgagcttctgccaccatttctccacacaggagaagaccccccagatctgtgtggtgggcagtggcccagctggcttctacacggcccaacacctgctaaagcacccccaggcccacgtggacatctacgagaaacagcctgtgccctttggcctggtgcgctttggtgtggcgcctgatcaccccgaggtgaagaatgtcatcaacacatttacccagacggcccattctggccgctgtgccttctggggcaacgtggaggtgggcagggacgtgacggtgccggagctgcgggaggcctaccacgctgtggtgctgagctacggggcagaggaccatcgggccctggaaattcctggtgaggagctgccaggtgtgtgctccgcccgggccttcgtgggctggtacaacgggcttcctgagaaccaggagctggagccagacctgagctgtgacacagccgtgattctggggcaggggaacgtggctctggacgtggcccgcatcctactgaccccacctgagcacctggagagaacggacatcacgaaggcagccctgggtgtactgaggcagagtcgagtgaagacagtgtggctagtgggccggcgtggacccctgcaagtggccttcaccattaagaggtcccccgcccgaggaagcggctgacggaactgctgcttcgaacggccacagagaagccagggccggcggaagctgcccgccaggcatcggcctcccgtgcctggggcctccgctttttccgaagcccccagcaggtgctgccctcaccagatgggcggcgggcagcaggtgtccgcctagcagtcactagactggaggcctctactgcagcggctgggtgaagagaggacctacaggtgtcatagccacaaccatgactgacagcttcctcaccggccagatgctgctgcaggacctgaaggctgggttgctcccctctggccccaggcctggctacgcagccatccaggccctgctcagcagccgaggggtccggccagtctctttctcagactgggagaagctggatgccgaggaggtggcccggggccagggcacggggaagcccagggagaagctggtggatcctcaggagatgctgcgcctcctgggccactgagcccagccccagccccggcccccagcagggaagggatgagtgttgggaggggaagggctgggtccgtctgagtgggactttgcacctctgctgatcccggccggccctggcttggaggcttggctgctcttccagcgtctctcctccctcctggggaaggtcgcccttgcgcgcaaggttttagctttcagcaactgaggtaaccttagggacaggtggaggtgtgggccgatctaaccccttacccatctctctactgctggactgtggagggtcaccaggttgggaacatgctggaaataaaacagctgcaaccaagagc

SEQ ID NO: 26871 - protein, 247 aa, Homo sapiens
MASRCWRWWGWSAWPRTRLPPAGSTPSFCHHFSTQEKTPQICVVGSGPAGFYTAQHLLKHPQAHVDIYEKQPVPFGLVRFGVAPDHPEVKNVINTFTQTAHSGRCAFWGNVEVGRDVTVPELREAYHAVVLSYGAEDHRALEIPGEELPGVCSARAFVGWYNGLPENQELEPDLSCDTAVILGQGNVALDVARILLTPPEHLERTDITKAALGVLRQSRVKTVWLVGRRGPLQVAFTIKRSPARGSG

SEQ ID NO: 26872 - DNA, 1190 bp, Homo sapiens
attccaggtgaccaaactgggaagaaagctatcagcaccaactcagaactctccaccttcagatcagacatacagatatataggccaactattagtaataatatgaaatatacttaaagagcttttaaaactttgtatttttgtacaaaatatttgtcttttacaatttttttcctttttttttttttgtcattttaccgacataatacatggagccaaagaaaacaataatggtactaataaaaactcctagggtttcctgtcagatttaattctacccagtggcaaagaattttttcaattgtggctttaaaaaaataattaaatatacatgtgtatatatatatatatatatatatttttttttttttttttttttaatgtttcatttcctcagaggaaccaatcacttggaatgtctagaaatatccttgcagattttgccagtgtcaatcaagcctgcacacatgcacagtgaagcgggctgtgcctgccttgagcccatcaccagccaacattcttgacgtgtgcctgaccagacacagaagaaatgggcaactcaagacgtgcttccacttcattttggtggagtcgggaggtgtgggggatggagaggcatctgttgggaagggcactgaatctggcctatctggaaggccctgtgtcatggctgagctatgactgtacttggcatcagatccctacagagccaacattaactgtcaggaacgtatggcgtcacatcagccaaaggcagagatgctagaaagatgggaaccggctacgtgttacctggaaagtttgttttcttaagtcatattccaaaaacataactccaaggcatacgcatgataaaatgcaagaataaacttttggccactttgtggaactcttaaaagaacctttccagccgggcgcagtggctcatgcctgtaatcccagcactttgggaggccgaggcaggcagatgacttgaggtcaggagttcgagaccagcctggccaacgtggcaaaaccccatctctactaaaaataagaaaattagccgggtgtagtggcacatgcctgtaatcccagctactcaggaggctgaggcaggagaatcgcttgagcccaggaggcagagattgcagtgagccaagatcgcaccactgcactccagcctcggtgacagagcaagactccatctc

SEQ ID NO: 26873 - protein, 71 aa, Homo sapiens
MGNSRRASTSFWWSREVWGMERHLLGRALNLAYLEGPVSWLSYDCTWHQIPTEPTLTVRNVWRHISQRQRC

SEQ ID NO: 26874 - DNA, 5577 bp, Homo sapiens
gagagcggcgcgcgcggcagccccgaggcagcagagcgcggagccgggagcgcggggagcgcgggccggcggcggcgagggaggacgggggcgcagacggccggcgcgcggcgcggctaccatgggcgtgcggtgagcagccgctcgggacgacttcctcggctgcgcggcgctcgcgcggagctccccggccggcggtgcgtccccacggtcaccatgaaagacgacttcgcagaggaggaggaggtgcaatccttcggttacaagcggtttggtattcaggaaggaacacaatgtaccaaatgtaaaaataactgggcactgaagttttctatcatattattatacattttgtgtgccttgctaacaatcacagtagccattttgggatataaagttgtagagaaaatggacaatgtcacaggtggcatggaaacatctcgccaaacctatgatgacaagctcacagcagtggaaagtgacctgaaaaaattaggtgaccaaactgggaagaaagctatcagcaccaactcagaactctccaccttcagatcagacattctagatctccgtcagcaacttcgtgagattacagaaaaaaccagcaagaacaaggatacgctggagaagttacaggcgagcggggatgctctggtggacaggcagagtcaattgaaagaaactttggagaataactctttcctcatcaccactgtaaacaaaaccctccaggcgtataatggctatgtcacgaatctgcagcaagataccagcgtgctccagggcaatctgcagaaccaaatgtattctcataatgtggtcatcatgaacctcaacaacctgaacctgacccaggtgcagcagaggaacctcatcacgaatctgcagcggtctgtggatgacacaagccaggctatccagcgaatcaagaacgactttcaaaatctgcagcaggtttttcttcaagccaagaaggacacggattggctgaaggagaaagtgcagagcttgcagacgctggctgccaacaactctgcgttggccaaagccaacaacgacaccctggaggatatgaacagccagctcaactcattcacaggtcagatggagaacatcaccactatctctcaagccaacgagcagaacctgaaagacctgcaggacttacacaaagatgcagagaatagaacagccatcaagttcaaccaactggaggaacgcttccagctctttgagacggatattgtgaacatcattagcaatatcagttacacagcccaccacctgcggacgctgaccagcaatctaaatgaagtcaggaccacttgcacagatacccttaccaaacacacagatgatctgacctccttgaataataccctggccaacatccgtttggattctgtttctctcaggatgcaacaagatttgatgaggtcgaggttagacactgaagtagccaacttatcagtgattatggaagaaatgaagctagtagactccaagcatggtcagctcatcaagaattttacaatactacaaggtccaccgggccccaggggtccaagaggtgacagaggatcccagggaccccctggcccaactggcaacaagggacagaaaggagagaagggggagcctggaccacctggccctgcgggtgagagaggcccaattggaccagctggtccccccggagagcgtggcggcaaaggatctaaaggctcccagggccccaaaggctcccgtggttcccctgggaagcccggccctcagggctccagtggggacccaggccccccgggcccaccaggcaaagagggactccccggccctcagggccctcctggcttccagggacttcagggcaccgttggggagcctggggtgcctggacctcggggactgccaggcttgcctggggtaccaggcatgccaggccccaagggcccccccggccctcctggcccatcaggagcggtggtgcccctggccctgcagaatgagccaaccccagcaccggaggacaatggtaagtccaagccctccctccagccagggggacagggcagtgcatgtgcttgagactgagccaacccccagtgtgtggccccacccatgttatttttgtttttgtttttgttttgagacagggtctcactctgttgcccaggctggagtgcagtggcgtgatctcggctcactgcaacctccacatcccgggttcaagtgattctcctgccttagcctcccaggtagctgggactacaagcgtgtgcccccacagccagctaatttttgtatttttagtagagagggggtttcaccgtgttggccaggctggtctcaaactcctggcctcaagtgatccacctaccttagtctcccaaagtgctgggattacaggtgtgagccaccacgtcttgtcccccgctgcatattatttaacagcaaaggcatcataggggctggcacaggagccctgctgccagaacaggcctccataccaggcatgtgtttctctctaaacgccattgggttctctagtgctcatttgttttatgtattatgtgtgtatgtatgggacagggtctcactctgtcacccaggctggaatgacgaagtgaagtagtgcaaacatagctcactgcagctttgacctcctgggcttaggtgatcttcccactcagactcctgcgtagctgggaccacaggggtatgccaccacacctggctaattttttattttcctttttgtagagacagggtcttgctatgttgcccaggctggtcttgaactcctggcctcaagcaaccctcctgcctcagtcttgcaaagtgctgggattccaggtgggagccactgcacctggctcttgcacttgtttatttataggagccagccctcagaagacaaacacaatgcaaaacatttccttcagggaagcctgctggccgccctgagcgctcttccctcgttttacatcctcactctggagatagatgggctccctcggttagctccatcaacatgtggatggaaccctctgctattgatgactacatttaatttctttttgagaaaggtgttagatgttacggtgccttctagtcttttgataattaaacctttggcaaaactcgaatgtttggttagcaaccaagcctatttttctctcctttgacccaaccgctattctacttgattttggtcggtgaggcccgggttatttttgttgatccgtgagcccagttttggtgctgggttctcacatccaagtgttcctgggttccgtatgattccagactgacgctgaacatctgtgcctgccctgcttcttgttgttgcttctgttatttctgtcattgtgaagacggatccagacacagaagaacaaagacccagtcaaagatcttttccagattatgtggttttggcttgtgctctgcagtccactttgggtcatgcttgctgcgagcacgtccgtgaacgtcagctgtgggcctcgtgcagggacgctcaggctgctcccagcgggaccacagttttggcctctgaaacacagctgaagaaaggcagagtgctttctgtgatcttttaatcaatgttttccacttttgcattcctaggctgcccgcctcactggaagaacttcacagacaaatgctactatttttcagttgagaaagaaatttttgaggatgcaaagcttttctgtgaagacaagtcttcacatcttgttttcataaacactagagaggaacagcaatggataaaaaaacagatggtagggagagagagccactggatcggcctcacagactcagagcgtgaaaatgaatggaagtggctggatgggacatctccagactacaaaaattggaaagctggacagccggataactggggtcatggccatgggccaggagaagactgtgctgggttgatttatgctgggcagtggaacgatttccaatgtgaagacgtcaataacttcatttgcgaaaaagacagggagacagtactgtcatctgcattataacggactgtgatgggatcacatgagcaaattttcagctctcaaaggcaaaggacactcctttctaattgcatcaccttctcatcagattgaaaaaaaaaaagcactgaaaaccaattactgaaaaaaaattgacagctagtgttttttaccatccgtcattacccaaagacttgggaactaaaatgttccccagggtgatatgctgattttcattgtgcacatggactgaatcacatagattctcctccgtcagtaaccgtgcgattatacaaattatgtcttccaaagtatggaacactccaatcagaaaaaggttatcattggtcgttgagttatgggaagaacttaagcatatactgtgtaaacagtgccatacatttctaaaatcccaagtgtaggaaaaatatgcagacatacagatatataggccaactattagtaataatatgaaatatacttaaagagcttttaaaactttgtatttttgtacaaaatatttgtcttttacaatttttttcctttttttttttttgtcattttaccgacataatacatggagccaaagaaaacaataatggtactaataaaaactcctagggtttcctgtcagatttaattctacccagtggcaaagaattttttcaattgtggctttaaaaaaataattaaatatacatgtgtatatatatatatatatatatatttttttttttttttttttttaatgtttcatttcctcagaggaaccaatcacttggaatgtctagaaatatccttgcagattttgccagtgtcaatcaagcctgcacacatgcacagtgaagcgggctgtgcctgccttgagcccatcaccagccaacattcttgacgtgtgcctgaccagacacagaagaaatgggcaactcaagacgtgcttccacttcattttggtggagtcgggaggtgtgggggatggagaggcatctgttgggaagggcactgaatctggcctatctggaaggccctgtgtcatggctgagctatgactgtacttggcatcagatccctacagagccaacattaactgtcaggaacgtatggcgtcacatcagccaaaggcagagatgctagaaagatgggaaccggctacgtgttacctggaaagtttgttttcttaagtcatattccaaaaacataactccaaggcatacgcatgataaaatgcaagaataaacttttggccactttgtggaactcttaaaagaacctttccagccgggcgcagtggctcatgcctgtaatcccagcactttgggaggccgaggcaggcagatgacttgaggtcaggagttcgagaccagcctggccaacgtggcaaaaccccatctctactaaaaataagaaaattagccgggtgtagtggcacatgcctgtaatcccagctactcaggaggctgaggcaggagaatcgcttgagcccaggaggcagagattgcagtgagccaagatcgcaccactgcactccagcctcggtgacagagcaagactccatctc

SEQ ID NO: 26875 - protein, 622 aa, Homo sapiens
MKDDFAEEEEVQSFGYKRFGIQEGTQCTKCKNNWALKFSIILLYILCALLTITVAILGYKVVEKMDNVTGGMETSRQTYDDKLTAVESDLKKLGDQTGKKAISTNSELSTFRSDILDLRQQLREITEKTSKNKDTLEKLQASGDALVDRQSQLKETLENNSFLITTVNKTLQAYNGYVTNLQQDTSVLQGNLQNQMYSHNVVIMNLNNLNLTQVQQRNLITNLQRSVDDTSQAIQRIKNDFQNLQQVFLQAKKDTDWLKEKVQSLQTLAANNSALAKANNDTLEDMNSQLNSFTGQMENITTISQANEQNLKDLQDLHKDAENRTAIKFNQLEERFQLFETDIVNIISNISYTAHHLRTLTSNLNEVRTTCTDTLTKHTDDLTSLNNTLANIRLDSVSLRMQQDLMRSRLDTEVANLSVIMEEMKLVDSKHGQLIKNFTILQGPPGPRGPRGDRGSQGPPGPTGNKGQKGEKGEPGPPGPAGERGPIGPAGPPGERGGKGSKGSQGPKGSRGSPGKPGPQGSSGDPGPPGPPGKEGLPGPQGPPGFQGLQGTVGEPGVPGPRGLPGLPGVPGMPGPKGPPGPPGPSGAVVPLALQNEPTPAPEDNGKSKPSLQPGGQGSACA

SEQ ID NO: 26876 - DNA, 3979 bp, Homo sapiens
gagagcggcgcgcgcggcagccccgaggcagcagagcgcggagccgggagcgcggggagcgcgggccggcggcggcgagggaggacgggggcgcagacggccggcgcgcggcgcggctaccatgggcgtgcggtgagcagccgctcgggacgacttcctcggctgcgcggcgctcgcgcggagctccccggccggcggtgcgtccccacggtcaccatgaaagacgacttcgcagaggaggaggaggtgcaatccttcggttacaagcggtttggtattcaggaaggaacacaatgtaccaaatgtaaaaataactgggcactgaagttttctatcatattattatacattttgtgtgccttgctaacaatcacagtagccattttgggatataaagttgtagagaaaatggacaatgtcacaggtggcatggaaacatctcgccaaacctatgatgacaagctcacagcagtggaaagtgacctgaaaaaattaggtgaccaaactgggaagaaagctatcagcaccaactcagaactctccaccttcagatcagacattctagatctccgtcagcaacttcgtgagattacagaaaaaaccagcaagaacaaggatacgctggagaagttacaggcgagcggggatgctctggtggacaggcagagtcaattgaaagaaactttggagaataactctttcctcatcaccactgtaaacaaaaccctccaggcgtataatggctatgtcacgaatctgcagcaagataccagcgtgctccagggcaatctgcagaaccaaatgtattctcataatgtggtcatcatgaacctcaacaacctgaacctgacccaggtgcagcagaggaacctcatcacgaatctgcagcggtctgtggatgacacaagccaggctatccagcgaatcaagaacgactttcaaaatctgcagcaggtttttcttcaagccaagaaggacacggattggctgaaggagaaagtgcagagcttgcagacgctggctgccaacaactctgcgttggccaaagccaacaacgacaccctggaggatatgaacagccagctcaactcattcacaggtcagatggagaacatcaccactatctctcaagccaacgagcagaacctgaaagacctgcaggacttacacaaagatgcagagaatagaacagccatcaagttcaaccaactggaggaacgcttccagctctttgagacggatattgtgaacatcattagcaatatcagttacacagcccaccacctgcggacgctgaccagcaatctaaatgaagtcaggaccacttgcacagatacccttaccaaacacacagatgatctgacctccttgaataataccctggccaacatccgtttggattctgtttctctcaggatgcaacaagatttgatgaggtcgaggttagacactgaagtagccaacttatcagtgattatggaagaaatgaagctagtagactccaagcatggtcagctcatcaagaattttacaatactacaaggtccaccgggccccaggggtccaagaggtgacagaggatcccagggaccccctggcccaactggcaacaagggacagaaaggagagaagggggagcctggaccacctggccctgcgggtgagagaggcccaattggaccagctggtccccccggagagcgtggcggcaaaggatctaaaggctcccagggccccaaaggctcccgtggttcccctgggaagcccggccctcagggctccagtggggacccaggccccccgggcccaccaggcaaagagggactccccggccctcagggccctcctggcttccagggacttcagggcaccgttggggagcctggggtgcctggacctcggggactgccaggcttgcctggggtaccaggcatgccaggccccaagggcccccccggccctcctggcccatcaggagcggtggtgcccctggccctgcagaatgagccaaccccagcaccggaggacaatggctgcccgcctcactggaagaacttcacagacaaatgctactatttttcagttgagaaagaaatttttgaggatgcaaagcttttctgtgaagacaagtcttcacatcttgttttcataaacactagagaggaacagcaatggataaaaaaacagatggtagggagagagagccactggatcggcctcacagactcagagcgtgaaaatgaatggaagtggctggatgggacatctccagactacaaaaattggaaagctggacagccggataactggggtcatggccatgggccaggagaagactgtgctgggttgatttatgctgggcagtggaacgatttccaatgtgaagacgtcaataacttcatttgcgaaaaagacagggagacagtactgtcatctgcattataacggactgtgatgggatcacatgagcaaattttcagctctcaaaggcaaaggacactcctttctaattgcatcaccttctcatcagattgaaaaaaaaaaagcactgaaaaccaattactgaaaaaaaattgacagctagtgttttttaccatccgtcattacccaaagacttgggaactaaaatgttccccagggtgatatgctgattttcattgtgcacatggactgaatcacatagattctcctccgtcagtaaccgtgcgattatacaaattatgtcttccaaagtatggaacactccaatcagaaaaaggttatcattggtcgttgagttatgggaagaacttaagcatatactgtgtaaacagtgccatacatttctaaaatcccaagtgtaggaaaaatatgcagacatacagatatataggccaactattagtaataatatgaaatatacttaaagagcttttaaaactttgtatttttgtacaaaatatttgtcttttacaatttttttcctttttttttttttgtcattttaccgacataatacatggagccaaagaaaacaataatggtactaataaaaactcctagggtttcctgtcagatttaattctacccagtggcaaagaattttttcaattgtggctttaaaaaaataattaaatatacatgtgtatatatatatatatatatatatttttttttttttttttttttaatgtttcatttcctcagaggaaccaatcacttggaatgtctagaaatatccttgcagattttgccagtgtcaatcaagcctgcacacatgcacagtgaagcgggctgtgcctgccttgagcccatcaccagccaacattcttgacgtgtgcctgaccagacacagaagaaatgggcaactcaagacgtgcttccacttcattttggtggagtcgggaggtgtgggggatggagaggcatctgttgggaagggcactgaatctggcctatctggaaggccctgtgtcatggctgagctatgactgtacttggcatcagatccctacagagccaacattaactgtcaggaacgtatggcgtcacatcagccaaaggcagagatgctagaaagatgggaaccggctacgtgttacctggaaagtttgttttcttaagtcatattccaaaaacataactccaaggcatacgcatgataaaatgcaagaataaacttttggccactttgtggaactcttaaaagaacctttccagccgggcgcagtggctcatgcctgtaatcccagcactttgggaggccgaggcaggcagatgacttgaggtcaggagttcgagaccagcctggccaacgtggcaaaaccccatctctactaaaaataagaaaattagccgggtgtagtggcacatgcctgtaatcccagctactcaggaggctgaggcaggagaatcgcttgagcccaggaggcagagattgcagtgagccaagatcgcaccactgcactccagcctcggtgacagagcaagactccatctc

SEQ ID NO: 26877 - protein, 742 aa, Homo sapiens
MKDDFAEEEEVQSFGYKRFGIQEGTQCTKCKNNWALKFSIILLYILCALLTITVAILGYKVVEKMDNVTGGMETSRQTYDDKLTAVESDLKKLGDQTGKKAISTNSELSTFRSDILDLRQQLREITEKTSKNKDTLEKLQASGDALVDRQSQLKETLENNSFLITTVNKTLQAYNGYVTNLQQDTSVLQGNLQNQMYSHNVVIMNLNNLNLTQVQQRNLITNLQRSVDDTSQAIQRIKNDFQNLQQVFLQAKKDTDWLKEKVQSLQTLAANNSALAKANNDTLEDMNSQLNSFTGQMENITTISQANEQNLKDLQDLHKDAENRTAIKFNQLEERFQLFETDIVNIISNISYTAHHLRTLTSNLNEVRTTCTDTLTKHTDDLTSLNNTLANIRLDSVSLRMQQDLMRSRLDTEVANLSVIMEEMKLVDSKHGQLIKNFTILQGPPGPRGPRGDRGSQGPPGPTGNKGQKGEKGEPGPPGPAGERGPIGPAGPPGERGGKGSKGSQGPKGSRGSPGKPGPQGSSGDPGPPGPPGKEGLPGPQGPPGFQGLQGTVGEPGVPGPRGLPGLPGVPGMPGPKGPPGPPGPSGAVVPLALQNEPTPAPEDNGCPPHWKNFTDKCYYFSVEKEIFEDAKLFCEDKSSHLVFINTREEQQWIKKQMVGRESHWIGLTDSERENEWKWLDGTSPDYKNWKAGQPDNWGHGHGPGEDCAGLIYAGQWNDFQCEDVNNFICEKDRETVLSSAL

SEQ ID NO: 26878 - DNA, 4746 bp, Homo sapiens
gagagcggcgcgcgcggcagccccgaggcagcagagcgcggagccgggagcgcggggagcgcgggccggcggcggcgagggaggacgggggcgcagacggccggcgcgcggcgcggctaccatgggcgtgcggtgagcagccgctcgggacgacttcctcggctgcgcggcgctcgcgcggagctccccggccggcggtgcgtccccacggtcaccatgaaagacgacttcgcagaggaggaggaggtgcaatccttcggttacaagcggtttggtattcaggaaggaacacaatgtaccaaatgtaaaaataactgggcactgaagttttctatcatattattatacattttgtgtgccttgctaacaatcacagtagccattttgggatataaagttgtagagaaaatggacaatgtcacaggtggcatggaaacatctcgccaaacctatgatgacaagctcacagcagtggaaagtgacctgaaaaaattaggtgaccaaactgggaagaaagctatcagcaccaactcagaactctccaccttcagatcagacattctagatctccgtcagcaacttcgtgagattacagaaaaaaccagcaagaacaaggatacgctggagaagttacaggcgagcggggatgctctggtggacaggcagagtcaattgaaagaaactttggagaataactctttcctcatcaccactgtaaacaaaaccctccaggcgtataatggctatgtcacgaatctgcagcaagataccagcgtgctccagggcaatctgcagaaccaaatgtattctcataatgtggtcatcatgaacctcaacaacctgaacctgacccaggtgcagcagaggaacctcatcacgaatctgcagcggtctgtggatgacacaagccaggctatccagcgaatcaagaacgactttcaaaatctgcagcaggtttttcttcaagccaagaaggacacggattggctgaaggagaaagtgcagagcttgcagacgctggctgccaacaactctgcgttggccaaagccaacaacgacaccctggaggatatgaacagccagctcaactcattcacaggtcagatggagaacatcaccactatctctcaagccaacgagcagaacctgaaagacctgcaggacttacacaaagatgcagagaatagaacagccatcaagttcaaccaactggaggaacgcttccagctctttgagacggatattgtgaacatcattagcaatatcagttacacagcccaccacctgcggacgctgaccagcaatctaaatgaagtcaggaccacttgcacagatacccttaccaaacacacagatgatctgacctccttgaataataccctggccaacatccgtttggattctgtttctctcaggatgcaacaagatttgatgaggtcgaggttagacactgaagtagccaacttatcagtgattatggaagaaatgaagctagtagactccaagcatggtcagctcatcaagaattttacaatactacaaggtccaccgggccccaggggtccaagaggtgacagaggatcccagggaccccctggcccaactggcaacaagggacagaaaggagagaagggggagcctggaccacctggccctgcgggtgagagaggcccaattggaccagctggtccccccggagagcgtggcggcaaaggatctaaaggctcccagggccccaaaggctcccgtggttcccctgggaagcccggccctcagggctccagtggggacccaggccccccgggcccaccaggcaaagagggactccccggccctcagggccctcctggcttccagggacttcagggcaccgttggggagcctggggtgcctggacctcggggactgccaggcttgcctggggtaccaggcatgccaggccccaagggcccccccggccctcctggcccatcaggagcggtggtgcccctggccctgcagaatgagccaaccccagcaccggaggacaatggtaagtccaagccctccctccagccagggggacagggcagtgcatgtgcttgagactgagccaacccccagtgtgtggccccacccatgttatttttgtttttgtttttgttttgagacagggtctcactctgttgcccaggctggagtgcagtggcgtgatctcggctcactgcaacctccacatcccgggttcaagtgattctcctgccttagcctcccaggtagctgggactacaagcgtgtgcccccacagccagctaatttttgtatttttagtagagagggggtttcaccgtgttggccaggctggtctcaaactcctggcctcaagtgatccacctaccttagtctcccaaagtgctgggattacaggtgtgagccaccacgtcttgtcccccgctgcatattatttaacagcaaaggcatcataggggctggcacaggagccctgctgccagaacaggcctccataccaggcatgtgtttctctctaaacgccattgggttctctagtgctcatttgttttatgtattatgtgtgtatgtatgggacagggtctcactctgtcacccaggctggaatgacgaagtgaagtagtgcaaacatagctcactgcagctttgacctcctgggcttaggtgatcttcccactcagactcctgcgtagctgggaccacaggggtatgccaccacacctggctaattttttattttcctttttgtagagacagggtcttgctatgttgcccaggctggtcttgaactcctggcctcaagcaaccctcctgcctcagtcttgcaaagtgctgggattccaggtgggagccactgcacctggctcttgcacttgtttatttataggagccagccctcagaagacaaacacaatgcaaaacatttccttcagggaagcctgctggccgccctgagcgctcttccctcgttttacatcctcactctggagatagatgggctccctcggttagctccatcaacatgtggatggaaccctctgctattgatgactacatttaatttctttttgagaaaggtgttagatgttacggtgccttctagtcttttgataattaaacctttggcaaaactcgaatgtttggttagcaaccaagcctatttttctctcctttgacccaaccgctattctacttgattttggtcggtgaggcccgggttatttttgttgatccgtgagcccagttttggtgctgggttctcacatccaagtgttcctgggttccgtatgattccagactgacgctgaacatctgtgcctgccctgcttcttgttgttgcttctgttatttctgtcattgtgaagacggatccagacacagaagaacaaagacccagtcaaagatcttttccagattatgtggttttggcttgtgctctgcagtccactttgggtcatgcttgctgcgagcacgtccgtgaacgtcagctgtgggcctcgtgcagggacgctcaggctgctcccagcgggaccacagttttggcctctgaaacacagctgaagaaaggcagagtgctttctgtgatcttttaatcaatgttttccacttttgcattcctaggctgcccgcctcactggaagaacttcacagacaaatgctactatttttcagttgagaaagaaatttttgaggatgcaaagcttttctgtgaagacaagtcttcacatcttgttttcataaacactagagaggaacagcaatggataaaaaaacagatggtagggagagagagccactggatcggcctcacagactcagagcgtgaaaatgaatggaagtggctggatgggacatctccagactacaaaaattggaaagctggacagccggataactggggtcatggccatgggccaggagaagactgtgctgggttgatttatgctgggcagtggaacgatttccaatgtgaagacgtcaataacttcatttgcgaaaaagacagggagacagtactgtcatctgcattataacggactgtgatgggatcacatgagcaaattttcagctctcaaaggcaaaggacactcctttctaattgcatcaccttctcatcagattgaaaaaaaaaaagcactgaaaaccaattactgaaaaaaaattgacagctagtgttttttaccatccgtcattacccaaagacttgggaactaaaatgttccccagggtgatatgctgattttcattgtgcacatggactgaatcacatagattctcctccgtcagtaaccgtgcgattatacaaattatgtcttccaaagtatggaacactccaatcagaaaaaggttatcattggtcgttgagttatgggaagaacttaagcatatactgtgtaaacagtgccatacatttctaaaatcccaagtgtaggaaaaatatgcagacatacagatatataggccaactattagtaataatatgaaatatacttaaagagcttttaaaactttgtatttttgtacaaaatatttgtcttttacaatttttttcctttttttttttttgtcattttaccgacataatacatggagccaaagaaaacaataatggtactaataaaaactcctagggtttcctgtcagatttaattctacccagtggcaaagaattttttcaattgtggctttaaaaaaataattaaatatacatgtgtatatatatatatatatatatat

SEQ ID NO: 26879 - protein, 622 aa, Homo sapiens; identical to SEQ ID NO: 26875

SEQ ID NO: 26880 - DNA, 3148 bp, Homo sapiens
gagagcggcgcgcgcggcagccccgaggcagcagagcgcggagccgggagcgcggggagcgcgggccggcggcggcgagggaggacgggggcgcagacggccggcgcgcggcgcggctaccatgggcgtgcggtgagcagccgctcgggacgacttcctcggctgcgcggcgctcgcgcggagctccccggccggcggtgcgtccccacggtcaccatgaaagacgacttcgcagaggaggaggaggtgcaatccttcggttacaagcggtttggtattcaggaaggaacacaatgtaccaaatgtaaaaataactgggcactgaagttttctatcatattattatacattttgtgtgccttgctaacaatcacagtagccattttgggatataaagttgtagagaaaatggacaatgtcacaggtggcatggaaacatctcgccaaacctatgatgacaagctcacagcagtggaaagtgacctgaaaaaattaggtgaccaaactgggaagaaagctatcagcaccaactcagaactctccaccttcagatcagacattctagatctccgtcagcaacttcgtgagattacagaaaaaaccagcaagaacaaggatacgctggagaagttacaggcgagcggggatgctctggtggacaggcagagtcaattgaaagaaactttggagaataactctttcctcatcaccactgtaaacaaaaccctccaggcgtataatggctatgtcacgaatctgcagcaagataccagcgtgctccagggcaatctgcagaaccaaatgtattctcataatgtggtcatcatgaacctcaacaacctgaacctgacccaggtgcagcagaggaacctcatcacgaatctgcagcggtctgtggatgacacaagccaggctatccagcgaatcaagaacgactttcaaaatctgcagcaggtttttcttcaagccaagaaggacacggattggctgaaggagaaagtgcagagcttgcagacgctggctgccaacaactctgcgttggccaaagccaacaacgacaccctggaggatatgaacagccagctcaactcattcacaggtcagatggagaacatcaccactatctctcaagccaacgagcagaacctgaaagacctgcaggacttacacaaagatgcagagaatagaacagccatcaagttcaaccaactggaggaacgcttccagctctttgagacggatattgtgaacatcattagcaatatcagttacacagcccaccacctgcggacgctgaccagcaatctaaatgaagtcaggaccacttgcacagatacccttaccaaacacacagatgatctgacctccttgaataataccctggccaacatccgtttggattctgtttctctcaggatgcaacaagatttgatgaggtcgaggttagacactgaagtagccaacttatcagtgattatggaagaaatgaagctagtagactccaagcatggtcagctcatcaagaattttacaatactacaaggtccaccgggccccaggggtccaagaggtgacagaggatcccagggaccccctggcccaactggcaacaagggacagaaaggagagaagggggagcctggaccacctggccctgcgggtgagagaggcccaattggaccagctggtccccccggagagcgtggcggcaaaggatctaaaggctcccagggccccaaaggctcccgtggttcccctgggaagcccggccctcagggctccagtggggacccaggccccccgggcccaccaggcaaagagggactccccggccctcagggccctcctggcttccagggacttcagggcaccgttggggagcctggggtgcctggacctcggggactgccaggcttgcctggggtaccaggcatgccaggccccaagggcccccccggccctcctggcccatcaggagcggtggtgcccctggccctgcagaatgagccaaccccagcaccggaggacaatggctgcccgcctcactggaagaacttcacagacaaatgctactatttttcagttgagaaagaaatttttgaggatgcaaagcttttctgtgaagacaagtcttcacatcttgttttcataaacactagagaggaacagcaatggataaaaaaacagatggtagggagagagagccactggatcggcctcacagactcagagcgtgaaaatgaatggaagtggctggatgggacatctccagactacaaaaattggaaagctggacagccggataactggggtcatggccatgggccaggagaagactgtgctgggttgatttatgctgggcagtggaacgatttccaatgtgaagacgtcaataacttcatttgcgaaaaagacagggagacagtactgtcatctgcattataacggactgtgatgggatcacatgagcaaattttcagctctcaaaggcaaaggacactcctttctaattgcatcaccttctcatcagattgaaaaaaaaaaagcactgaaaaccaattactgaaaaaaaattgacagctagtgttttttaccatccgtcattacccaaagacttgggaactaaaatgttccccagggtgatatgctgattttcattgtgcacatggactgaatcacatagattctcctccgtcagtaaccgtgcgattatacaaattatgtcttccaaagtatggaacactccaatcagaaaaaggttatcattggtcgttgagttatgggaagaacttaagcatatactgtgtaaacagtgccatacatttctaaaatcccaagtgtaggaaaaatatgcagacatacagatatataggccaactattagtaataatatgaaatatacttaaagagcttttaaaactttgtatttttgtacaaaatatttgtcttttacaatttttttcctttttttttttttgtcattttaccgacataatacatggagccaaagaaaacaataatggtactaataaaaactcctagggtttcctgtcagatttaattctacccagtggcaaagaattttttcaattgtggctttaaaaaaataattaaatatacatgtgtatatatatatatatatatatat

SEQ ID NO: 26881 - protein, 742 aa, Homo sapiens; identical to SEQ ID NO: 26877

SEQ ID NO: 26882 - DNA, 3065 bp, Homo sapiens
gagagcggcgcgcgcggcagccccgaggcagcagagcgcggagccgggagcgcggggagcgcgggccggcggcggcgagggaggacgggggcgcagacggccggcgcgcggcgcggctaccatgggcgtgcggtgagcagccgctcgggacgacttcctcggctgcgcggcgctcgcgcggagctccccggccggcggtgcgtccccacggtcaccatgaaagacgacttcgcagaggaggaggaggtgcaatccttcggttacaagcggtttggtattcaggaaggaacacaatgtaccaaatgtaaaaataactgggcactgaagttttctatcatattattatacattttgtgtgccttgctaacaatcacagtagccattttgggatataaagttgtagagaaaatggacaatgtcacaggtggcatggaaacatctcgccaaacctatgatgacaagctcacagcagtggaaagtgacctgaaaaaattaggtgaccaaactgggaagaaagctatcagcaccaactcagaactctccaccttcagatcagacattctagatctccgtcagcaacttcgtgagattacagaaaaaaccagcaagaacaaggatacgctggagaagttacaggcgagcggggatgctctggtggacaggcagagtcaattgaaagaaactttggagaataactctttcctcatcaccactgtaaacaaaaccctccaggcgtataatggctatgtcacgaatctgcagcaagataccagcgtgctccagggcaatctgcagaaccaaatgtattctcataatgtggtcatcatgaacctcaacaacctgaacctgacccaggtgcagcagaggaacctcatcacgaatctgcagcggtctgtggatgacacaagccaggctatccagcgaatcaagaacgactttcaaaatctgcagcaggtttttcttcaagccaagaaggacacggattggctgaaggagaaagtgcagagcttgcagacgctggctgccaacaactctgcgttggccaaagccaacaacgacaccctggaggatatgaacagccagctcaactcattcacaggtcagatggagaacatcaccactatctctcaagccaacgagcagaacctgaaagacctgcaggacttacacaaagatgcagagaatagaacagccatcaagttcaaccaactggaggaacgcttccagctctttgagacggatattgtgaacatcattagcaatatcagttacacagcccaccacctgcggacgctgaccagcaatctaaatgaagtcaggaccacttgcacagatacccttaccaaacacacagatgatctgacctccttgaataataccctggccaacatccgtttggattctgtttctctcaggatgcaacaagatttgatgaggtcgaggttagacactgaagtagccaacttatcagtgattatggaagaaatgaagctagtagactccaagcatggtcagctcatcaagaattttacaatactacaaggtccaccgggccccaggggtccaagaggtgacagaggatcccagggaccccctggcccaactggcaacaagggacagaaaggagagaagggggagcctggaccacctggccctgcgggtgagagaggcccaattggaccagctggtccccccggagagcgtggcggcaaaggatctaaaggctcccagggccccaaaggctcccgtggttcccctgggaagcccggccctcagggctccagtggggacccaggccccccgggcccaccaggcaaagagggactccccggccctcagggccctcctggcttccagggacttcagggcaccgttggggagcctggggtgcctggacctcggggactgccaggcttgcctggggtaccaggcatgccaggccccaagggcccccccggccctcctggcccatcaggagcggtggtgcccctggccctgcagaatgagccaaccccagcaccggaggacaatggctgcccgcctcactggaagaacttcacagacaaatgctactatttttcagttgagaaagaaatttttgaggatgcaaagcttttctgtgaagacaagtcttcacatcttgttttcataaacactagagaggaacagcaatggataaaaaaacagatggtagggagagagagccactggatcggcctcacagactcagagcgtgaaaatgaatggaagtggctggatgggacatctccagactacaaaaattggaaagctggacagccggataactggggtcatggccatgggccaggagaagactgtgctgggttgatttatgctgggcagtggaacgatttccaatgtgaagacgtcaataacttcatttgcgaaaaagacagggagacagtactgtcatctgcattataacggactgtgatgggatcacatgagcaaattttcagctctcaaaggcaaaggacactcctttctaattgcatcaccttctcatcagattgaaaaaaaaaaagcactgaaaaccaattactgaaaaaaaattgacagctagtgttttttaccatccgtcattacccaaagacttgggaactaaaatgttccccagggtgatatgctgattttcattgtgcacatggactgaatcacatagattctcctccgtcagtaaccgtgcgattatacaaattatgtcttccaaagtatggaacactccaatcagaaaaaggttatcattggtcgttgagttatgggaagaacttaagcatatactgtgtaaacagtgccatacatttctaaaatcccaagtgtaggaaaaatatgcagacatacagatatataggccaactattagtaataatatgaaatatacttaaagagcttttaaaactttgtatttttgtacaaaatatttgtcttttacaatttttttcctttttttttttttgtcattttaccgacataatacatggagccaaagaaaacaataatggtactaataaaaactcctagggtttcctgtcagatttaattct

SEQ ID NO: 26883 - protein, 742 aa, Homo sapiens; identical to SEQ ID NO: 26877

SEQ ID NO: 26884 - DNA, 425 bp, Homo sapiens
ggagcttcctgcacataaaagtctggaatttcatagcaatgtgggggcaaaagctatgatagcatttccccctttctaaattatatactgcttagtgttaatgtgagcagagggctggatggcgacgggctcgcagcttacatgctgttctggaaactcggtttagtggcagctatgaatgctcatctgtagcacctcccttttccctcccatttggaaggagcaagagactgtcttctaggatgagagagatgagagagatggcattaaagcttgacatcagatgagcccttcagctctctcaacctgcataattctcttttgggaaggagagactggtctccaagcacttcttacacctcctctgaaccaggaaccatatcagcacattctgactgagttaaccttaattgtaaaagactggg

SEQ ID NO: 26885 - protein, 46 aa, Homo sapiens
MSPSALSTCIILFWEGETGLQALLTPPLNQEPYQHILTELTLIVKD

SEQ ID NO: 26886 - DNA, 459 bp, Homo sapiens
ttctgaacaacctctgacccagccacttttgaagatgccaaagagatgagaatctgtctatgttgcccaggctggtctccaactcctgacttcaagcaatcctcctgcctcagcctcccaaagtgctgggattacaggcatgagccacagtgcccagccccactcccattttctgaatctttcagaatttcagattgccttaaactgcccaaaaaagctgctataaaacctcaacatatcgctgctgcacaaaaccacccaaaccatcttcagacctctgccctctggcatgtgagtggcctgcatttcaggaggtgaaagatcagacctttgttatttgttaaagcactcagcaacccagaactaaacatgcacgccgatgttgatttgagaactaaaggatatctttcaagtccaataaatgtgataaaaataaacaacatcctttcataaatttca

SEQ ID NO: 26887 - protein, 90 aa, Homo sapiens
MRICLCCPGWSPTPDFKQSSCLSLPKCWDYRHEPQCPAPLPFSESFRISDCLKLPKKAAIKPQHIAAAQNHPNHLQTSALWHVSGLHFRR

SEQ ID NO: 26888 - DNA, 1788 bp, Homo sapiens
aacccccgcctagccccttcacagcaaatgcgctttttgccctgaagttgtgtgagaccgaccttaaactttctccgaccctatctcgggatgctacggctcaggtcgtggtggtttcgggaacctcaagacaacattccccagctgacctttgggaactttaactcgggtcgtcatgtacggaaaggtagtctatggggtacgcagaatggaaaagggcttccacatcagtcgtgtccgaggacgctctccaacttttgatgtccctggagagtttctgatatttccctggagagtttcagaaaggatttcttccgacagacgtgaccccagaaggctgccgagggagactttaggacaagaggcgttgtttttgtgagaatgaatttttatactttaccccgaccccaccccctaccccccgcccaggtaaatccaagtaaatgattttctgaaggtcggtctcctagaaagcgtttaggctctggttttttgttttgtttctattttcgtgttttcccagttagggaaggaagaggagcctgtgcagagttgaactggggtggagaggtgccttgtaaagtatggtttccagagatggtgagacctcgtagctaagcgttgtttcctctgcacgtaactgtgagttgtgaacttgtggctcctgggggagcgggacagggcctggcagtgcgggggagggggcaaggaattcaggaagttggcgagaattcttcgtttttcattcttcgttgtaaattgcttctaaacacttctgaattttaaattgctaccgagaaggtccagaaaccgttctcatccaatttagtcacttttattacgttccactttgcctcccccaatcactgcggcggctcccagtttcagcgtggccgcatttggaaaaggctgaaggtagaaaactctggaatggagaggctggcgactggagcaggatccaggggctttaaattttaacctgaatgcgatcgaatgcgcgactcccagaagagatagccaggcgtccgcccggccgctcaacccccgccaggactcggaatgccttgcttttggttcttttcgtgagttccgaccaaatgtttaagtggactgggttttgcagaagctcatttgtaagcactgacggaaatgggttgtgggcatttgatttcctttgattccaacgttttgaaataatgtttctcggatttgctattcgaagcaattttctaaaaactcatatcttatttgctaaaaataaactctttggctcagtttgtgtccaggctgtgtacggcctccaaccctgagccccgaggagatcgagccctggcgcgagcctgatctctgtcctgtgtgtttctttgtatttgcaagtacaaggatgtctgcgtggatatccctggacactcgataccccccggggacctgcttttcccgcagctccgcagacgcggcgggagggcgcgctggccccggcgctgctgggacagaggtgagcagcggggtggacattgaccgattcgacaacgttcgggctctaagggctcgggaagggacccggcattttaccctccagattcccaatctatttttaaaaataatgttcaaaacatatgggaaaaataagtgattgctccttttcatggtcacagattgtatttattttttcagactggttttccaacctaacgagggaatgggtagtgaatgttgttgttgttgttgttgtttatgttggttaatttcgaaataaaactgtttaactcgtacagttgattcagacag

SEQ ID NO: 26889 - protein, 67 aa, Homo sapiens
MYGKVVYGVRRMEKGFHISRVRGRSPTFDVPGEFLIFPWRVSERISSDRRDPRRLPRETLGQEALFL

SEQ ID NO: 26890 - DNA, 1089 bp, Homo sapiens
cgaccccaccccctaccccccgcccaggtaaatccaagtaaatgattttctgaaggtcggtctcctagaaagcgtttaggctctggttttttgttttgtttctattttcgtgttttcccagttagggaaggaagaggagcctgtgcagagttgaactggggtggagaggtgccttgtaaagtatggtttccagagatggtgagacctcgtagctaagcgttgtttcctctgcacgtaactgtgagttgtgaacttgtggctcctgggggagcgggacagggcctggcagtgcgggggagggggcaaggaattcaggaagttggcgagaattcttcgtttttcattcttcgttgtaaattgcttctaaacacttctgaattttaaattgctaccgagaaggtccagaaaccgttctcatccaatttagtcacttttattacgttccactttgcctcccccaatcactgcggcggctcccagtttcagcgtggccgcatttggaaaaggctgaaggtagaaaactctggaatggagaggctggcgactggagcaggatccaggggctttaaattttaacctgaatgcgatcgaatgcgcgactcccagaagagatagccaggcgtccgcccggccgctcaacccccgccaggactcggaatgccttgcttttggttcttttctacaaggatgtctgcgtggatatccctggacactcgataccccccggggacctgcttttcccgcagctccgcagacgcggcgggagggcgcgctggccccggcgctgctgggacagaggtgagcagcggggtggacattgaccgattcgacaacgttcgggctctaagggctcgggaagggacccggcattttaccctccagattcccaatctatttttaaaaataatgttcaaaacatatgggaaaaataagtgattgctccttttcatggtcacagattgtatttattttttcagactggttttccaacctaacgagggaatgggtagtgaatgttgttgttgttgttgttgtttatgttggttaatttcgaaataaaactgtttaactcgtacagttgattcagac

SEQ ID NO: 26891 - protein, 92 aa, Homo sapiens
MPCFWFFSTRMSAWISLDTRYPPGTCFSRSSADAAGGRAGPGAAGTEVSSGVDIDRFDNVRALRAREGTRHFTLQIPNLFLKIMFKTYGKNK

SEQ ID NO: 26892 - DNA, 836 bp, Homo sapiens
gccgtgatatatgtctcgctccctttcgcttacagaaaggatttcttccgacagacgtgaccccagaaggctgccgagggagactttaggacaagaggcgttgtttttttagggaaggaagaggagcctgtgcagagttgaactggggtggagaggtgccttgtaaagtatggtttccagagatggtgagacctcgtagctaagcgttgtttcctctgcacgtaacttttcagcgtggccgcatttggaaaaggctgaaggtagaaaactctggaatggagaggctggcgactggagcaggatccaggggctttaaattttaacctgaatgcgatcgaatgcgcgactcccagaagagatagccaggcgtccgcccggccgctcaacccccgccaggactcggaatgccttgcttttggttcttttctacaaggatgtctgcgtggatatccctggacactcgataccccccggggacctgcttttcccgcagctccgcagacgcggcgggagggcgcgctggccccggcgctgctgggacagaggtgagcagcggggtggacattgaccgattcgacaacgttcgggctctaagggctcgggaagggacccggcattttaccctccagattcccaatctatttttaaaaataatgttcaaaacatatgggaaaaataagtgattgctccttttcatggtcacagattgtatttattttttcagactggttttccaacctaacgagggaatgggtagtgaatgttgttgttgttgttgttgtttatgttggttaatttcgaaataaaactgtttaactcgtacagttgattcagac

SEQ ID NO: 26893 - protein, 92 aa, Homo sapiens; identical to SEQ ID NO: 26891

SEQ ID NO: 26894 - DNA, 696 bp, Homo sapiens
gcggccgcaggctcgtccgctgcaggagccgtgatatatgtctcgctccctttcgcttacagaaaggatttcttccgacagacgtgaccccagaaggctgccgagggagactttaggacaagaggcgttgtttttttagggaaggaagaggagcctgtgcagagttgaactggggtggagaggtgccttgtaaagtatggtttccagagatgtttcagcgtggccgcatttggaaaaggctgaaggtagaaaactctggaatggagaggctggcgactggagcaggatccaggggctttaaattttaacctgaatgcgatcgaatgcgcgactcccagaagagatagccaggcgtccgcccggccgctcaacccccgccaggactcggaatgccttgcttttggttcttttctacaaggatgtctgccggggtggacattgaccgattcgacaacgttcgggctctaagggctcgggaagggacccggcattttaccctccagattcccaatctatttttaaaaataatgttcaaaacatatgggaaaaataagtgattgctccttttcatggtcacagattgtatttattttttcagactggttttccaacctaacgagggaatgggtagtgaatgttgttgttgttgttgttgtttatgttggttaatttcgaaataaaactgtttaactcgta

SEQ ID NO: 26895 - protein, 55 aa, Homo sapiens
MPCFWFFSTRMSAGVDIDRFDNVRALRAREGTRHFTLQIPNLFLKIMFKTYGKNK

SEQ ID NO: 26896 - DNA, 3770 bp, Homo sapiens
gacccacagcctggcacccttcggcgagcgctgtttgtttagggctcggtgagtccaatcaggagcccaggctgcagttttccggcagagcagtaagaggcgcctcctctctcctttttattcaccagcagcgcggcgcagaccccggactcgcgctcgcccgctggcgccctcggcttctctccgcgcctgggagcaccctccgccgcggccgttctccatgcgcagcgcccgcccgaggagctagacgtcagcttggagcggcgccggaccgtggatggccttgactgacggcggctggtgcttgccgaagcgcttcggggccgcgggtgcggacgccagcgactccagagcctttccagcgcgggagccctccacgccgccttcccccatctcttcctcgtcctcctcctgctcccggggcggagagcggggccccggcggcgccagcaactgcgggacgcctcagctcgacacggaggcggcggccggacccccggcccgctcgctgctgctcagttcctacgcttcgcatcccttcggggctccccacggaccttcggcgcctggggtcgcgggccccgggggcaacctgtcgagctgggaggacttgctgctgttcactgacctcgaccaagccgcgaccgccagcaagctgctgtggtccagccgcggcgccaagctgagccccttcgcacccgagcagccggaggagatgtaccagaccctcgccgctctctccagccagggtccggccgcctacgacggcgcgcccggcggcttcgtgcactctgcggccgcggcggcagcagccgcggcggcggccagctccccggtctacgtgcccaccacccgcgtgggttccatgctgcccggcctaccgtaccacctgcaggggtcgggcagtgggccagccaaccacgcgggcggcgcgggcgcgcaccccggctggcctcaggcctcggccgacagccctccatacggcagcggaggcggcgcggctggcggcggggccgcggggcctggcggcgctggctcagccgcggcgcacgtctcggcgcgcttcccctactctcccagcccgcccatggccaacggcgccgcgcgggagccgggaggctacgcggcggcgggcagtgggggcgcgggaggcgtgagcggcggcggcagtagcctggcggccatgggcggccgcgagccccagtacagctcgctgtcggccgcgcggccgctgaacgggacgtaccaccaccaccaccaccaccaccaccaccatccgagcccctactcgccctacgtgggggcgccactgacgcctgcctggcccgccggacccttcgagaccccggtgctgcacagcctgcagagccgcgccggagccccgctcccggtgccccggggtcccagtgcagacctgctggaggacctgtccgagagccgcgagtgcgtgaactgcggctccatccagacgccgctgtggcggcgggacggcaccggccactacctgtgcaacgcctgcgggctctacagcaagatgaacggcctcagccggcccctcatcaagccgcagaagcgcgtgccttcatcacggcggcttggattgtcctgtgccaactgtcacaccacaactaccaccttatggcgcagaaacgccgagggtgaacccgtgtgcaatgcttgtggactctacatgaaactccatggggtgcccagaccacttgctatgaaaaaagagggaattcaaaccaggaaacgaaaacctaagaacataaataaatcaaagacttgctctggtaatagcaataattccattcccatgactccaacttccacctcttctaactcagatgattgcagcaaaaatacttcccccacaacacaacctacagcctcaggggcgggtgccccggtgatgactggtgcgggagagagcaccaatcccgagaacagcgagctcaagtattcgggtcaagatgggctctacataggcgtcagtctcgcctcgccggccgaagtcacgtcctccgtgcgaccggattcctggtgcgccctggccctggcctgagcccacgccgccaggaggcagggagggctccgccgcgggcctcactccactcgtgtctgcttttgtgcagcggtccagacagtggcgactgcgctgacagaacgtgattctcgtgcctttattttgaaagagatgtttttcccaagaggcttgctgaaagagtgagagaagatggaagggaagggccagtgcaactgggcgcttgggccactccagccagcccgcctccggggcggaccctgctccacttccagaagccaggactaggacctgggccttgcctgctatggaatattgagagagattttttaaaaaagattttgcattttgtccaaaatcatgtgcttcttctgatcaattttggttgttccagaatttcttcataccttttccacatccagatttcatgtgcgttcatggagaagatcacttgaggccatttggtacacatctctggaggctgagtcggttcatgaggtctcttatcaaaaatattactcagtttgcaagactgcattgtaactttaacatacactgtgactgacgtttctcaaagttcatattgtgtggctgatctgaagtcagtcggaatttgtaaacagggtagcaaacaagatatttttcttccatgtatacaataatttttttaaaaagtgcaatttgcgttgcagcaatcagtgttaaatcatttgcataagatttaacagcattttttataatgaatgtaaacattttaacttaatggtacttaaaataatttaaaagaaaaatgttaacttagacattcttatgcttcttttacaactacatcccattttatatttccaattgttaaagaaaaatatttcaagaacaaatcttctctcaggaaaattgcctttctctatttgttaagaatttttatacaagaacaccaatataccccctttattttactgtggaatatgtgctggaaaaattgcaacaacactttactacctaacggatagcatttgtaaatactctaggtatctgtaaacactctgatgaagtctgtatagtgtgactaacccacaggcaggttggtttacattaatttttttttttgaatgggatgtcctatggaaacctatttcaccagagttttaaaaataaaaagggtattgttttgtcttctgtacagtgagttccttcccttttcaaagctttctttttatgctgtatgtgactatagatattcatataaaacaagtgcacgtgaagtttgcaaaatgctttaaggccttcctttcaaagcatagtccttttggagccgttttgtaccttttataccttggcttatttgaagttgacacatggggttagttactactctccatgtgcattggggacagtttttataagtgggaaggactcagtattattatatttgagatgataagcattttgtttgggaacaatgcttaaaaatattccagaaagttcagattttttttctttgtgaatgaaatatattctggcccacgaacagggcgatttcctttcagttttttccttttgcaacgtgccttgaagtctcaaagctcacctgaggttgcagacgttacccccaacagaagataggtagaaatgattccagtggcctctttgtattttcttcattgttgagtagatttcaggaaatcaggaggtgtttcacaatacagaatgatggcctttaactgtg

SEQ ID NO: 26897 - protein, 595 aa, Homo sapiens; identical to SEQ ID NO: 3601

SEQ ID NO: 26898 - DNA, 357 bp, Homo sapiens
ggtcggcttgagtcccctgacccctactctcaggctgtcccggagcttttaaagactgaaatccatcatcattacagtacgtcgttgccaaacccgagcaagccacacagaaatactgaccactgagccccgctgcaacccacaaatatccggggacacagcgaggctgcctcattaacttttatctcaattttaaagaaactggcatcctacacaacccgagttcaaagttgtcatggggatactgcaacttacaacacatcacaaaggtttattcttctccgccctaaaagccactattgactacggtaatcagtaaaatgctcaggtcttcaaggacactgaagttaaacaagg

SEQ ID NO: 26899 - protein, 58 aa, Homo sapiens
APLQPTNIRGHSEAASLTFISILKKLASYTTRVQSCHGDTATYNTSQRFILLRPKSHY

SEQ ID NO: 26900 - DNA, 779 bp, Homo sapiens
agctaccaggcggcaagagcagtgaagcacccgtcgtcacgctggttccctagtgcagacttggaatatgctggagaatattcagaggagcatgggtgcttgctctgacatgagtctcagaggtgcagacacgcacctgcaacgtcctaactttccttagaagcaatttggaactatcaaccacaatatatttatccaaagtccctataaactaagactttctggcatcctttatcttgaagttgaaccaactgaaaacaccctttgactcctcttctgcctgtcctactgatgtctatcaccttctcctgcctgatcccagccccaccagaaggtcataagcgaagtggccttctcagaatgcagctgctgaaggttcagccacacagaatccatccaggagcctcaagcagccagacctcaagcctcttgggaaaaacatctctttcaaaataaaggcacgagaatcacgttctgtcagcgcagtcgccactgtctggaccgctgcacaaaagcagacacgagtggagtgaggcccgcggcggagccctccctgcctcctggcggcgtgggctcaggccagggccagggcgcaccaggaatccggtcgcacggaggacgtgacttcggccggcgaggcgagactgacgcctatgtagagcccatcttgacccgaatacttgagctcgctgttctcgggattggtgctctctcccgcaccagtcatcaccggggcacccgcctggcagaagagggggacacagaggagagacgagaag

SEQ ID NO: 26901 - protein, 54 aa, Homo sapiens
MSITFSCLIPAPPEGHKRSGLLRMQLLKVQPHRIHPGASSSQTSSLLGKTSLSK

SEQ ID NO: 26902 - DNA, 552 bp, Homo sapiens
tggatggtccagcccactggcttgacccaatgttatgttttatacttgaaaaaccggctgggcgcggtggctcacgcctgtaatcccagcactttggaggccgaggctagtggatcacctgaggtccggaattcaagaccagcctccggtgatccacctgcctcagcttcccaaagtgctgggattacaggtgtgaaccaccacgctcagcattgttaattttttaaagttaatgttgtttgaaaccatagagccatttccaaaaaagtgaagcaatcacaagctgtaaattcctaacaagtctctgcaaagctagtggtaaaacaaaaggagctgagaagctgtttaaaagcaagaagggaacttcaggtacatcaagtccaaatgtccctatttatagacagtaaactgaggcccagaagagcccatgacttgcccagggtcatacagttcaaccatgacagagctgagcccagagccaagccggtgggagtggtcagctccaggacttcagcagaggcaccttctacataacttccccaagaaccctca

SEQ ID NO: 26903 - protein, 71 aa, Homo sapiens
MVQPTGLTQCYVLYLKNRLGAVAHACNPSTLEAEASGSPEVRNSRPASGDPPASASQSAGITGVNHHAQHC

SEQ ID NO: 26904 - DNA, 2146 bp, Homo sapiens
gaaataactaatagaacaaaggaaatctatttaacttgatagcgaaggggtaggcacaggtgtgatttcctctatgataatctctcacacaggaaaccatgatttcagacaaatggtttatctttaaatctcttccacttttagcagatcacagttcagagcctcaaagaggctgtttaatttattatatttgtgtcagcaaataggtaccactaaatttctcactttagacctcacatttaaaactattaaactatatcaactttgggaagttgttcataatcatttggaaatgtatacattctcaaggacataactcagaccatagttttcctaggttcaaaagcctagtttcactacctattctaggtctcttagtacctccttgaagatggctctgtatatagagtagaaagataatggtggatctaagcacatatgaggcaccatcttgagagaccacaaagtatagtaggaaagagcacaagactgaattttatcccaactctgcaaaagttacctttcttagaatgagtttccttatctataaaattcctgaattaagatcatatgataatacagtactgtaaacttgaagtaaggtaattgccagtttgtgtaagtataacataatatacttttcagttctgccacatttcaacatagtaactgttccctttatgtacgtggctttgaaggtttattctttgttgtgtgtcagcttcttggaaggatagctcctagtactgcataataataataatacttgcaaccacttattgagtacttgccatgtttcaggtaacacactggacacttaatactcatgattttatctaactgtgacagtgactcttagcatgataccacagtcacattttcacacgcggaaacgtgaatttaaagagtttaaagaatatgcataaggtcacaccctaacaaatggtatagccaatatttgaaccatccatccagttctaaaacctgtgggctttctacagtatcccactgtgtctggtatgtgtcaatttatgggattactgagaattgcctctaagggatgcatttgactaaaagtattatttagtaaatatacacattttaaacctgatagctttatgcagaatgattgtagataaaataactttgcgaggtaatttaaataggaagaaacagcagacttagctgttgataggactggaccattctcatttaaaaattagtttgtgagtaaggatttttgttagtgctctaatttttgttttaaggtgaatgaagcttttgctccccagtacttggctgttgagaggagtttggatcttgacataagtaaaaccaatgtgaatggaggagccattgctttgggtcacccactgggaggatctggatcaagaattactgcacacctggttcacgaattaaggcgtcgaggtggaaaatatgccgttggatcagcttgcattggaggtggccaaggtattgctgtcatcattcagagcacagcctgaagagaccagtgagctcactgtgacccatccttactctacttggccaggccacagtaaaacaagtgaccttcagagcagctgccacaactggccatgccctgccattgaaacagtgattaagtttgatcaagccatggtgacacaaaaatgcattgatcatgaataggagcccatgctagaagtacattctctcagatttgaaccagtgaaatatgatgtatttctgagctaaaactcaactatagaagacattaaaagaaatcgtattcttgccaagtaaccaccacttctgccttagataatatgattataaggaaatcaaataaatgttgccttaacttcagttaatattttcctgtcatttatatttttaaaaattttaaattgtgataagatacacattacataaactttaccatcttaacccttttttagcgtacaattcactggtattaagtacattcacatttttatacaaacatccccactttttatcaacagaactttttcagtcaccacacatggaaacaataactcctgattctcccatcccccatcccctgacaaccaccagtgtattttgtttctataaatttgatgactcgaggtacctcataagtgaaattataaatatctgt

SEQ ID NO: 26905 - protein, 77 aa, Homo sapiens [sequence omitted]

SEQ ID NO: 26906 - DNA, 2252 bp, Homo sapiens
cctcagcccttggctcctgcccagtgtttagggtgttggcggagacaaaggggaagagtcatcgcctgtcggggctaggatatgatgggtgagaggtgtcaaaccaaattctctcggtttggaaacggagaaaatctaaaaatgaggatgtgaggaaagagtccgctctcaaggcgcgttgtggtctatccgagccccgtcccctgggctccctcgggctggggtgaggcgggcagcgctacgcgtggggtaggaccatcttacgctgggaccccgccaaggagccccaggaagtaggtgaaagggcaggggcgtggctctcggggcgccacccacgctcttgaaatctgggtgattgcgagcggccgctcagcgtcccccacaccacagacccgcgccgccgacgacccagcagccgccatggctctgctccgaggtgtgtttgtagttgctgctaagcgaacgccctttggagcttacggaggccttctgaaagacttcactgctactgacttgtctgaatttgctgccaaggctgccttgtctgctggcaaagtctcacctgaaacagttgacagtgtgattatgggcaatgtcctgcagagttcttcagatgctatatatttggcaaggcatgttggtttgcgtgtgggaatcccaaaggagaccccagctctcacgattaataggctctgtggttctggttttcagtccattgtgaatggatgtcaggaaatttgtgttaaagaagctgaagttgttttatgtggaggaaccgaaagcatgagccaagctccctactgtgtcagaaatgtgcgttttggaaccaagcttggatcagatatcaagctggaagattctttatgggtatcattaacagatcagcatgtccagctccccatggcaatgactgcagagaatcttgctgtaaaacacaaaataagcagagaagaatgtgacaaatatgccctgcagtcacagcagagatggaaagctgctaatgatgctggctactttaatgatgaaatggcaccaattgaagtgaagacaaagaaaggaaaacagacaatgcaggtagacgagcatgctcggccccaaaccaccctggaacagttacagaaacttcctccagtattcaagaaagatggaactgttactgcagggaatgcatcgggtgtagctgatggtgctggagctgttatcatagctagtgaagatgctgttaagaaacataacttcacaccactggcaagaattgtgggctactttgtatctggatgtgatccctctatcatgggtattggtcctgtccctgctatcagtggggcactgaagaaagcaggactgagtcttaaggacatggatttggtagaggtgaatgaagcttttgctccccagtacttggctgttgagaggagtttggatcttgacataagtaaaaccaatgtgaatggaggagccattgctttgggtcacccactgggaggatctggatcaagaattactgcacacctggttcacgaattaaggcgtcgaggtggaaaatatgccgttggatcagcttgcattggaggtggccaaggtattgctgtcatcattcagagcacagcctgaagagaccagtgagctcactgtgacccatccttactctacttggccaggccacagtaaaacaagtgaccttcagagcagctgccacaactggccatgccctgccattgaaacagtgattaagtttgatcaagccatggtgacacaaaaatgcattgatcatgaataggagcccatgctagaagtacattctctcagatttgaaccagtgaaatatgatgtatttctgagctaaaactcaactatagaagacattaaaagaaatcgtattcttgccaagtaaccaccacttctgccttagataatatgattataaggaaatcaaataaatgttgccttaacttcagttaatattttcctgtcatttatatttttaaaaattttaaattgtgataagatacacattacataaactttaccatcttaacccttttttagcgtacaattcactggtattaagtacattcacatttttatacaaacatccccactttttatcaacagaactttttcagtcaccacacatggaaacaataactcctgattctcccatcccccatcccctgacaaccaccagtgtattttgtttctataaatttgatgactcgaggtacctcataagtgaaattataaatatctgt

SEQ ID NO: 26907 - protein, 397 aa, Homo sapiens
MALLRGVFVVAAKRTPFGAYGGLLKDFTATDLSEFAAKAALSAGKVSPETVDSVIMGNVLQSSSDAIYLARHVGLRVGIPKETPALTINRLCGSGFQSIVNGCQEICVKEAEVVLCGGTESMSQAPYCVRNVRFGTKLGSDIKLEDSLWVSLTDQHVQLPMAMTAENLAVKHKISREECDKYALQSQQRWKAANDAGYFNDEMAPIEVKTKKGKQTMQVDEHARPQTTLEQLQKLPPVFKKDGTVTAGNASGVADGAGAVIIASEDAVKKHNFTPLARIVGYFVSGCDPSIMGIGPVPAISGALKKAGLSLKDMDLVEVNEAFAPQYLAVERSLDLDISKTNVNGGAIALGHPLGGSGSRITAHLVHELRRRGGKYAVGSACIGGGQGIAVIIQSTA

SEQ ID NO: 26908 - DNA, 1850 bp, Homo sapiens
gaaataactaatagaacaaaggaaatctatttaacttgatagcgaaggggtaggcacaggtgtgatttcctctatgataatctctcacacaggaaaccatgatttcagacaaatggtttatctttaaatctcttccacttttagcagatcacagttcagagcctcaaagaggctgtttaatttattatatttgtgtcagcaaataggtaccactaaatttctcactttagacctcacatttaaaactattaaactatatcaactttgggaagttgttcataatcatttggaaatgtatacattctcaaggacataactcagaccatagttttcctaggttcaaaagcctagtttcactacctattctaggtctcttagtacctccttgaagatggctctgtatatagagtagaaagataatggtggatctaagcacatatgaggcaccatcttgagagaccacaaagtatagtaggaaagagcacaagactgaattttatcccaactctgcaaaagttacctttcttagaatgagtttccttatctataaaattcctgaattaagatcatatgataatacagtactgtaaacttgaagtaaggtaattgccagtttgtgtaagtataacataatatacttttcagttctgccacatttcaacatagtaactgttccctttatgtacgtggctttgaaggtttattctttgttgtgtgtcagcttcttggaaggatagctcctagtactgcataataataataatacttgcaaccacttattgagtacttgccatgtttcaggtaacacactggacacttaatactcatgattttatctaactgtgacagtgactcttagcatgataccacagtcacattttcacacgcggaaacgtgaatttaaagagtttaaagaatatgcataaggtcacaccctaacaaatggtatagccaatatttgaaccatccatccagttctaaaacctgtgggctttctacagtatcccactgtgtctggtatgtgtcaatttatgggattactgagaattgcctctaagggatgcatttgactaaaagtattatttagtaaatatacacattttaaacctgatagctttatgcagaatgattgtagataaaataactttgcgaggtaatttaaataggaagaaacagcagacttagctgttgataggactggaccattctcatttaaaaattagtttgtgagtaaggatttttgttagtgctctaatttttgttttaaggtgaatgaagcttttgctccccagtacttggctgttgagaggagtttggatcttgacataagtaaaaccaatgtgaatggaggagccattgctttgggtcacccactgggaggatctggatcaagaattactgcacacctggttcacgaattaaggcgtcgaggtggaaaatatgccgttggatcagcttgcattggaggtggccaaggtattgctgtcatcattcagagcacagcctgaagagaccagtgagctcactgtgacccatccttactctacttggccaggccacagtaaaacaagtgaccttcagagcagctgccacaactggccatgccctgccattgaaacagtgattaagtttgatcaagccatggtgacacaaaaatgcattgatcatgaataggagcccatgctagaagtacattctctcagatttgaaccagtgaaatatgatgtatttctgagctaaaactcaactatagaagacattaaaagaaatcgtattcttgccaagtaaccaccacttctgccttagataatatgattataaggaaatcaaataaatgttgccttaacttc

SEQ ID NO: 26909 - protein, 77 aa, Homo sapiens [sequence omitted]

SEQ ID NO: 26910 - DNA, 1956 bp, Homo sapiens
cctcagcccttggctcctgcccagtgtttagggtgttggcggagacaaaggggaagagtcatcgcctgtcggggctaggatatgatgggtgagaggtgtcaaaccaaattctctcggtttggaaacggagaaaatctaaaaatgaggatgtgaggaaagagtccgctctcaaggcgcgttgtggtctatccgagccccgtcccctgggctccctcgggctggggtgaggcgggcagcgctacgcgtggggtaggaccatcttacgctgggaccccgccaaggagccccaggaagtaggtgaaagggcaggggcgtggctctcggggcgccacccacgctcttgaaatctgggtgattgcgagcggccgctcagcgtcccccacaccacagacccgcgccgccgacgacccagcagccgccatggctctgctccgaggtgtgtttgtagttgctgctaagcgaacgccctttggagcttacggaggccttctgaaagacttcactgctactgacttgtctgaatttgctgccaaggctgccttgtctgctggcaaagtctcacctgaaacagttgacagtgtgattatgggcaatgtcctgcagagttcttcagatgctatatatttggcaaggcatgttggtttgcgtgtgggaatcccaaaggagaccccagctctcacgattaataggctctgtggttctggttttcagtccattgtgaatggatgtcaggaaatttgtgttaaagaagctgaagttgttttatgtggaggaaccgaaagcatgagccaagctccctactgtgtcagaaatgtgcgttttggaaccaagcttggatcagatatcaagctggaagattctttatgggtatcattaacagatcagcatgtccagctccccatggcaatgactgcagagaatcttgctgtaaaacacaaaataagcagagaagaatgtgacaaatatgccctgcagtcacagcagagatggaaagctgctaatgatgctggctactttaatgatgaaatggcaccaattgaagtgaagacaaagaaaggaaaacagacaatgcaggtagacgagcatgctcggccccaaaccaccctggaacagttacagaaacttcctccagtattcaagaaagatggaactgttactgcagggaatgcatcgggtgtagctgatggtgctggagctgttatcatagctagtgaagatgctgttaagaaacataacttcacaccactggcaagaattgtgggctactttgtatctggatgtgatccctctatcatgggtattggtcctgtccctgctatcagtggggcactgaagaaagcaggactgagtcttaaggacatggatttggtagaggtgaatgaagcttttgctccccagtacttggctgttgagaggagtttggatcttgacataagtaaaaccaatgtgaatggaggagccattgctttgggtcacccactgggaggatctggatcaagaattactgcacacctggttcacgaattaaggcgtcgaggtggaaaatatgccgttggatcagcttgcattggaggtggccaaggtattgctgtcatcattcagagcacagcctgaagagaccagtgagctcactgtgacccatccttactctacttggccaggccacagtaaaacaagtgaccttcagagcagctgccacaactggccatgccctgccattgaaacagtgattaagtttgatcaagccatggtgacacaaaaatgcattgatcatgaataggagcccatgctagaagtacattctctcagatttgaaccagtgaaatatgatgtatttctgagctaaaactcaactatagaagacattaaaagaaatcgtattcttgccaagtaaccaccacttctgccttagataatatgattataaggaaatcaaataaatgttgccttaacttc

SEQ ID NO: 26911 - protein, 397 aa, Homo sapiens; identical to SEQ ID NO: 26907

SEQ ID NO: 26912 - DNA, 715 bp, Homo sapiens
gcccccagctggcggccgcggccgcccgcgcgccaagttcctcagcccttggctcctgcccagtgtttagggtgttggcggagacaaaggggaagagtcatcgcctgtcggggctaggatatgatgggtgagaggtgtcaaaccaaattctctcggtttggaaacggagaaaatctaaaaatgaggatgtgaggaaagagtccgctctcaaggtgtgtttgtagttgctgctaagcgaacgccctttggagcttacggaggccttctgaaagacttcactgctactgacttgtctgaatttgctgccaaggctgccttgtctgctggcaaagtctcacctgaaacagttgacagtgtgattatgggcaatgtcctgcagagttcttcagatgctatatatttggcaaggcatgttggtttgcgtgtgggaatcccaaaggagaccccagctctcacgattaataggctctgtggttctggttttcagtccattgtgaatggatgtcaggaaatttgtgttaaagaagctgaagttgttttatgtggaggaaccgaaagcatgagccaagctccctactgtgtcagaaatgtgcgttttggaaccaagcttggatcagatatcaagctggaagattctttatgggtatcattaacagatcagcatgtccagctccccatggcaatgactgcagagaatcttgctgtaaaacacaaa

SEQ ID NO: 26913 - protein, 117 aa, Homo sapiens
MGNVLQSSSDAIYLARHVGLRVGIPKETPALTINRLCGSGFQSIVNGCQEICVKEAEVVLCGGTESMSQAPYCVRNVRFGTKLGSDIKLEDSLWVSLTDQHVQLPMAMTAENLAVKH

SEQ ID NO: 26914 - DNA, 737 bp, Homo sapiens
cagctggcggccgcggccgcccgcgcgccaagttcctcagcccttggctcctgcccagtgtttagggtgttggcggagacaaaggggaagagtcatcgcctgtcggggctaggatatgatgggtgagaggtgtcaaaccaaattctctcggtttggaaacggagaaaatctaaaaatgaggatgtgaggaaagagtccgctctcaaggcgcgttgtggtctatccgagccccgtcccctgggctccctcgggctggggtgtgtttgtagttgctgctaagcgaacgccctttggagcttacggaggccttctgaaagacttcactgctactgacttgtctgaatttgctgccaaggctgccttgtctgctggcaaagtctcacctgaaacagttgacagtgtgattatgggcaatgtcctgcagagttcttcagatgctatatatttggcaaggcatgttggtttgcgtgtgggaatcccaaaggagaccccagctctcacgattaataggctctgtggttctggttttcagtccattgtgaatggatgtcaggaaatttgtgttaaagaagctgaagttgttttatgtggaggaaccgaaagcatgagccaagctccctactgtgtcagaaatgtgcgttttggaaccaagcttggatcagatatcaagctggaagattctttatgggtatcattaacagatcagcatgtccagctccccatggcaatgactgcag

SEQ ID NO: 26915 - protein, 109 aa, Homo sapiens
MGNVLQSSSDAIYLARHVGLRVGIPKETPALTINRLCGSGFQSIVNGCQEICVKEAEVVLCGGTESMSQAPYCVRNVRFGTKLGSDIKLEDSLWVSLTDQHVQLPMAMT

SEQ ID NO: 26916 - DNA, 772 bp, Homo sapiens
cagctggcggccgcggccgcccgcgcgccaagttcctcagcccttggctcctgcccagtgtttagggtgttggcggagacaaaggggaagagtcatcgcctgtcggggctaggatatgatgggtgagaggtgtcaaaccaaattctctcggtttggaaacggagaaaatctaaaaatgaggatgtgaggaaagagtccgctctcaaggcgcgttgtggtctatccgagccccgtcccctgggctccctcgggctggggtgtgtttgtagttgctgctaagcgaacgccctttggagcttacggaggccttctgaaagacttcactgctactgacttgtctgaatttgctgccaaggctgccttgtctgctggcaaagtctcacctgaaacagttgacagtgtgattatgggcaatgtcctgcagagttcttcagatgctatatatttggcaaggcatgttggtttgcgtgtgggaatcccaaaggagaccccagctctcacgattaataggctctgtggttctggttttcagtccattgtgaatggatgtcaggaaatttgtgttaaagaagctgaagttgttttatgtggaggaaccgaaagcatgagccaagctccctactgtgtcagaaatgtgcgttttggaaccaagcttggatcagatatcaagtttctcacctggcctttttggaagttgaaaggaatgggacttaagagaatctatgcggattttagccaccaaacacatttgagatatcttttatgaagacag

SEQ ID NO: 26917 - protein, 119 aa, Homo sapiens
MGNVLQSSSDAIYLARHVGLRVGIPKETPALTINRLCGSGFQSIVNGCQEICVKEAEVVLCGGTESMSQAPYCVRNVRFGTKLGSDIKFLTWPFWKLKGMGLKRIYADFSHQTHLRYLL

SEQ ID NO: 26918 - DNA, 1615 bp, Homo sapiens
agaggcttgggccgccgagctggacccggaccggttttggtgttctgagtcatgaagccctgcagagggagaggcgtgcactactgagttctctggtctgctgggcccagcacaacttccagggctctgcaggccatcaaatgaagtgctggttcttaggagagagatggcgtcaagccaactgcaaagaagcttttctaccagttctttaaggtcctggaagcagaggaagcagtgtgagaacagacatcagcccggcctgggatggtgggggtaaaatcctgcttgcagttggaggtgaccagtgcggcccatgggcagccgtcagaaatgcgccagtcagggacgctgccaggagagctgctcttcacaggctgttgccacctgctctggaactcaggaagtgggagatgatgagtcagagtccattctctcaaggcaagactcctcccaggtcaggctctctggcgccttgctgaatcccaagcctccccaagccaagcctcctccggttgccatgccaaccccccaggagacacactcagcctaggagtcccagggtggggcgggcagcgccctgggaaggaacggacaggtgtgagaatgcagggggcagggaggttggaagagcaagtgggcaagtgagattatccagggcccagcggcaaaacaggacactggtgtggccccagaccctagcagctgttgccactggaagcccatcagcccactgagacctagaacagcaagccgctgagggaggagtttgctgtcattaatgtcacctccatcccagctgagcagtggtcctctgtggccagggacacaaagaggagaagaggagccctgctccatccaccactagagccggcttcggtgactagagagtgacaggaagacagaagcgagtattccatggtggagcctctacaaacacattgggtgacaactttttaagatcagcctgttgacaggagttggcccagtcccagggatgtggccatcccaagctacacacctagttatagatgttgttaggaactttattcatcttgataaagaagcaaatctttaaaaatacttcttaaattgagaggcatctaaaaacccagcttaaatgacaggagaggcggcagaccgtaaaaccttattcagtgacctaagagtggcctctgcgtgagaggccagttggtagaaaggacccaggtgtctagagaaaattgagccaggaatctctgtggctaccgaaggtctcctgtgaaccctgagttctactcagactccgtctcccctgttaggtgccttgccaagcagcaccaaagcatgtgattccctggctccccagctccgctgcactgccacccctgcctcgtgttcatataaccctgtccagatccaaccccactgaatcctcggctacaactctgactcttgcaaaggattaaccaactcttggggccacaagacttggccagcccagtgaatggggagcccagggctgctccagactggatcgggaccaggacgctggtactatgaccaccatcagtccgaagctcctctgtacaatattatcaaatccacaagataaagcatttcttatgtcttttccacc

SEQ ID NO: 26919 - protein, 36 aa, Homo sapiens
MASSQLQRSFSTSSLRSWKQRKQCENRHQPGLGWWG

SEQ ID NO: 26920 - DNA, 492 bp, Homo sapiens
gaaaaagaataatgggccaggtgcagtggctcacgcctctaatgccagcactttgcgaggccgagtgctgggattacaggcgtgagccacggcgcccggcctatacatgagcatttgtgaagcttgtctaagatttgtacatttgattgcgtggatattttgccttaaaaagaactgtaaatgaataatgtgtgctgatgtgttcatgggtgtagagtactaaggtctgcattaaaaagataagatggtttgatggaagaacaggtggatagcaatatagcaaaatgttaacaattgggtcgatatgtgtccactgtacaagtcttcccacttttctgtaagtttgtaagttttcataatacaaatttggatttaaaaacaccccaacattgcaagagtgtcaccaaagtgtttgaaaagcaggattctagggggggcattcgctgacgactcagagaaaccgtccatgccacccaccacccctacgcactc

SEQ ID NO: 26921 - protein, 32 aa, Homo sapiens
MGQVQWLTPLMPALCEAECWDYRREPRRPAYT

SEQ ID NO: 26922 - DNA, 8192 bp, Homo sapiens
atgacaatagaagatacttcagtggaaacacatttttctgaaatggttgcactcaagatcgttggtggggcctccactaactgggggaattctctcatgctggtggtacctggacacccaggcacatacctgccgtgcacaagggtctggatccctgaccctgatgaggtatggcgctcagctgagttaaccaaggactacaaagaaggagacaagagcctacagctcagactggaggatgaaacgattctggaatacccaattgatgtacaacgcaaccagctgcccttcttacggaatccagatatcttggtgggagaaaatgacctgactgcccttagctatcttcatgagcctgcagttttgcataatttgaaggtccgtttcctggagtccaaccatatctacacttactgtggtatcgtacttgttgccattaatccttatgaacagttgccaatctatggacaagatgtcatctatacctacagtggccaaaacatgggagacatggacccccacatctttgctgtggcagaagaagcctacaagcagatggccagagatgagaagaatcagtccatcatagtcagtggggagtctggagccgggaagacggtatcagccaagtatgccatgcgctatttcgccaccgttggtggctcggccagtgaaaccaacatcgaagagaaggtgctggcatccagtcccatcatggaggccattggaaatgccaagaccacccgcaatgacaacagcagccgttttggcaagtacatccagattggctttgacaaaaggtaccacatcatcggggccaacatgaggacttacctcttggagaagtccagagtggtcttccaggcagatgatgagaggaattaccacatcttttaccagctctgtgctgctgccggtcttccagaatttaaagagcttgcactaacaagtgcagaggactttttctatacatcacagggaggagacacttccatcgagggtgtggacgatgctgaggactttgagaagactcgacaagccttcacactcctcggagtgaaagagtcccatcagatgagcatttttaagataattgcttctatcttgcaccttggaagtgtggcgattcaggctgagcgtgatggtgattcctgtagtatatcaccccaggatgtatacctaagcaacttctgccgactgctaggggtggagcacagtcagatggagcactggctgtgtcatcgcaagctggtcaccacctcggagacctacgtcaagaccatgtccctgcagcaggtgatcaatgcgcgcaacgccctggcgaagcacatctatgcccagttgttcggctggattgtggagcacatcaacaaggccctgcacacctccctcaagcagcactccttcatcggggtcctggacatctatgggtttgagacatttgaggtaaacagctttgagcagttctgtatcaactatgcaaatgaaaagctccagcagcagttcaactcgcatgttttcaaactggagcaagaagaatacatgaaggaacagatcccttggaccctgattgatttttatgataaccaaccttgtatcgacctcattgaagccaagctgggtatcttggacctgttggatgaagaatgtaaggtccccaaaggaactgaccagaactgggctcagaagctctatgaccggcactccagcagccagcacttccagaagccccgcatgtccaacacggccttcatcatcgtccactttgcagacaaggtggagtacctctctgatggttttctggagaaaaacagagacacggtgtatgaagagcagatcaatatcctgaaggccagcaagttcccactagtggctgacttgtttcatgatgacaaggaccctgttcctgccaccacccctgggaaggggtcatcttcgaagatcagcgtccgttctgccagaccccccatgaaagtctccaacaaggagcacaagaaaaccgttggccaccagttccgtacctccctgcatctgctcatggagaccctgaatgccacgacacctcactatgtccgctgcatcaagcccaacgatgagaagctcccctttcactttgacccaaagagagcagtgcagcaactcagagcctgcggggtgttggagacgattcgaatcagtgcagctggctacccatccaggtgggcctaccatgactttttcaaccggtatcgggtgctggtcaagaagagagagctcgccaacacagacaaaaaggccatctgcaggtctgtcctggagaacctcatcaaggaccccgacaagttccagtttggccgcaccaagatcttctttcgagcaggccaggtggcctacctggagaagctgcgggctgacaagttccggacagccaccatcatgatccagaaaactgtccggggatggctgcagaaggtgaaatatcacaggctgaagggggctaccttaaccctgcagaggtactgccggggacacctggcccgcaggctggctgagcacctgcggaggatcagagcggctgtggtgctccagaaacattaccgcatgcagagggcccgccaggcctaccagagggtccgcagagctgccgttgttatccaggccttcacccgggccatgtttgtgcggagaacctaccgccaggtcctcatggagcacaaggccaccaccatccagaagcacgtgcggggctggatggcacgcaggcacttccagcggctgcgggatgcagccattgtcatccagtgtgccttccggatgctcaaggccaggcgggagctgaaggccctcaggattgaggcccgctcagcagagcatctgaaacgtctcaacgtgggcatggagaacaaggtggtccagctgcagcggaagatcgatgagcagaacaaagagttcaagacactttcagagcagttgtccgtgaccacctcaacatacaccatggaggtagagcggctgaagaaggagctggtgcactaccagcagagcccaggtgaggacaccagcctcaggctgcaggaggaggtggagagcctgcgcacagagctgcagagggcccactcggagcgcaagatcttggaggacgcccacagcagggagaaagatgagctgaggaagcgagttgcagacctggagcaagaaaatgctctcttgaaagatgagaaagaacagctcaacaaccaaatcctgtgccagtctaaagatgaatttgcccagaactctgtgaaggaaaatctcatgaagaaagaactggaggaggagcgatcccggtaccagaaccttgtgaaggaatattcacagttggagcagagatacgacaaccttcgggatgaaatgaccatcataaagcaaactccaggtcataggcggaacccatcaaaccaaagtagcttagaatctgactccaattacccctccatctccacatctgagatcggagacactgaggatgccctccagcaggtggaggaaattggcctggagaaggcagccatggacatgacggtcttcctgaagctgcagaagagagtacgggagctggagcaggagaggaaaaagctgcaagtgcagctggagaagagagaacagcaggacagcaagaaagtccaggcggaaccaccacagactgacatagatttggacccgaatgcagatctggcctacaatagtctgaagaggcaagagctggagtcagagaacaaaaagctgaagaatgacctgaatgagctgaggaaagccgtggccgaccaagccacgcagaataactccagccacggctccccagatagctacagcctcctgctgaaccagctcaagctggcccacgaggagctcgaggtgcgcaaggaggaggtgctcatcctcaggacccagatcgtgagcgccgaccagcggcgactcgccggcaggaacgcggagccgaacattaatgccagatcaagttggcctaacagtgaaaagcatgttgaccaggaggatgccattgaggcctatcacggggtctgccagacaaacagcaagactgaggattggggatatttaaatgaagatggagaactcggcttggcctaccaaggcctaaagcaagttgccaggctgctggaggctcagctgcaggcccagagcctggagcatgaggaggaggtggagcatctcaaggctcagctcgaggccctgaaggaggagatggacaaacagcagcagaccttctgccagacgctactgctctccccagaggcccaggtggaattcggcgttcagcaggaaatatcccggctgaccaacgagaatctggaccttaaagaactggtagaaaagctggaaaagaatgagaggaagctcaaaaagcaactgaagatttacatgaagaaagcccaggacctagaagctgcccaggcattggcccagagtgagaggaagcgccatgagctcaacaggcaggtcacggtccagcggaaagagaaggatttccagggcatgctggagtaccacaaagaggacgaggccctcctcatccggaacctggtgacagacttgaagccccagatgctgtcgggcacagtgccctgtctccccgcctacatcctctacatgtgcatccggcacgcggactacaccaacgacgatctcaaggtgcactccctgctgacctccaccatcaacggcattaagaaagtcctgaaaaagcacaatgatgactttgagatgacgtcattctggttatccaacacctgccgccttcttcactgtctgaagcagtacagcggggatgagggcttcatgactcagaacactgcaaagcagaatgaacactgtcttaagaattttgacctcaccgaataccgtcaggtgctgagtgacctttccattcagatctaccagcagctcattaaaattgccgagggcgtgttacagccgatgatagtttctgccatgttggaaaatgagagcattcagggtctatctggtgtgaagcccaccggctaccggaagcgctcctccagcatggcagatggggataactcatactgcctggaagctatcatccgccagatgaatgcctttcatacagtcatgtgtgaccagggcttggaccctgagatcatcctgcaggtattcaaacagctcttctacatgatcaacgcagtgactcttaacaacctgctcttgcggaaggacgtctgctcttggagcacaggcatgcaactcaggtacaatataagtcagcttgaggagtggcttcggggaagaaaccttcaccagagtggagcagttcagaccatggaacctctgatccaagcagcccagctcctgcaattaaagaagaaaacccaggaggacgcagaggctatctgctccctgtgtacctccctcagcacccagcagattgtcaaaattttaaacctttatactcccctgaatgaatttgaagaacgggtaacagtggcctttatacgaacaatccaggcacaactacaagagcggaatgaccctcagcaactgctattagatgccaagcacatgtttcctgttttgtttccatttaatccatcttctctaaccatggactcaatccacatcccagcgtgtctcaatctggaattcctcaatgaagtctgaagatgcatgtttccagcattagtttgattcccaatgtgagcaagaaggaagtatatacagtaaagtaaattcaaggatctgttaaatctggtaaaagtagatcaaatcagagattgacagcctgtggagggtgctgaactatacagaattagacacaactatgtcattattttttgtacctactgctcagaataaaaacacttgaaatatggaagattttaagtttgatttcagtccaacacatatacataatttatagacaccaagcagtccccatagacatataaaaggtgtcaattctataaaacgaagctgcctagttttgatctttgcatagaactagagaatgtccaaattaaaataccaaatatatataagtcacataaattgccttcaaagggctttaacaaataatggtactaataaccatgataatggcatatactgacatttcccaaagtttgcaaaccataggtgtggttgagtttgtggtgagatgttttaagaacaaaaatatggggatgagacttctgagaaatattcccaaaatattttttaatggctgattatacacagacagtggtgtaactgacctccagaccagacattttgagtactggtttctgaagcaaaattagaagtgccagtcctcagtgtgctcaaacgcttttgtgttatcttgatttaatggaagagattattaaaatgctgctatcccaaactccaagtgagaaagatggaaaaatattttgtttctgatgctagtccatacactttccaagtcccacaaaactttcacaaaaatgtatataagctaaatattagaaacggataacaaacttgttttatttatagatgtaaaaaccaaacaagtcaatatgaaagcttttaatctcttaataccattaagcttccagtaagagcatcacataatgctctactgttccagaaaccaaatagtaaaacaaactaaagttcgcacatcagatcatctgaaaaaccttcaaaaataatcagttcagggatattatacaaaagtttgggttttttttttttaagagaataaaatggcttaggtcaactttcccttttcaggttattttcaacgtttttcaaatttagcacacaaaaaattgtaaatatctctcccacaaaataaggattttaaaaaagtaattcagtaatataacaggcttagatgtttgctgctcttagaattttttttaacttgtttttggtttcttcaaaagcaagcattcaattggaaacccatattctttccacacttttttttactgtcttttctgtatttcttgatagcagtatgctgttcccataagaaaaaaatggtatttgcaaatcatggaagaacagcctctgtattacattgagaaaataagatttatccatgaattggaagtagaacagcctgccttcaccctcttttactcaaccacccaacttaaaaggctcttggaaacacagcacactccacgctaccttctgcactgtgcccttagagcacagcttcctcagttgttctctgcatctcctggggcttaggccagtcttagcctgggttaaggctgctgacattgtgttccaatcagttgtcatgggcattatcccctctacatccacattaaacatgccggcttctcttgggcatcggcagagctgtgcctttttctttcagttacagttacataatcactgacgtccatgacacttacccatggatccatgtgctgacttcatttagaaggccaatctaaaacaactgggtttgtggctacctctttaaagttgtttgtgaaggataatttgttttttaatgcactttagtttgaaagtgagtctcttatgtaaggaccatccttaaaagaccaaaaatgccttgttagagtgttaaggagttttgacatgcagtggttccacaaacacagtggcttactatccttatacactgtcttataccatcattctctccatctctcttggtcactactctctgctgtcactggttaatcactaggtgccaagagcttactgaataaaagcttggcaattagaataaatggggagggaaggaccttatgaatagtccatttagcctaagaaatggcagatttagttcttctcttccaaaagataaaggtatatcctggaattgtacttaaaacttacagatgactaacaaatatatactttatatgtagttaatatttagatctgtcttatttaatacttggaggctagaagaagcatctttaggggaactatataatcttttgttagcattttctctgcattttaaaaaatcatttcaattcaaacatttatcagtgtcatgaaatcagtaatgactctttaacaattcaggtttgaactctgcattagatgtctctttaattttttaatatttaaaatttagttgacatttttttcaccaggtgcctttagcggttactaagataactgacatcagttgtttctctgaaataagtgttgctgtgggaataattttaatgttcaag

SEQ ID NO: 26923 - protein, 1884 aa, Homo sapiens
MTIEDTSVETHFSEMVALKIVGGASTNWGNSLMLVVPGHPGTYLPCTRVWIPDPDEVWRSAELTKDYKEGDKSLQLRLEDETILEYPIDVQRNQLPFLRNPDILVGENDLTALSYLHEPAVLHNLKVRFLESNHIYTYCGIVLVAINPYEQLPIYGQDVIYTYSGQNMGDMDPHIFAVAEEAYKQMARDEKNQSIIVSGESGAGKTVSAKYAMRYFATVGGSASETNIEEKVLASSPIMEAIGNAKTTRNDNSSRFGKYIQIGFDKRYHIIGANMRTYLLEKSRVVFQADDERNYHIFYQLCAAAGLPEFKELALTSAEDFFYTSQGGDTSIEGVDDAEDFEKTRQAFTLLGVKESHQMSIFKIIASILHLGSVAIQAERDGDSCSISPQDVYLSNFCRLLGVEHSQMEHWLCHRKLVTTSETYVKTMSLQQVINARNALAKHIYAQLFGWIVEHINKALHTSLKQHSFIGVLDIYGFETFEVNSFEQFCINYANEKLQQQFNSHVFKLEQEEYMKEQIPWTLIDFYDNQPCIDLIEAKLGILDLLDEECKVPKGTDQNWAQKLYDRHSSSQHFQKPRMSNTAFIIVHFADKVEYLSDGFLEKNRDTVYEEQINILKASKFPLVADLFHDDKDPVPATTPGKGSSSKISVRSARPPMKVSNKEHKKTVGHQFRTSLHLLMETLNATTPHYVRCIKPNDEKLPFHFDPKRAVQQLRACGVLETIRISAAGYPSRWAYHDFFNRYRVLVKKRELANTDKKAICRSVLENLIKDPDKFQFGRTKIFFRAGQVAYLEKLRADKFRTATIMIQKTVRGWLQKVKYHRLKGATLTLQRYCRGHLARRLAEHLRRIRAAVVLQKHYRMQRARQAYQRVRRAAVVIQAFTRAMFVRRTYRQVLMEHKATTIQKHVRGWMARRHFQRLRDAAIVIQCAFRMLKARRELKALRIEARSAEHLKRLNVGMENKVVQLQRKIDEQNKEFKTLSEQLSVTTSTYTMEVERLKKELVHYQQSPGEDTSLRLQEEVESLRTELQRAHSERKILEDAHSREKDELRKRVADLEQENALLKDEKEQLNNQILCQSKDEFAQNSVKENLMKKELEEERSRYQNLVKEYSQLEQRYDNLRDEMTIIKQTPGHRRNPSNQSSLESDSNYPSISTSEIGDTEDALQQVEEIGLEKAAMDMTVFLKLQKRVRELEQERKKLQVQLEKREQQDSKKVQAEPPQTDIDLDPNADLAYNSLKRQELESENKKLKNDLNELRKAVADQATQNNSSHGSPDSYSLLLNQLKLAHEELEVRKEEVLILRTQIVSADQRRLAGRNAEPNINARSSWPNSEKHVDQEDAIEAYHGVCQTNSKTEDWGYLNEDGELGLAYQGLKQVARLLEAQLQAQSLEHEEEVEHLKAQLEALKEEMDKQQQTFCQTLLLSPEAQVEFGVQQEISRLTNENLDLKELVEKLEKNERKLKKQLKIYMKKAQDLEAAQALAQSERKRHELNRQVTVQRKEKDFQGMLEYHKEDEALLIRNLVTDLKPQMLSGTVPCLPAYILYMCIRHADYTNDDLKVHSLLTSTINGIKKVLKKHNDDFEMTSFWLSNTCRLLHCLKQYSGDEGFMTQNTAKQNEHCLKNFDLTEYRQVLSDLSIQIYQQLIKIAEGVLQPMIVSAMLENESIQGLSGVKPTGYRKRSSSMADGDNSYCLEAIIRQMNAFHTVMCDQGLDPEIILQVFKQLFYMINAVTLNNLLLRKDVCSWSTGMQLRYNISQLEEWLRGRNLHQSGAVQTMEPLIQAAQLLQLKKKTQEDAEAICSLCTSLSTQQIVKILNLYTPLNEFEERVTVAFIRTIQAQLQERNDPQQLLLDAKHMFPVLFPFNPSSLTMDSIHIPACLNLEFLNEV

SEQ ID NO: 26924 - DNA, 8192 bp, Homo sapiens
cgcctcctccccacacctgggaggggagtggtgcggcgcggcctcctcccccggcgctcgcaactcctgtccggccgtagctgcgccgccgcggcgggagtaaaggtcgcgccgccgggagcgagccggccgcggcgcctgcgggaagccggcggggcaggtcggagaagagcgagaagatcgagaaactccaggccagcccgggaacatggcgccaggcgggccagccgcggactgagagccgcggggcagccaggagccggggcccgagccccgcccggcccgggccatgtcggtgggcgagctctacagccagtgcacaagggtctggatccctgaccctgatgaggtatggcgctcagctgagttaaccaaggactacaaagaaggagacaagagcctacagctcagactggaggatgaaacgattctggaatacccaattgatgtacaacgcaaccagctgcccttcttacggaatccagatatcttggtgggagaaaatgacctgactgcccttagctatcttcatgagcctgcagttttgcataatttgaaggtccgtttcctggagtccaaccatatctacacttactgtggtatcgtacttgttgccattaatccttatgaacagttgccaatctatggacaagatgtcatctatacctacagtggccaaaacatgggagacatggacccccacatctttgctgtggcagaagaagcctacaagcagatggccagagatgagaagaatcagtccatcatagtcagtggggagtctggagccgggaagacggtatcagccaagtatgccatgcgctatttcgccaccgttggtggctcggccagtgaaaccaacatcgaagagaaggtgctggcatccagtcccatcatggaggccattggaaatgccaagaccacccgcaatgacaacagcagccgttttggcaagtacatccagattggctttgacaaaaggtaccacatcatcggggccaacatgaggacttacctcttggagaagtccagagtggtcttccaggcagatgatgagaggaattaccacatcttttaccagctctgtgctgctgccggtcttccagaatttaaagagcttgcactaacaagtgcagaggactttttctatacatcacagggaggagacacttccatcgagggtgtggacgatgctgaggactttgagaagactcgacaagccttcacactcctcggagtgaaagagtcccatcagatgagcatttttaagataattgcttctatcttgcaccttggaagtgtggcgattcaggctgagcgtgatggtgattcctgtagtatatcaccccaggatgtatacctaagcaacttctgccgactgctaggggtggagcacagtcagatggagcactggctgtgtcatcgcaagctggtcaccacctcggagacctacgtcaagaccatgtccctgcagcaggtgatcaatgcgcgcaacgccctggcgaagcacatctatgcccagttgttcggctggattgtggagcacatcaacaaggccctgcacacctccctcaagcagcactccttcatcggggtcctggacatctatgggtttgagacatttgaggtaaacagctttgagcagttctgtatcaactatgcaaatgaaaagctccagcagcagttcaactcgcatgttttcaaactggagcaagaagaatacatgaaggaacagatcccttggaccctgattgatttttatgataaccaaccttgtatcgacctcattgaagccaagctgggtatcttggacctgttggatgaagaatgtaaggtccccaaaggaactgaccagaactgggctcagaagctctatgaccggcactccagcagccagcacttccagaagccccgcatgtccaacacggccttcatcatcgtccactttgcagacaaggtggagtacctctctgatggttttctggagaaaaacagagacacggtgtatgaagagcagatcaatatcctgaaggccagcaagttcccactagtggctgacttgtttcatgatgacaaggaccctgttcctgccaccacccctgggaaggggtcatcttcgaagatcagcgtccgttctgccagaccccccatgaaagtctccaacaaggagcacaagaaaaccgttggccaccagttccgtacctccctgcatctgctcatggagaccctgaatgccacgacacctcactatgtccgctgcatcaagcccaacgatgagaagctcccctttcactttgacccaaagagagcagtgcagcaactcagagcctgcggggtgttggagacgattcgaatcagtgcagctggctacccatccaggtgggcctaccatgactttttcaaccggtatcgggtgctggtcaagaagagagagctcgccaacacagacaaaaaggccatctgcaggtctgtcctggagaacctcatcaaggaccccgacaagttccagtttggccgcaccaagatcttctttcgagcaggccaggtggcctacctggagaagctgcgggctgacaagttccggacagccaccatcatgatccagaaaactgtccggggatggctgcagaaggtgaaatatcacaggctgaagggggctaccttaaccctgcagaggtactgccggggacacctggcccgcaggctggctgagcacctgcggaggatcagagcggctgtggtgctccagaaacattaccgcatgcagagggcccgccaggcctaccagagggtccgcagagctgccgttgttatccaggccttcacccgggccatgtttgtgcggagaacctaccgccaggtcctcatggagcacaaggccaccaccatccagaagcacgtgcggggctggatggcacgcaggcacttccagcggctgcgggatgcagccattgtcatccagtgtgccttccggatgctcaaggccaggcgggagctgaaggccctcaggattgaggcccgctcagcagagcatctgaaacgtctcaacgtgggcatggagaacaaggtggtccagctgcagcggaagatcgatgagcagaacaaagagttcaagacactttcagagcagttgtccgtgaccacctcaacatacaccatggaggtagagcggctgaagaaggagctggtgcactaccagcagagcccaggtgaggacaccagcctcaggctgcaggaggaggtggagagcctgcgcacagagctgcagagggcccactcggagcgcaagatcttggaggacgcccacagcagggagaaagatgagctgaggaagcgagttgcagacctggagcaagaaaatgctctcttgaaagatgagaaagaacagctcaacaaccaaatcctgtgccagtctaaagatgaatttgcccagaactctgtgaaggaaaatctcatgaagaaagaactggaggaggagcgatcccggtaccagaaccttgtgaaggaatattcacagttggagcagagatacgacaaccttcgggatgaaatgaccatcataaagcaaactccaggtcataggcggaacccatcaaaccaaagtagcttagaatctgactccaattacccctccatctccacatctgagatcggagacactgaggatgccctccagcaggtggaggaaattggcctggagaaggcagccatggacatgacggtcttcctgaagctgcagaagagagtacgggagctggagcaggagaggaaaaagctgcaagtgcagctggagaagagagaacagcaggacagcaagaaagtccaggcggaaccaccacagactgacatagatttggacccgaatgcagatctggcctacaatagtctgaagaggcaagagctggagtcagagaacaaaaagctgaagaatgacctgaatgagctgaggaaagccgtggccgaccaagccacgcagaataactccagccacggctccccagatagctacagcctcctgctgaaccagctcaagctggcccacgaggagctcgaggtgcgcaaggaggaggtgctcatcctcaggacccagatcgtgagcgccgaccagcggcgactcgccggcaggaacgcggagccgaacattaatgccagatcaagttggcctaacagtgaaaagcatgttgaccaggaggatgccattgaggcctatcacggggtctgccagacaaacagcaagactgaggattggggatatttaaatgaagatggagaactcggcttggcctaccaaggcctaaagcaagttgccaggctgctggaggctcagctgcaggcccagagcctggagcatgaggaggaggtggagcatctcaaggctcagctcgaggccctgaaggaggagatggacaaacagcagcagaccttctgccagacgctactgctctccccagaggcccaggtggaattcggcgttcagcaggaaatatcccggctgaccaacgagaatctggaccttaaagaactggtagaaaagctggaaaagaatgagaggaagctcaaaaagcaactgaagatttacatgaagaaagcccaggacctagaagctgcccaggcattggcccagagtgagaggaagcgccatgagctcaacaggcaggtcacggtccagcggaaagagaaggatttccagggcatgctggagtaccacaaagaggacgaggccctcctcatccggaacctggtgacagacttgaagccccagatgctgtcgggcacagtgccctgtctccccgcctacatcctctacatgtgcatccggcacgcggactacaccaacgacgatctcaaggtgcactccctgctgacctccaccatcaacggcattaagaaagtcctgaaaaagcacaatgatgactttgagatgacgtcattctggttatccaacacctgccgccttcttcactgtctgaagcagtacagcggggatgagggcttcatgactcagaacactgcaaagcagaatgaacactgtcttaagaattttgacctcaccgaataccgtcaggtgctgagtgacctttccattcagatctaccagcagctcattaaaattgccgagggcgtgttacagccgatgatagtttctgccatgttggaaaatgagagcattcagggtctatctggtgtgaagcccaccggctaccggaagcgctcctccagcatggcagatggggataactcatactgcctggaagctatcatccgccagatgaatgcctttcatacagtcatgtgtgaccagggcttggaccctgagatcatcctgcaggtattcaaacagctcttctacatgatcaacgcagtgactcttaacaacctgctcttgcggaaggacgtctgctcttggagcacaggcatgcaactcaggtacaatataagtcagcttgaggagtggcttcggggaagaaaccttcaccagagtggagcagttcagaccatggaacctctgatccaagcagcccagctcctgcaattaaagaagaaaacccaggaggacgcagaggctatctgctccctgtgtacctccctcagcacccagcagattgtcaaaattttaaacctttatactcccctgaatgaatttgaagaacgggtaacagtggcctttatacgaacaatccaggcacaactacaagagcggaatgaccctcagcaactgctattagatgccaagcacatgtttcctgttttgtttccatttaatccatcttctctaaccatggactcaatccacatcccagcgtgtctcaatctggaattcctcaatgaagtctgaagatgcatgtttccagcattagtttgattcccaatgtgagcaagaaggaagtatatacagtaaagtaaattcaaggatctgttaaatctggtaaaagtagatcaaatcagagattgacagcctgtggagggtgctgaactatacagaattagacacaactatgtcattattttttgtacctactgctcagaataaaaacacttgaaatatggaagattttaagtttgatttcagtccaacacatatacataatttatagacaccaagcagtccccatagacatataaaaggtgtcaattctataaaacgaagctgcctagttttgatctttgcatagaactagagaatgtccaaattaaaataccaaatatatataagtcacataaattgccttcaaagggctttaacaaataatggtactaataaccatgataatggcatatactgacatttcccaaagtttgcaaaccataggtgtggttgagtttgtggtgagatgttttaagaacaaaaatatggggatgagacttctgagaaatattcccaaaatattttttaatggctgattatacacagacagtggtgtaactgacctccagaccagacattttgagtactggtttctgaagcaaaattagaagtgccagtcctcagtgtgctcaaacgcttttgtgttatcttgatttaatggaagagattattaaaatgctgctatcccaaactccaagtgagaaagatggaaaaatattttgtttctgatgctagtccatacactttccaagtcccacaaaactttcacaaaaatgtatataagctaaatattagaaacggataacaaacttgttttatttatagatgtaaaaaccaaacaagtcaatatgaaagcttttaatctcttaataccattaagcttccagtaagagcatcacataatgctctactgttccagaaaccaaatagtaaaacaaactaaagttcgcacatcagatcatctgaaaaaccttcaaaaataatcagttcagggatattatacaaaagtttgggttttttttttttaagagaataaaatggcttaggtcaactttcccttttcaggttattttcaacgtttttcaaatttagcacacaaaaaattgtaaatatctctcccacaaaataaggattttaaaaaagtaattcagtaatataacaggcttagatgtttgctgctcttagaattttttttaacttgtttttggtttcttcaaaagcaagcattcaattggaaacccatattctttccacacttttttttactgtcttttctgtatttcttgatagcagtatgctgttcccataagaaaaaaatggtatttgcaaatcatggaagaacagcctctgtattacattgagaaaataagatttatccatgaattggaagtagaacagcctgccttcaccctcttttactcaaccacccaacttaaaaggctcttggaaacacagcacactccacgctaccttctgcactgtgcccttagagcacagcttcctcagttgttctctgcatctcctggggcttaggccagtcttagcctgggttaaggctgctgacattgtgttccaatcagttgtcatgggcattatcccctctacatccacattaaacatgccggcttctcttgggcatcggcagagctgtgcctttttctttcagttacagttacataatcactgacgtccatgacacttacccatggatccatgtgctgacttcatttagaaggccaatctaaaacaactgggtttgtggctacctctttaaagttgtttgtgaaggataatttgttttttaatgcactttagtttgaaagtgagtctcttatgtaaggaccatccttaaaagaccaaaaatgccttgttagagtgttaaggagttttgacatgcagtggttccacaaacacagtggcttactatccttatacactgtcttataccatcattctctccatctctcttggtcactactctctgctgtcactggttaatcactaggtgccaagagcttactgaataaaagcttggcaattagaataaatggggagggaaggaccttatgaatagtccatttagcctaagaaatggcagatttagttcttctcttccaaaagataaaggtatatcctggaattgtacttaaaacttacagatgactaacaaatatatactttatatgtagttaatatttagatctgtcttatttaatacttggaggctagaagaagcatctttaggggaactatataatcttttgttagcattttctctgcattttaaaaaatcatttcaattcaaacatttatcagtgtcatgaaa

SEQ ID NO: 26925 - protein, 1848 aa, Homo sapiens; identical to SEQ ID NO: 3605

SEQ ID NO: 26926 - DNA, 4091 bp, Homo sapiens
agccctacattctgctgctgctgcagagtgatgatttttaacagaccagaacttacacatctaaatgagtgttgttgttcagtgaagtcaccttaggacaatgatttaaataacaccgcgatttctcaagaagtttggaacttctcttatggttgagttcaaagccattttatgttatatgtggcccaaacaagttttattagtacaattaaatctttattgaggacttttgatggaccacatagtgaacttggactgggaatcaaaagaatggtaaggcagggtgtctgccttcactgtgcctgcagtctggctgagatgcacatgtgagccacactagcacaagccagcatgcactggcctgtcacaagagagtgcacaagggtctggatccctgaccctgatgaggtatggcgctcagctgagttaaccaaggactacaaagaaggagacaagagcctacagctcagactggaggatgaaacgattctggaatacccaattgatgtacaacgcaaccagctgcccttcttacggaatccagatatcttggtgggagaaaatgacctgactgcccttagctatcttcatgagcctgcagttttgcataatttgaaggtccgtttcctggagtccaaccatatctacacttactgtggtatcgtacttgttgccattaatccttatgaacagttgccaatctatggacaagatgtcatctatacctacagtggccaaaacatgggagacatggacccccacatctttgctgtggcagaagaagcctacaagcagatggccagagatgagaagaatcagtccatcatagtcagtggggagtctggagccgggaagacggtatcagccaagtatgccatgcgctatttcgccaccgttggtggctcggccagtgaaaccaacatcgaagagaaggtgctggcatccagtcccatcatggaggccattggaaatgccaagaccacccgcaatgacaacagcagccgttttggcaagtacatccagattggctttgacaaaaggtaccacatcatcggggccaacatgaggacttacctcttggagaagtccagagtggtcttccaggcagatgatgagaggaattaccacatcttttaccagctctgtgctgctgccggtcttccagaatttaaagagcttgcactaacaagtgcagaggactttttctatacatcacagggaggagacacttccatcgagggtgtggacgatgctgaggactttgagaagactcgacaagccttcacactcctcggagtgaaagagtcccatcagatgagcatttttaagataattgcttctatcttgcaccttggaagtgtggcgattcaggctgagcgtgatggtgattcctgtagtatatcaccccaggatgtatacctaagcaacttctgccgactgctaggggtggagcacagtcagatggagcactggctgtgtcatcgcaagctggtcaccacctcggagacctacgtcaagaccatgtccctgcagcaggtgatcaatgcgcgcaacgccctggcgaagcacatctatgcccagttgttcggctggattgtggagcacatcaacaaggccctgcacacctccctcaagcagcactccttcatcggggtcctggacatctatgggtttgagacatttgaggtaaacagctttgagcagttctgtatcaactatgcaaatgaaaagctccagcagcagttcaactcgcatgttttcaaactggagcaagaagaatacatgaaggaacagatcccttggaccctgattgatttttatgataaccaaccttgtatcgacctcattgaagccaagctgggtatcttggacctgttggatgaagaatgtaaggtccccaaaggaactgaccagaactgggctcagaagctctatgaccggcactccagcagccagcacttccagaagccccgcatgtccaacacggccttcatcatcgtccactttgcagacaaggtggagtacctctctgatggttttctggagaaaaacagagacacggtgtatgaagagcagatcaatatcctgaaggccagcaagttcccactagtggctgacttgtttcatgatgacaaggaccctgttcctgccaccacccctgggaaggggtcatcttcgaagatcagcgtccgttctgccagaccccccatgaaagtctccaacaaggagcacaagaaaaccgttggccaccagtgtacctccctcagcacccagcagattgtcaaaattttaaacctttatactcccctgaatgaatttgaagaacgggtaacagtggcctttatacgaacaatccaggcacaactacaagagcggaatgaccctcagcaactgctattagatgccaagcacatgtttcctgttttgtttccatttaatccatcttctctaaccatggactcaatccacatcccagcgtgtctcaatctggaattcctcaatgaagtctgaagatgcatgtttccagcattagtttgattcccaatgtgagcaagaaggaagtatatacagtaaagtaaattcaaggatctgttaaatctggtaaaagtagatcaaatcagagattgacagcctgtggagggtgctgaactatacagaattagacacaactatgtcattattttttgtacctactgctcagaataaaaacacttgaaatatggaagattttaagtttgatttcagtccaacacatatacataatttatagacaccaagcagtccccatagacatataaaaggtgtcaattctataaaacgaagctgcctagttttgatctttgcatagaactagagaatgtccaaattaaaataccaaatatatataagtcacataaattgccttcaaagggctttaacaaataatggtactaataaccatgataatggcatatactgacatttcccaaagtttgcaaaccataggtgtggttgagtttgtggtgagatgttttaagaacaaaaatatggggatgagacttctgagaaatattcccaaaatattttttaatggctgattatacacagacagtggtgtaactgacctccagaccagacattttgagtactggtttctgaagcaaaattagaagtgccagtcctcagtgtgctcaaacgcttttgtgttatcttgatttaatggaagagattattaaaatgctgctatcccaaactccaagtgagaaagatggaaaaatattttgtttctgatgctagtccatacactttccaagtcccacaaaactttcacaaaaatgtatataagctaaatattagaaacggataacaaacttgttttatttatagatgtaaaaaccaaacaagtcaatatgaaagcttttaatctcttaataccattaagcttccagtaagagcatcacataatgctctactgttccagaaaccaaatagtaaaacaaactaaagttcgcacatcagatcatctgaaaaaccttcaaaaataatcagttcagggatattatacaaaagtttgggttttttttttttaagagaataaaatggcttaggtcaactttcccttttcaggttattttcaacgtttttcaaatttagcacacaaaaaattgtaaatatctctcccacaaaataaggattttaaaaaagtaattcagtaatataacaggcttagatgtttgctgctcttagaattttttttaacttgtttttggtttcttcaaaagcaagcattcaattggaaacccatattctttccacacttttttttactgtcttttctgtatttcttgatagcagtatgctgttcccataagaaaaaaatggtatttgcaaatcatggaagaacagcctctgtattacattgagaaaataagatttatccatgaattggaagtagaacagcctgccttcaccctcttttactcaaccacccaacttaaaaggctcttggaaacacagcacactccacgctaccttctgcactgtgcccttagagcacagcttcctcagttgttctctgcatctcctggggcttaggccagtcttagcctggg

SEQ ID NO: 26927 - protein, 719 aa, Homo sapiens
MHWPVTRECTRVWIPDPDEVWRSAELTKDYKEGDKSLQLRLEDETILEYPIDVQRNQLPFLRNPDILVGENDLTALSYLHEPAVLHNLKVRFLESNHIYTYCGIVLVAINPYEQLPIYGQDVIYTYSGQNMGDMDPHIFAVAEEAYKQMARDEKNQSIIVSGESGAGKTVSAKYAMRYFATVGGSASETNIEEKVLASSPIMEAIGNAKTTRNDNSSRFGKYIQIGFDKRYHIIGANMRTYLLEKSRVVFQADDERNYHIFYQLCAAAGLPEFKELALTSAEDFFYTSQGGDTSIEGVDDAEDFEKTRQAFTLLGVKESHQMSIFKIIASILHLGSVAIQAERDGDSCSISPQDVYLSNFCRLLGVEHSQMEHWLCHRKLVTTSETYVKTMSLQQVINARNALAKHIYAQLFGWIVEHINKALHTSLKQHSFIGVLDIYGFETFEVNSFEQFCINYANEKLQQQFNSHVFKLEQEEYMKEQIPWTLIDFYDNQPCIDLIEAKLGILDLLDEECKVPKGTDQNWAQKLYDRHSSSQHFQKPRMSNTAFIIVHFADKVEYLSDGFLEKNRDTVYEEQINILKASKFPLVADLFHDDKDPVPATTPGKGSSSKISVRSARPPMKVSNKEHKKTVGHQCTSLSTQQIVKILNLYTPLNEFEERVTVAFIRTIQAQLQERNDPQQLLLDAKHMFPVLFPFNPSSLTMDSIHIPACLNLEFLNEV

SEQ ID NO: 26928 - DNA, 1713 bp, Homo sapiens
agagcaggtggcaacagcctgtgaagagcagctctcctggcagcgtccctgactggcgcatttctgacggctgcccatgggccgcactggtcacctccaactgcaagcaggattttacccccaccatcccaggccgggctgatgtctgttctcacactgcttcctctgcttccaggaccttaaagaactggtagaaaagctggaaaagaatgagaggaagctcaaaaagcaactgaagatttacatgaagaaagcccaggacctagaagctgcccaggcattggcccagagtgagaggaagcgccatgagctcaacaggcaggtcacggtccagcggaaagagaaggatttccagggcatgctggagtaccacaaagaggacgaggccctcctcatccggaacctggtgacagacttgaagccccagatgctgtcgggcacagtgccctgtctccccgcctacatcctctacatgtgcatccggcacgcggactacaccaacgacgatctcaaggtgcactccctgctgacctccaccatcaacggcattaagaaagtcctgaaaaagcacaatgatgactttgagatgacgtcattctggttatccaacacctgccgccttcttcactgtctgaagcagtacagcggggatgagggcttcatgactcagaacactgcaaagcagaatgaacactgtcttaagaattttgacctcaccgaataccgtcaggtgctgagtgacctttccattcagatctaccagcagctcattaaaattgccgagggcgtgttacagccgatgatagtttctgccatgttggaaaatgagagcattcagggtctatctggtgtgaagcccaccggctaccggaagcgctcctccagcatggcagatggggataactcatactgcctggaagctatcatccgccagatgaatgcctttcatacagtcatgtgtgaccagggcttggaccctgagatcatcctgcaggtattcaaacagctcttctacatgatcaacgcagtgactcttaacaacctgctcttgcggaaggacgtctgctcttggagcacaggcatgcaactcaggtacaatataagtcagcttgaggagtggcttcggggaagaaaccttcaccagagtggagcagttcagaccatggaacctctgatccaagcagcccagctcctgcaattaaagaagaaaacccaggaggacgcagaggctatctgctccctgtgtacctccctcagcacccagcagattgtcaaaattttaaacctttatactcccctgaatgaatttgaagaacgggtaacagtggcctttatacgaacaatccaggcacaactacaagagcggaatgaccctcagcaactgctattagatgccaagcacatgtttcctgttttgtttccatttaatccatcttctctaaccatggactcaatccacatcccagcgtgtctcaatctggaattcctcaatgaagtctgaagatgcatgtttccagcattagtttgattcccaatgtgagcaagaaggaagtatatacagtaaagtaaattcaaggatctgttaaatctggtaaaagtagatcaaatcagagattgacagcctgtggagggtgctgaactatacagaattagacacaactatgtcattattttttgtacctactgctcagaataaaaacacttgaaatatgg

SEQ ID NO: 26929 - protein, 418 aa, Homo sapiens; identical to SEQ ID NO: 3611

SEQ ID NO: 26930 - DNA, 2723 bp, Homo sapiens
agccctacattctgctgctgctgcagagtgatgatttttaacagaccagaacttacacatctaaatgagtgttgttgttcagtgaagtcaccttaggacaatgatttaaataacaccgcgatttctcaagaagtttggaacttctcttatggttgagttcaaagccattttatgttatatgtggcccaaacaagttttattagtacaattaaatctttattgaggacttttgatggaccacatagtgaacttggactgggaatcaaaagaatggtaaggcagggtgtctgccttcactgtgcctgcagtctggctgagatgcacatgtgagccacactagcacaagccagcatgcactggcctgtcacaagagagtgcacaagggtctggatccctgaccctgatgaggtatggcgctcagctgagttaaccaaggactacaaagaaggagacaagagcctacagctcagactggaggatgaaacgattctggaatacccaattgatgtacaacgcaaccagctgcccttcttacggaatccagatatcttggtgggagaaaatgacctgactgcccttagctatcttcatgagcctgcagttttgcataatttgaaggtccgtttcctggagtccaaccatatctacacttactgtggtatcgtacttgttgccattaatccttatgaacagttgccaatctatggacaagatgtcatctatacctacagtggccaaaacatgggagacatggacccccacatctttgctgtggcagaagaagcctacaagcagatggccagagatgagaagaatcagtccatcatagtcagtggggagtctggagccgggaagacggtatcagccaagtatgccatgcgctatttcgccaccgttggtggctcggccagtgaaaccaacatcgaagagaaggtgctggcatccagtcccatcatggaggccattggaaatgccaagaccacccgcaatgacaacagcagccgttttggcaagtacatccagattggctttgacaaaaggtaccacatcatcggggccaacatgaggacttacctcttggagaagtccagagtggtcttccaggcagatgatgagaggaattaccacatcttttaccagctctgtgctgctgccggtcttccagaatttaaagagcttgcactaacaagtgcagaggactttttctatacatcacagggaggagacacttccatcgagggtgtggacgatgctgaggactttgagaagactcgacaagccttcacactcctcggagtgaaagagtcccatcagatgagcatttttaagataattgcttctatcttgcaccttggaagtgtggcgattcaggctgagcgtgatggtgattcctgtagtatatcaccccaggatgtatacctaagcaacttctgccgactgctaggggtggagcacagtcagatggagcactggctgtgtcatcgcaagctggtcaccacctcggagacctacgtcaagaccatgtccctgcagcaggtgatcaatgcgcgcaacgccctggcgaagcacatctatgcccagttgttcggctggattgtggagcacatcaacaaggccctgcacacctccctcaagcagcactccttcatcggggtcctggacatctatgggtttgagacatttgaggtaaacagctttgagcagttctgtatcaactatgcaaatgaaaagctccagcagcagttcaactcgcatgttttcaaactggagcaagaagaatacatgaaggaacagatcccttggaccctgattgatttttatgataaccaaccttgtatcgacctcattgaagccaagctgggtatcttggacctgttggatgaagaatgtaaggtccccaaaggaactgaccagaactgggctcagaagctctatgaccggcactccagcagccagcacttccagaagccccgcatgtccaacacggccttcatcatcgtccactttgcagacaaggtggagtacctctctgatggttttctggagaaaaacagagacacggtgtatgaagagcagatcaatatcctgaaggccagcaagttcccactagtggctgacttgtttcatgatgacaaggaccctgttcctgccaccacccctgggaaggggtcatcttcgaagatcagcgtccgttctgccagaccccccatgaaagtctccaacaaggagcacaagaaaaccgttggccaccagtgtacctccctcagcacccagcagattgtcaaaattttaaacctttatactcccctgaatgaatttgaagaacgggtaacagtggcctttatacgaacaatccaggcacaactacaagagcggaatgaccctcagcaactgctattagatgccaagcacatgtttcctgttttgtttccatttaatccatcttctctaaccatggactcaatccacatcccagcgtgtctcaatctggaattcctcaatgaagtctgaagatgcatgtttccagcattagtttgattcccaatgtgagcaagaaggaagtatatacagtaaagtaaattcaaggatctgttaaatctggtaaaagtagatcaaatcagagattgacagcctgtggagggtgctgaactatacagaattagacacaactatgtcattattttttgtacctactgctcagaataaaaacacttgaaatatgg

SEQ ID NO: 26931 - protein, 719 aa, Homo sapiens; identical to SEQ ID NO: 26927

SEQ ID NO: 26932 - DNA, 742 bp, Homo sapiens
gcaggtggcaacagcctgtgaagagcagctctcctggcagcgtccctgactggcgcatttctgacggctgcccatgggccgcactggtcacctccaactgcaagcaggattttacccccaccatcccaggccgggctgatgtctgttctcacactgcttcctctgcttccaggaccttaaagaactggtagaaaagctggaaaagaatgagaggaagctcaaaaagcaactgaagatttacatgaagaaagcccaggacctagaagctgcccaggcattggcccagagtgagaggaagcgccatgagctcaacaggcaggtcacggtccagcggaaagagaaggatttccagggcatgctggagtaccacaaagaggacgaggccctcctcatccggaacctggtgacagacttgaagccccagatgctgtcgggcacagtgccctgtctccccgcctacatcctctacatgtgcatccggcacgcggactacaccaacgacgatctcaaggtgcactccctgctgacctccaccatcaacggcattaagaaagtcctgaaaaagcacaatgatgactttgagatgacgtcattctggttatccaacacctgccgccttcttcactgtctgaagcagtacagcggggatgagggcttcatgactcagaacactgcaaagcagaatgaacactgtcttaagaattttgacctcaccgaataccgtcaggtgctgagtgacctt

SEQ ID NO: 26933 - protein, 166 aa, Homo sapiens
MKKAQDLEAAQALAQSERKRHELNRQVTVQRKEKDFQGMLEYHKEDEALLIRNLVTDLKPQMLSGTVPCLPAYILYMCIRHADYTNDDLKVHSLLTSTINGIKKVLKKHNDDFEMTSFWLSNTCRLLHCLKQYSGDEGFMTQNTAKQNEHCLKNFDLTEYRQVLSD

SEQ ID NO: 26934 - DNA, 367 bp, Homo sapiens
gcaagagtggcaaaagtggagtccagagagaacagaaagaatactgggatgagtttctgaatacagccagccacatccgggaagtggaaaagaacgagacattgcctccctctcagccttcaagatgccaaggtagcagagggctttggctatggccagcccattcttgcggaggacagttggcctgggagcaacacaggctgtaacagattcatgtgttctgctgaggaacagctggggagagaatggggtagaaggtggggaagttttgaccccaggaagcaggacataggatttcctgggattttatatcctcatcagtcctctgttactttcttgtggtacttcctaataataaattagcatc

SEQ ID NO: 26935 - protein, 49 aa, Homo sapiens
MCSAEEQLGREWGRRWGSFDPRKQDIGFPGILYPHQSSVTFLWYFLIIN

SEQ ID NO: 26936 - DNA, 3047 bp, Homo sapiens
ccgagcgaggcgccagcccgtgggtgctgccgggggcggcggcgcggtgggggctcccgcagctggcggaggcgcgggccgcggcgctgggctcgcggcggggagcgaaggtgagcgccagaacgcggagggctggcgcggctcgcggcgccgggccccgttccccgtccgcggcggccctgcaggcgaccccgcgtccccaccggcgggagctcggggaagagcgggcggcggcgctgctgctggcggcggccggctggatgcgagacccgcgcagacccggcggcggacggcggctctcgactccggagagcggatcgcggggcgcaggagcccgatcgcgctggccatggcctccaactttaacgacatagtcaagcagggctacgtgaaaatccgcagcaggaagcttgggattttcagacgatgctggttggttttcaagaaggcttctagcaaaggacccagaaggttagaaaaatttccagatgaaaaggcagcttatttcagaaactttcataaggtaactgaactgcacaatatcaaaaatataaccagactgccccgagagacaaagaagcatgcggtggcaatcatctttcacgatgaaacatcgaagacatttgcctgtgagtcagagctggaggccgaggagtggtgcaagcacctctgcatggagtgtctggggaccaggctcaatgatatcagccttggggagcccgaccttctggccgcaggagtgcagcgggaacagaatgagagattcaacgtgtatcttatgcctacaccaaacctggatatttatggtgaatgcacaatgcagatcactcatgaaaatatctatctctgggatatccacaatgccaaggtcaaactggtgatgtggcctctcagctcactgaggagatacggtcgggactcaacgtggttcacgtttgagtcaggaagaatgtgtgacacaggagaaggactattcacttttcaaacaagggaaggagaaatgatctatcagaaggttcattctgcgacactggccatagctgagcaacatgaaagattaatgctagaaatggaacagaaggcccggcttcagacaagcttgactgaaccaatgacattatccaaatcaatatctcttcctcgcagcgcgtactggcatcacatcactcgtcagaacagcgttggtgaaatctacagtttgcaaggcaagtcactttaatgtcatgggtttggttcgtcaaagatgtctcgtgcacagacatttcccagctacgccccagaacagagtgaagaggcccagcagccgttgtcgcggtccagcagctatggattcagctacagctccagcctcatccaatgacacacagagagccgctgttgactagagagacagtctgtcctggacccgtctgtggggtcattaccctctgcctcctggaagaccaattgcagtacaaattgaaatgggtcggctctagccccagtcccattggaaggttaaaaactggagttctgcttccttgattcagtggctaagtcctttatttattgaatttctttgggggaatctatgttttacataaatagaatccaaatcgtatgaacagttatttaaataaacaaaattctttgggtctgacagtaacagaaacctcagcactgggaaaagttgcccacactggggtatgcctgggtgatgggcacctctcactgacctcacagcgcagtccgcccatctgagcacagggtctgtccttagacataatggtgaccctccacaagctctgtggcttttaaagttctgacagggataaatacagtaagctctgcaaatgacatcgtagctgcatataaataaacccagtgacaattaaaggaacatgaaattcagaacacactattaagcagggccctgtagctctactcgtgtgtgtgtgtgcgtgtgtgtgtgtgtgtgtagacaaatggatattgctatatccatctatatataacaagtatatatcaaacatgtgctgagggtgacaggatatgctcacttaaattgttgaaaaccataatttggtgcattaaagttaagattgttatgttgaatagctatttttaaaatagtgctgtaaaaaaaaaaaaaaaaaaggcttcttattagcaaaagtatatgtaatccagtctgttcctaacaagtgtaagcaaaaatgtgagaaggggaacattcagaagcaaaagaaccagtctagctgtcctacacatcatgtcataccctgtctttctggtgagcgtttccttgttgctgacaatgttgctccctgtggccatccatctgagctacgtgaggaggattccatgtgaacgccgatcagcttccatttaaccttgagagaaaagagaggttctaaatgaagaactctttaagaaagaaagaatacacccataaagaactcagctattttgcagtaaagagaagaacaaaatgggtacaggattgtggatatcatagatgctgttctcacacaaccactgggggcttgtaatttactgtgtaaccagaacttgcagggctttattttttcttttactggacacaggttgtctgagattataagaaataaaatagatcaataattttcatcatccctgacactgattacaaacctacagtgtttaaagggaggtagtgaattccacggaaactgagtttggctaattcaggtcaacaaagatatatttgcccttaattctggagttaagtaaaaataaaaattatcctgcctgaatcatctgatgctttgtgcctaagatggttatctctcaaatactctagggtgggtttaaagaacagtgagctcaggtcacgcaagatgaaaacccaggttttttttttcttaataggaaaattttttaaactatccaaattagtctgttgaaagggtaccttttttgctgatctctgatgagttgtcttttcatccctatctgtagcttgagtgcagattgacaattcatttcagtgaattactaccgaataaaagtggttccggatccctcct

SEQ ID NO: 26937 - protein, 289 aa, Homo sapiens
MASNFNDIVKQGYVKIRSRKLGIFRRCWLVFKKASSKGPRRLEKFPDEKAAYFRNFHKVTELHNIKNITRLPRETKKHAVAIIFHDETSKTFACESELEAEEWCKHLCMECLGTRLNDISLGEPDLLAAGVQREQNERFNVYLMPTPNLDIYGECTMQITHENIYLWDIHNAKVKLVMWPLSSLRRYGRDSTWFTFESGRMCDTGEGLFTFQTREGEMIYQKVHSATLAIAEQHERLMLEMEQKARLQTSLTEPMTLSKSISLPRSAYWHHITRQNSVGEIYSLQGKSL

SEQ ID NO: 26938 - DNA, 347 bp, Homo sapiens
ccaaccttatctcatcgtggcctacttgaaccgagtgtccgatctcccctacccgctgggtatccagccttagcgcgcaccgactacaacttcaactttccacccatctccaggggaaattgattttgaaaaagcaggctgctgccaccacagcattatgatcctttccggctgctgaccaatctgtattttgtgaacttcacaagaggaatgagaacactggctgctgtgttacaactgggtggggggttgcacggagaagagagaaaaggatcagggagaccatttaagatgctctggtgatattacagctgaaagagacgtctaatcaataaatatcgaatgag

SEQ ID NO: 26939 - protein, 30 aa, Homo sapiens
MRTLAAVLQLGGGLHGEERKGSGRPFKMLW

SEQ ID NO: 26940 - DNA, 860 bp, Homo sapiens
ttcttatggtagtgaataactctcatgagacctgatggttttataaggggaaacccgtttcgcttggccctcattctctcgtctgctgccatgtaaaatgtgcctttcgctgtctgccatgattttgaggcctctccagccacgtggaaccacagggtctcactttgtcacccaggcaggagtgcagtggcatgatcatggctcactgcagcctcaaccttccaggctcaagcaattctcccacactaccctcctgaggagctggggtcacaggcaagcatgaggaaagcctgcatgcctgctaaggcactgttgtaattaagcaagtctatcctgcaaacttactatcacaatctggagggaacactttcttgagttttgaatggcacctgcagttcactgagcagaatggagttacaaggactctagtgttacaagggatcagaagaaagcagcagccaagaaaagcaaagactagagaggaaatcagcagacaactgagtacttcgtagtctgtcccaatgctatggaaagatagatgctcattccttccaaagaggctgaaacagctttcaagagagtcaagagaatgagtcttctaagatagatggggcctcaaaactctttcatctaataacatcactgtatcattaaagaacagcaattactccttttatggcaattgtgaatgagagttcattcctgatttggctctcagcttgactgttgttggtgtataggaatactagtaatttgtgcacattgattttttgtatcctgagactttgctgaagtttattagcttaagaagcttttgggctgagactatgggggttttctagatataggttcatgcaggg

SEQ ID NO: 26941 - protein, 61 aa, Homo sapiens
MCLSLSAMILRPLQPRGTTGSHFVTQAGVQWHDHGSLQPQPSRLKQFSHTTLLRSWGHRQA

SEQ ID NO: 26942 - DNA, 2944 bp, Homo sapiens
tcttctgtcggagtccgccggtccgcagcctgcggcagggaggcccgggcacccgcaggtggcgccccacgtccgtgtttgcgccctcagccgagctccaggcgcagctgggaaacccagcgcgtctccccgggtcctttgagcgagcgcggacaccgcaatttaataaataagcgcaagcgccagccgctccaccagtccgaggtccagaggagcagacacacagacccgggccggaggcccctcttctagccctgcgggaaccggacagttccccaactgggactctggaaccacagctcctaaatcatcaaattctcaagctttttttttccctctcttcgtcccagccatcccagtcttcttcttcttttttttttttttaacttattgtttttttcgctcctgtcattatgaaagtggtcacgccattcaatattaagacttggagggaattggggaaagaaaagaaagaatctaaaagaagagaagcgaccggtgcttttaagggtgtctaattttcaaaagagacgtctgggagtattttgctctgggcgtttggagcaacttcgcggacagcggagctcgcccagcatggatgttccaggttcacaggcgcctttcttctgagaacgaccctggccttgaacgtcagagccggggacgaaggcccccggaggctgctgcgagctccgcgcgttccttcgcgcccttccgcgccgctcgcgccggcgccggcctccacccccgcgcgccgcctcccaccagtcccgatgcaggcgcccggccgggggccactcgggctgcggctgatgatgcccgggcgccggggggcgctgcgcgagccgggcggctgcggatcctgcctgggggtggcgctggccctgctgttgctgctactgcccgcctgctgccccgtgcgggcgcagaacgacacggagcccatcgtgctggagggcaagtgcctggtggtgtgcgactccagcccgtcggcggacggcgccgtcacctcctccctaggcatctccgtgcgctccggcagcgccaaggtggccttctccgccacgcggagcaccaaccacgagccgtccgagatgagcaaccgcaccatgaccatctatttcgaccaggtattagtaaatattggcaaccactttgatcttgcttccagtatatttgtagcaccgagaaaagggatttatagcttcagcttccacgtggtcaaagtgtataacagacaaaccatccaggtcagtttaatgcagaatggctacccagtgatctcggcctttgcaggagaccaggatgtcaccagagaagctgctagcaatggcgtgctgctgctcatggaaagggaagacaaagtgcatctcaaacttgagagaggcaacctcatggggggctggaaatactccacattctcgggcttcttggtgtttcctctataaacacagagccccctagatggtgggggaatggcaaactggacccaggactccgccctttaaaacaccctgaacttactggaattggacaccttgtttccaacctccgtcagactgttgcagtagaagaatgatttcctttgaaacctccagtacttttgtttttgttttttggaatactgacaattcctcgggaacctggcctctaattagttttagatgacaaggtcttaaggagaaatgaaattatcgatttgagcaatttgtacctgtgattgtaaagtcaatatcggattttattgttgggaccatggacctcttttgtttgtatgttgtattgtcgtcccaacggaaggagagctcctgactccaggatgggctgcaggttgcagtcagggcttgaagtaggagcccagcaaagaaccacctgctggacagtccttgacatgtgttctgtgtgtgtctgtatagccttaagaaaaagaatggcttcactttcattctgtattcttccccccaccatgtggctgggaggacttgggagggggatggggacattgggaacctgtcaagaagtgctttatccagagaagcaaattttgcacgattggactgcaatttttgttttgtattgtttgtgttttttcttgaaaagctttacttttctttccacactcagctctccctcctcaaccccacttttatttttcttgctggggttgaggagagaaaatatagaattcctggataagaccaaacaaaacaaaacattaaaatacctgtatgttttgttttagacgagaccaaactaaacaaaaagtatctgtttatcaaagtaaaagtaacacaatggacaattctgcttattctctcaaagagattctaagatgcacctttagaactattaatagcaacctgcatttttttttaatttatacttcagaatcctttaagaacctggtgttcctgagtggtcctgaatcatataagttggtaatggaagctgtaatgaccaagtcccctaaacatactatgtctttgccacgtgtgctgtgacttctctgtgggtgatttaatttatttggatccacctctgagtgagcgcacagtgatcaggtgcttcaaagccaacagaccagctcctcttcctccggatcctcttttgatctgcccaggaaagggatgcattgacactctcctgcatgcacctggcgagaagccacctgaaagtcactgtggttaaagatattggtggaggtaccccaggagcactgttacaaatccttcttgttttggcatctcgtacaacattattaagacacagctgagagttgatgggtgtgtaatgcatatgccaaggaaatgtcactaatcccaaagcaatcaaaaaggagacctcaaaccagatgttaatttgttctttgtgtaacaatgtaaccaaaatattgatgataaaagtcataatttaagattcagaataaatgggtttgatgtctggc

SEQ ID NO: 26943 - protein, 224 aa, Homo sapiens; identical to SEQ ID NO: 3615

SEQ ID NO: 26944 - DNA, 3338 bp, Homo sapiens
tcatctacagcagggctaaattctacctgaatttatcagtttccagaatgtaaaattgaggtgaaggagttgaggtgaaaggaagaagcagctccagaggcttaaatggagaatgctttattcttttctaaaagctttgtaaggaagacagcgagcatagccttgtgagactgagaataggcatcccgaggtgtttgtcttaacaatggaacccagagtgtctgtctcagtcctgcccttgagtggagctgaagtggtgctcacagctgggttgaagaagctgaaacaggcatatttcacaagtcatttcggcgattgtcattggcagcatttcacattgcgctgggaactgcatgttattcatctataatgagtgtgtaagaaataacagcaaaggtattccagttgaagtttgtattcccattaggtaacaaaatcttaaacccaggattttgatgttgttgttggctgtttgttttaaaaggcaggccatcttattataaagcagttgtgcatttatggatgaggaggatggagacagcatccagacaaagtggccagagtctgtgttgagcatctgaaagaaattgggtcatcacgggggtcccgccactcttgaaattctgcttatgaaacactcacccctgcccttttatctgaggaaagccatctgcagggtcatgcgcacattccaggtggctaattttgtcattgttttgcatgttgtagagttcccattagcttaagctaaggatgtccaagctgccggttctctatttattcaagctcatttacagggcaccatggctcaggcaagggagcagcacattgctcagggaaaattaaggaaaaacaggagtagcaaatgtttttctacaaaggtctttcattcaccacccatcatcaaccacctactgtgtgagtccagagtgtgccaggaactgagaaacactggagatccaaacctcacagagaccattgtctctgggagcacgtgaagttaggtcccaagcttgaacttacagaagtgatctcctttaattggcctcttgccccatagccgcttctctacccattcagaatggaacttttttgtttgtttgtttgtttgtttgttcgtttttttgtcaaacaaggcatcatgctgatgcccccatattcccacagacctccctggactcaatttaggatttgtttaacaagcttaccatcttcgattcctttctctctgccctgcccctcaacttacaaaattcacagccagtttttgaatgcataattaaaatatgctttagaaatcttgattagttacaatttattaaaatacctttgagattacttcctgctataggatcttttaacttcagcactgcctccttcctggggaagccagaatgctgaggatgctgaatttgtgttcccagccgctgatgaaggaggcagtgttgctggttatccaaggatgatgaaaacatacaccgaggaggggcttgccattgtgtgctgtgttccctcttctttttcaggtattagtaaatattggcaaccactttgatcttgcttccagtatatttgtagcaccgagaaaagggatttatagcttcagcttccacgtggtcaaagtgtataacagacaaaccatccaggtcagtttaatgcagaatggctacccagtgatctcggcctttgcaggagaccaggatgtcaccagagaagctgctagcaatggcgtgctgctgctcatggaaagggaagacaaagtgcatctcaaacttgagagaggcaacctcatggggggctggaaatactccacattctcgggcttcttggtgtttcctctataaacacagagccccctagatggtgggggaatggcaaactggacccaggactccgccctttaaaacaccctgaacttactggaattggacaccttgtttccaacctccgtcagactgttgcagtagaagaatgatttcctttgaaacctccagtacttttgtttttgttttttggaatactgacaattcctcgggaacctggcctctaattagttttagatgacaaggtcttaaggagaaatgaaattatcgatttgagcaatttgtacctgtgattgtaaagtcaatatcggattttattgttgggaccatggacctcttttgtttgtatgttgtattgtcgtcccaacggaaggagagctcctgactccaggatgggctgcaggttgcagtcagggcttgaagtaggagcccagcaaagaaccacctgctggacagtccttgacatgtgttctgtgtgtgtctgtatagccttaagaaaaagaatggcttcactttcattctgtattcttccccccaccatgtggctgggaggacttgggagggggatggggacattgggaacctgtcaagaagtgctttatccagagaagcaaattttgcacgattggactgcaatttttgttttgtattgtttgtgttttttcttgaaaagctttacttttctttccacactcagctctccctcctcaaccccacttttatttttcttgctggggttgaggagagaaaatatagaattcctggataagaccaaacaaaacaaaacattaaaatacctgtatgttttgttttagacgagaccaaactaaacaaaaagtatctgtttatcaaagtaaaagtaacacaatggacaattctgcttattctctcaaagagattctaagatgcacctttagaactattaatagcaacctgcatttttttttaatttatacttcagaatcctttaagaacctggtgttcctgagtggtcctgaatcatataagttggtaatggaagctgtaatgaccaagtcccctaaacatactatgtctttgccacgtgtgctgtgacttctctgtgggtgatttaatttatttggatccacctctgagtgagcgcacagtgatcaggtgcttcaaagccaacagaccagctcctcttcctccggatcctcttttgatctgcccaggaaagggatgcattgacactctcctgcatgcacctggcgagaagccacctgaaagtcactgtggttaaagatattggtggaggtaccccaggagcactgttacaaatccttcttgttttggcatctcgtacaacattattaagacacagctgagagttgatgggtgtgtaatgcatatgccaaggaaatgtcactaatcccaaagcaatcaaaaaggagacctcaaaccagatgttaatttgttctttgtgtaacaatgtaaccaaaatattgatgataaaagtcataatttaagattcagaataaatgggtttgatgtctg

SEQ ID NO: 26945 - protein, 155 aa, Homo sapiens [sequence omitted]

SEQ ID NO: 26946 - DNA, 792 bp, Homo sapiens
acccgcaggtggcgccccacgtccgtgtttgcgccctcagccgagctccaggcgcagctgggaaacccagcgcgtctccccgggtcctttgagcgagcgcggacaccgcaatttaataaataagcgcaagcgccagccgctccaccagtccgaggtccagaggagcagacacacagacccgggccggaggcccctcttctagccctgcgggaaccggacagttccccaactgggactctggaaccacagctcctaaatcatcaaattctcaagctttttttttccctctcttcgtcccagccatcccagtcttcttcttcttttttttttttttaacttattgtttttttcgctcctgtcattatgaaagtggtcacgccattcaatattaagacttggagggaattggggaaagaaaagaaagaatctaaaagaagagaagcgaccggtgcttttaagggtgtctaattttcaaaagagacgtctgggagtattttgctctgggcgtttgggtgactccgcgcgttccttcgcgcccttccgcgccgctcgcgccggcgccggcctccacccccgcgcgccgcctcccaccagtcccgatgcaggcgcccggccgggggccactcgggctgcggctgatgatgcccgggcgccggggggcgctgcgcgagccgggcggctgcggatcctgcctgggggtggcgctggccctgctgttgctgctactgcccgcctgctgccccgtgcgggcgcagaacgacacggagcccatcgtgctggagggcaagtgcc

SEQ ID NO: 26947 - protein, 63 aa, Homo sapiens
MQAPGRGPLGLRLMMPGRRGALREPGGCGSCLGVALALLLLLLPACCPVRAQNDTEPIVLEGK

SEQ ID NO: 26948 - DNA, 802 bp, Homo sapiens
tctgtcattggatagatcctaagtgaaattagatataaaagagaaatgaattgaatttactggacaacattcttcagatctgctgggacatattttcattttcttgagcatctcaacatcttttgtgaaaaaggagaacgtggatgtcactggctttcacttcatgttttaggtcagcgctgcttttggggtgaaagaagaccatcagcaaacctcagccttgcggccaggactcccccgtcttctgtcggagtccgccggtccgcagcctgcggcagggaggcccgggcacccgcaggtggcgccccacgtccgtgtttgcgccctcagccgagctccaggcgcagctgggaaacccagcgcgtctccccgggtcctttgagcgagcgcggacaccgcaatttaataaataagcgcaagcgccagccgctccaccagtccgaggtccagaggagcagacacacagacccgggccggaggcccctcttctagccctgcgggaaccggacagttccccaactgggactctggaaccacagctcctaaatcatcaaattctcaagctttttttttccctctcttcgtcccagccatcccagtcttcttcttcttttttttttttttaacttattgtttttttcgctcctgtcattatgaaagtggtcacgccattcaatattaagacttggagggaattggggaaagaaaagaaagaatctaaaagaagagaagcgaccggtgcttttaagggtgtctaattttcaaaagagacgtctgggagtattttgctctgggcgtttgg

SEQ ID NO: 26949 - protein, 34 aa, Homo sapiens
MKVVTPFNIKTWRELGKEKKESKRREATGAFKGV

SEQ ID NO: 26950 - DNA, 262 bp, Homo sapiens
gtcctccacagcaaagtgtattccacccattttcttagagagagagaggcaagcatcctattattagacagattctcaatgtgcctctcacccctctgacattcagactcctggctgttattttccagaagattttgagcccactctgcccctcatcctgtgcctatgaagaccccagactcagtcagagagaaagggagaagcagctggacttctgaaagaagaaacttgacttcagagggaagacttgatggcttgattt

SEQ ID NO: 26951 - protein, 31 aa, Homo sapiens
MKTPDSVREKGRSSWTSERRNLTSEGRLDGL

SEQ ID NO: 26952 - DNA, 529 bp, Homo sapiens
aaggttcccggtgcgtttggaaggcagaggctcctgggcttgcaggtttgggaaaattatccagaacttggaaaggggtaaaaacatcactgcctgctctttggatcctggaccctcggcacggtgggcctcagagctgatcattccctggggtggggccgtcctgggcactgctgggtgctgagcagtgtccctggcctccgcccactccacaccaggagctcccctagtcgtgacaaccacagaagccccagacgttgccccgtgtccccgaggggccgaatcacccagaggatcagttgtattccagagcctcgaccagcccggccacccgggggtcactttgtggacgcttccctccactcttgccagtgtcctggctctggggttggacgctgcttgggattgacaaatgcggatgagttttgtccctgagcggcaggtgcctccttcctcctgctgcgtataaaactcagtccagtcctgccgttccttagtaaacactcggacgcacctttgacctacagtg

SEQ ID NO: 26953 - protein, 60 aa, Homo sapiens
RFPVRLEGRGSWACRFGKIIQNLERGKNITACSLDPGPSARWASELIIPWGGAVLGTAGC

SEQ ID NO: 26954 - DNA, 2985 bp, Homo sapiens
gcggtttcccgccgcgggtgaatgagtccgactgcgctgccgccgccgccgccgcccgcatcgaagctccggccgcgtcccccgcgccagccccgggagcctgcgcgccgagacccctgcgtgtctgcgaacagacctccggcctcgggccatcaccccgggcagacgctgcagcccctgtccgggcctcttgcctgccgcccccatgagaaaaaccaacatgtggttcttggagcggcttcgggggtctggggaaaacggtgctgcccggggcgtggggagtgaggcgggggacaaggcctccaaggggcccctgtacagcaatgtgttgacgcccgacaagatccccgactttttcatcccccccaagctgccctcgggccccgcggagggcgagggacaggccgcgctgggcccctccacgtcggaacagaacctggcctctgcggccccccgccagaccccacggagcccccggctgcctgccaagctggcagccgagagcaagagcctgctgaaggcagccacccggcacgtgatccagatcgagagtgccgaggactggctgtccgaggaggccactgacgccgacccccaggcccagggtgccatgtccctgccctcggtgcccaaggcccagacgtcctacggcttcgccatgctggctgagagcccccacacgaggcgcaaggagtctctgttccacagtgagcacggggctctggcccaggtgggctccccaggggccgggcgccgccgggcagctgccaaggccaacgggggtgatgggggccccagggaggctggcggggccctcatgagccccggccgctacttcagtggcggggagagcgacacagggtcctcggccgagtcctcccccttcgggtcccctctgctgtcccgctccgtgtctctgctcaaaggtttcgcccaggacagccaggccaaggtgagccagctccggcactccgtgggccgccacggctccctgtctgcggacgacagcaccccggacgccagccccgggagccggcgccgcctgacccgccgggcacccccggaacctggccccgagtcgggccaggcgcgtggggagcacacggtccacgtgggccctcggggcagcgtgcggctgctggccgagtacgaggccggccaggcccgcctgcgggtgcacctgctggccgccgagggcctctacgaccgcctgtgcgacgcccgcagcatcaactgctgcgtgggcctgtgcctggtgccgggcaagctgcagaagcagcgcagcaccatcgtgaagaacagccgccgccccgtcttcaacgaggatttcttcttcgacggcctggggcccgccagcgtccggaaactggccctcaggatcaaggtggtgaacaagggcagcagcctcaagcgggacacgctgctcggggagaaggagctgcccctgacctccctgctccccttcctgtagagcggggacctgctcgctgtccgctcgggtgcagagggcagaccccggtctctcctccacaccgggtgctggcgggcgggtccgctggcttgggctggggctggccggggaggggctcacactcaggctgggctgggcgctgatgctgtagctgacgcagggtttcctgggtcacccgatgctgactggagtattatttttcatgaattaatttctcctttggaggaggaggaggaggaggagaggggcctcgggggaagagaaggggccacttcgcggggcagagggtccccctttgcccctccacactgcctcgcgcctttcacgcagagttctagaaggaggttctcaggggttcaggaatccgtgcatgtggccagggcggggccgtggacagggaggtgacaagtcttggagcccacagtctccttcactgcacgtgtgtcttcctcccccacagcctgccgccatccagttcccaccccgcggagagcagggcctcgcggccacaccaggcccaggctctgcccgggacgccccctcccaggggtcaggcttggctctgggagaccccagcttcccaggctccggtggggagtggggccaggcgagggtgccctgacgagggtgggcgcggagggagcagccgctgccacagtcggagcagaggaggtcttggcagaggtccgcggggaggagacggctctcctggcctgttttcctccaacactgtcgccgctggctttttgggtacaggcccgtctggccatttctgctgtggcgccggagggtcttgctcagagatgcccagagagcagccctatggcccatccgtcctcgctgggggctgccaccccgtcgcccttttgtccagcgtctgcagctgggagcgacacgcagtgattgacggccgtggctttgacgccacgtgtgtaaataggctgtggctacggtgggtgggtcggagcccaggaggcagctggggggacctggctatggcctttcctgctgttaggtggctgcaaggcttccattgtgtggttatgtgggtccttgaatgattttggggaggtttccagctcagaatgatgcagaaatgataagactcaaagcaggggccaggccaggccagtgccttcgcctctcccggctgctggtgggcacggaggaaccagggcacatctgtggtacccagggacgtcccttgtcagcccgtttgccacacattgttcctcttgtccaggggagggtggaggagctgcttcccaggactggaggagcagctgggcccctgctgcacgtccggtgggacacacctgtgagccccgccttctctgatgctcacccctcccaggccctgttctccctggggtcccccgtttagtagcccccctgcactctttgatatcttagtgtctgaggttgactgtgggtaaatctttaagacactccccagctgtgtttgtttataaatgctgtttatagtgcaataaaggtgtttcgggaatacgggg

SEQ ID NO: 26955 - protein, 108 aa, Homo sapiens
MILGRFPAQNDAEMIRLKAGARPGQCLRLSRLLVGTEEPGHICGTQGRPLSARLPHIVPLVQGRVEELLPRTGGAAGPLLHVRWDTPVSPAFSDAHPSQALFSLGSPV

SEQ ID NO: 26956 - DNA, 1695 bp, Homo sapiens
gcctcactcaggagctgctcggcagccgtgggacacagggtctcttggttttgcatccagttccagcgctcggtagcgctaagagggtctcgttcaaaaatgcagctggattttgatttggcgattcagattttcaggcctgtgtctccaggatttcaggggtgtgtttcctggagctgcaaaccaaatgaccacacacgaagtggcttaaagcagcagaggttcattctcacagctctggaggccagaagtccgaactcaaggtgtggccggggctggttccttccggaggctctgagggagcctcggtcccaggcccctcccggcgcccgctggtggccgggctcccgggtgctgccagcctcgtggacacacggctccaatctctgctctctcctgcccatctgcatgttttccttttcctgtcaggaaagcagctagtggacttagggcccccctggctcatcctggatgcattcgtcccaggacccttgacctgtttatctaccaagacctttttccaaatgaggtcacgttcacaggctctgagggctgggacctggccgcatcttcccgcggtcacctttcagctcccgacaggaagcgtggccccagaaccctgggggtttcagagcccgtgcccatgggtggttctggaattctgaggccgatcctttggctggtgtcccggaattccctggtccggcccctcgtccatgcaggcaccctaggggctccccggcaggaccccagaacgccaatatcctactccacgggtccaggcgggctcccgggagctgatgccgaggtctctgtcccgcaggtacggacgaaggacgtgctgtttgagagcatcagccacctgatcgaccaccacctgcagaacgggcagcccatcgtggccgccgagagtgagctgcacctgcgtggcgtggtctcacgggagccctgagccaggtgaccgttctcagccctggctcctgcctgttctcagccccggctcctgcctgtcatggccttggggctctcagccctcctcctggatcctggtcaggccgaaccaccgctgcctctccttcctccgcatgagcctctggcatggtccttcctccagctggccccgggctgggcagagcctcctcctgccggggcccctgcccaccccctcctttgcctggagtgagggtgttcataccaaagacggaaccatttcgcctttaaagaaaatatatccagaagcagccgctgcctcggagccctggcccttgggtccccctctcgcctggctggttcggtctaacgccccggagagtcagggctcccaggaccctggggaggaggcggattccgggcctggctgggcttcctcttcccacctgaggactgggtgcacagttgtctttgaggggggacgcttaaggtgctttggggttctcaggccaggatacatgctggcgctgaagtgcaggcagccttgaggtcacctgggatctcggggtagccaggctgctccaagacagtggatatcgaggcagtcgtgaggcccctactccacctgggagcaggggaaggacgtggttgcctggcctgggctgcgcccagcagcttccccccagtcctgccctcccagctgtcgacccagatgggatgttcggatcggtttgtaattaaacctgggaatggccacaagagcac

SEQ ID NO: 26957 - protein, 130 aa, Homo sapiens
MSLWHGPSSSWPRAGQSLLLPGPLPTPSFAWSEGVHTKDGTISPLKKIYPEAAAASEPWPLGPPLAWLVRSNAPESQGSQDPGEEADSGPGWASSSHLRTGCTVVFEGGRLRCFGVLRPGYMLALKCRQP

SEQ ID NO: 26958 - DNA, 1868 bp, Homo sapiens
agggtcagggcgggaggaccccccaggaccaggagctggaggaattcaaggccgccccagccacgggtagatgcatctccgtcagggctggggctccagcactgcagggtctgaaccatgctgctttctgcctggggacacgcccacccctgtttgacaatgaggggactgacactcagaggagagccttagagtggcctgtcggatgttggcattgttggaagccgttagaaaacccagggcagaacattttaacgctaggggcaagagaggggtgccggctgtcgtcttgagtatttagggcacattggaggccccgcggccaatgcagtaagaccagacaaggaaacgagaggcgtacgctttgggaaggaagcccacctgacaaggcaggaaaaagaaataggagttaacctctgaaagaaagagctgctgttaccctttgtacatgcttagtacgtgcctagaaaacccaacctggggagtccaggttgctacacatgtgagcccaccgcacgcacggggctgggcagagtgcgagtctgatacgctgtgggcgctcggtcagcgcaggccgacgggtgcacgagggactccccggggaacccgtttctcccagctctggtcccggcaggagtagctgcttgccccctgcctgcccagcactcctgtccctggcctgcaggaccctttgaggatgccctgaagttgcatgagtgctcagtggcggcaggcgtgacagcagcccctcttcccttggaggaccagtggcccagcccccctacccgccgggcccctgtggcccccacggaggaacagctgcgtcaggagccctggtaccacggccggatgagccgccgggcggcagagaggatgcttcgagctgacggggacttccttgtgcgagacagcgtcaccaaccccgggcagtatgtcctcaccggcatgcacgccgggcagcccaagcacctgctgctcgtggaccccgagggcgtggtacggacgaaggacgtgctgtttgagagcatcagccacctgatcgaccaccacctgcagaacgggcagcccatcgtggccgccgagagtgagctgcacctgcgtggcgtggtctcacgggagccctgagccaggtgaccgttctcagccctggctcctgcctgttctcagccccggctcctgcctgtcatggccttggggctctcagccctcctcctggatcctggtcaggccgaaccaccgctgcctctccttcctccgcatgagcctctggcatggtccttcctccagctggccccgggctgggcagagcctcctcctgccggggcccctgcccaccccctcctttgcctggagtgagggtgttcataccaaagacggaaccatttcgcctttaaagaaaatatatccagaagcagccgctgcctcggagccctggcccttgggtccccctctcgcctggctggttcggtctaacgccccggagagtcagggctcccaggaccctggggaggaggcggattccgggcctggctgggcttcctcttcccacctgaggactgggtgcacagttgtctttgaggggggacgcttaaggtgctttggggttctcaggccaggatacatgctggcgctgaagtgcaggcagccttgaggtcacctgggatctcggggtagccaggctgctccaagacagtggatatcgaggcagtcgtgaggcccctactccacctgggagcaggggaaggacgtggttgcctggcctgggctgcgcccagcagcttccccccagtcctgccctcccagctgtcgacccagatgggatgttcggatcggtttgtaattaaacctgggaatggccacaagagcac

SEQ ID NO: 26959 - protein, 91 aa, Homo sapiens
MSRRAAERMLRADGDFLVRDSVTNPGQYVLTGMHAGQPKHLLLVDPEGVVRTKDVLFESISHLIDHHLQNGQPIVAAESELHLRGVVSREP

SEQ ID NO: 26960 - DNA, 1251 bp, Homo sapiens
ccagggcccatctccttctctaagagatgcctgcagcctgccatgggacgtggggtccaccggtacaggaccctttgaggatgccctgaagttgcatgagtgctcagtggcggcaggcgtgacagcagcccctcttcccttggaggaccagtggcccagcccccctacccgccgggcccctgtggcccccacggaggaacagctgcgtcaggagccctggtaccacggccggatgagccgccgggcggcagagaggatgcttcgagctgacggggacttccttgtgcgagacagcgtcaccaaccccgggcagtatgtcctcaccggcatgcacgccgggcagcccaagcacctgctgctcgtggaccccgagggcgtggtacggacgaaggacgtgctgtttgagagcatcagccacctgatcgaccaccacctgcagaacgggcagcccatcgtggccgccgagagtgagctgcacctgcgtggcgtggtctcacgggagccctgagccaggtgaccgttctcagccctggctcctgcctgttctcagccccggctcctgcctgtcatggccttggggctctcagccctcctcctggatcctggtcaggccgaaccaccgctgcctctccttcctccgcatgagcctctggcatggtccttcctccagctggccccgggctgggcagagcctcctcctgccggggcccctgcccaccccctcctttgcctggagtgagggtgttcataccaaagacggaaccatttcgcctttaaagaaaatatatccagaagcagccgctgcctcggagccctggcccttgggtccccctctcgcctggctggttcggtctaacgccccggagagtcagggctcccaggaccctggggaggaggcggattccgggcctggctgggcttcctcttcccacctgaggactgggtgcacagttgtctttgaggggggacgcttaaggtgctttggggttctcaggccaggatacatgctggcgctgaagtgcaggcagccttgaggtcacctgggatctcggggtagccaggctgctccaagacagtggatatcgaggcagtcgtgaggcccctactccacctgggagcaggggaaggacgtggttgcctggcctgggctgcgcccagcagcttccccccagtcctgccctcccagctgtcgacccagatgggatgttcggatcggtttgtaattaaacctgggaatggccacaagagcac

SEQ ID NO: 26961 - protein, 91 aa, Homo sapiens; identical to SEQ ID NO: 26959

SEQ ID NO: 26962 - DNA, 2399 bp, Homo sapiens
atgccgcagtggaagttcgcggccccgggcggcttcctgggccgcggcccggcggcggcgcgggcggctggggcctcggggggcgcggacccccaacccgagccggcgggcccggggggcgtcccggcgctggcggccgccgtcctgggcgcctgcgagccccgctgcgccgcgccctgtcccctgcccgcgctcagccgctgtcggggcgcggggtcgcgggggtcgcggggcgggcggggggcggcggggtccggggacgccgccgccgccgccgagtggatccggaagggcagcttcatccacaaacccgcgcacggctggctacaccccgacgccagggtcctggggcccggggtctcctacgtcgtgcggtacatgggctgcatcgaggttctccgctctatgcgctccctggactttaacacgcgcacgcaggtgaccagggaagccatcaaccggctccatgaggccgtgcctggcgtccggggatcctggaagaaaaaggcccccaacaaggccctggcgtccgtcctgggcaagagcaaccttcgctttgccggcatgagcatctccatccacatctccactgatggcctcagcctctccgtgcctgccacgcgccaggtcatcgccaaccaccacatgccgtccatctccttcgcgtcaggcggagacacggacatgacggattacgtggcctacgtcgccaaggaccccatcaaccagagagcctgccacatcctggagtgctgtgagggcctggcacagagcatcatcagcaccgtgggccaagctttcgagctgcgcttcaagcagtacctgcacagcccgcccaaggtggcgctgcccccagaaaggctggcagggccggaggagtcggcctggggggacgaggaggactctttggagcacaattactacaacagcatcccggggaaggagccgccgctgggcgggctagtggactccaggctggccctgacacagccctgcgccctcacggccctcgaccagggcccatctccttctctaagagatgcctgcagcctgccatgggacgtggggtccaccggtacagctccaccgggggacggctacgtgcaggcggacgcccggggccccccggaccacgaggagcacctgtatgtcaacacccagggtctggacgcccccgagccggaggacagccccaaaaaggatctgtttgacatgcgaccctttgaggatgccctgaagttgcatgagtgctcagtggcggcaggcgtgacagcagcccctcttcccttggaggaccagtggcccagcccccctacccgccgggcccctgtggcccccacggaggaacagctgcgtcaggagccctggtaccacggccggatgagccgccgggcggcagagaggatgcttcgagctgacggggacttccttgtgcgagacagcgtcaccaaccccgggcagtatgtcctcaccggcatgcacgccgggcagcccaagcacctgctgctcgtggaccccgagggcgtggtacggacgaaggacgtgctgtttgagagcatcagccacctgatcgaccaccacctgcagaacgggcagcccatcgtggccgccgagagtgagctgcacctgcgtggcgtggtctcacgggagccctgagccaggtgaccgttctcagccctggctcctgcctgttctcagccccggctcctgcctgtcatggccttggggctctcagccctcctcctggatcctggtcaggccgaaccaccgctgcctctccttcctccgcatgagcctctggcatggtccttcctccagctggccccgggctgggcagagcctcctcctgccggggcccctgcccaccccctcctttgcctggagtgagggtgttcataccaaagacggaaccatttcgcctttaaagaaaatatatccagaagcagccgctgcctcggagccctggcccttgggtccccctctcgcctggctggttcggtctaacgccccggagagtcagggctcccaggaccctggggaggaggcggattccgggcctggctgggcttcctcttcccacctgaggactgggtgcacagttgtctttgaggggggacgcttaaggtgctttggggttctcaggccaggatacatgctggcgctgaagtgcaggcagccttgaggtcacctgggatctcggggtagccaggctgctccaagacagtggatatcgaggcagtcgtgaggcccctactccacctgggagcaggggaaggacgtggttgcctggcctgggctgcgcccagcagcttccccccagtcctgccctcccagctgtcgacccagatgggatgttcggatcggtttgtaattaaacctgggaatggccacaagagcac

SEQ ID NO: 26963 - protein, 551 aa, Homo sapiens
MPQWKFAAPGGFLGRGPAAARAAGASGGADPQPEPAGPGGVPALAAAVLGACEPRCAAPCPLPALSRCRGAGSRGSRGGRGAAGSGDAAAAAEWIRKGSFIHKPAHGWLHPDARVLGPGVSYVVRYMGCIEVLRSMRSLDFNTRTQVTREAINRLHEAVPGVRGSWKKKAPNKALASVLGKSNLRFAGMSISIHISTDGLSLSVPATRQVIANHHMPSISFASGGDTDMTDYVAYVAKDPINQRACHILECCEGLAQSIISTVGQAFELRFKQYLHSPPKVALPPERLAGPEESAWGDEEDSLEHNYYNSIPGKEPPLGGLVDSRLALTQPCALTALDQGPSPSLRDACSLPWDVGSTGTAPPGDGYVQADARGPPDHEEHLYVNTQGLDAPEPEDSPKKDLFDMRPFEDALKLHECSVAAGVTAAPLPLEDQWPSPPTRRAPVAPTEEQLRQEPWYHGRMSRRAAERMLRADGDFLVRDSVTNPGQYVLTGMHAGQPKHLLLVDPEGVVRTKDVLFESISHLIDHHLQNGQPIVAAESELHLRGVVSREP

SEQ ID NO: 26964 - DNA, 4549 bp, Homo sapiens
ccatcgagtgcccacccggtgcccagctgtgctctggtcctggcgcacgttcctctgggatgctggctgctcaccccggaccgggggctcgccagcgttccctgcccctgtgcccacacccgggctgttctcacttgcactcatgcccttcccgattctctggccaagaactcctacaaatgtgcccatagcgcgggtccagggtccagggattcctccacccgcctgcgtctcgcactgtcgtcctccctccccggactctgcccctcgcactgtcgtcctccctccccggactctgcccctctcggtgtcgtcctccctccccggactctgcccctctcggtgtcgtcctccctccccggactctgcccctctcggtgtcgtcctccctccccggactctgcccctctcggtgtcgtcctccctccccggactctgcccctctcggtgtcgtcctccctccccggactctgcccctctcggtgtcgtcctccctccccggactctgcccctctcggtgtcgtcctccctccccggactctgcccctctcggtgtcgtcctccctccccggactctgcctctctcggtgtcgtcctccctccccggactctgcctctcgtgctgtcgtcctccctccccggactctgcctctctcggtgtcgtcctccctccccggactctgcccctctcggtgtcgtcctccctccccggactctgcccctctcggtgtcgtcctccctccccggactctgcctctcgcactgtcgtcctccctccccggactcttggaactgcgtttcttccctctcacccatcctgaccctaagaagctgagagaatctgtgcccctcttggtagactgggaaggcgggggagaagcccctctgccctcgtcacccagcaagggctagtgcagcctcacgttcatgtggattcacagccagaccctgttccaaggcagaggcagtctggtcaggacctggcagaatacacatggggtccaggcagctcccgagggagatgccccaaggttacctgcgatgctgttccggtttgaaccatgtggatagttttttttttttttttttggagactgagtctcattctgttgcccaggctggactgcaatggcacaatctcagctcactgcaatctgtgcgtcctgaattcaagtgattctcatgcctcagcctcccaaatagctgggattgcaggcgcccaccaccacgcctagctaatttttgcatttttagtagagacggggtttcaccatgttggccaggctggtctcgaactcctgacctcaaatgattcacccacctcggcctcccaaagtgctgggattacaggcgtgagccaccacgcccggccccatgtaaacactttacacgttcaaaatacaattaaaaaaagaaaggaaggaaaatcctgaaatagaactgagtcagaataagtgaccctccgtgcgtcatgttgatagcataattacagggaagcagagttactgtgattatttttaaatgtggagactgaacatacacgcactgggaagctctggaccctgggccggggagggccagggcggggtggggtggagcagcggctgccttctccctgggcgtggacgtctggtgcccacagccccagccgcacgctgccccactcttgtccctggttggagccccgacggggctttgctgctgtaagatgctccctgtggcacctgcagacgggcgggttaccacagggagaccagagcagcatccgccctgcagccagcagcacaggtggtggccgggggagctcctcgtgggaccccgccttgctccctgcgagcccctcgcctggctcccagctgaccccctgcccctctttacactccccagctccaccgggggacggctacgtgcaggcggacgcccggggccccccggaccacgaggagcacctgtatgtcaacacccagggtctggacgcccccgagccggaggacagccccaaaaaggatctgtttgacatgcgtatgtggcagcctggggggcggccgtcatcgcgtgtggccgtgttgtctgatgggggaggcacaaccccacccccactccctacgggattccctggtctgatgggggaggctcccttctccccgtgagatccttcaagtcgacgggtgggacggggaagcccagtctgtctcctgtcggaggccttgtctgatgggggtgtcctggactctgccttaaaaggggccagtctgacaggggaggcccattctctctagcgaatgcggccgagcagtgtaatgggtgaggcccagcccctcctacaggaccccatctcccggggcctccctgctgaacccccagtctggttgggaatgccgctggcccccgctctgtgagaagctccactctctcgggggtaacccacctgcctctgtcggaacccccggtctgaagggaggaggttcgtcattccttgaaagaatggtcagtgtggtgggaggctgcggccccgtctgtgaggccctccagtcaacaggggaagccagaccctcgccccatgggactccttagtctgagaggggaggcctcgtcttttctctgtgggaatcccggcctgctgggacgactgcctggcccgctggtcttgcacgctgactctgggtctccctagtctgatgagttttctcttcacgtgactccggggtctgaggattcttcctacggaaatcccggcctgatgggggaggcacagcttcctgcttgaaggaacgcccagtccaatgagggaggcttagtccacctctggacaaagtggctagtctgacggtgagcccgttccttccttccccgtggatgacccagcccgagggagcccccagccgggcggaggaggcttgtccttccttggctgaggtgtccagagttctctcctgatttcctgcagcctcgactctgcccttctccagcacggagaggtgttggctctgagctgccgggtagggtccttgcctgagctcaggatgcctcccaagctaactgcaaatttctccctttcctccaccacctgacaaagcagcttctcctcagcttcacaataatgacaccatctagcacctagtgggcgcctgctgtgtaccaagcactacgtgaagagcttgctcctcttggctcctcacagcagccctcagatgggaaaggaggggcttggggctctgagcttccctctgaggcaggctgtccctcagggtgaccagactgccaggcagccccggttgaggaagggtgtcttctcgtccgtcctccacgaagagtcctggggctgcctctgattcgccacgtgctcgtccccaaaccagtcgctggctgggagggggaggtgaacatgctgactggccaggctaggagttggagctggctcagcccccagggtcagggctggaggaccccccaggaccaggagctggaggggcgggagaccagggagcgagggtcagggcgggaggaccccccaggaccaggagctggaggggcgggagaccagggagtgagggtcagggggggaggaccccccaggaccaggagctggaggaattcaaggccgccccagccacgggtagatgcatctccgtcagggctggggctccagcactgcagggtctgaaccatgctgctttctgcctggggacacgcccacccctgtttgacaatgaggggactgacactcagaggagagccttagagtggcctgtcggatgttggcattgttggaagccgttagaaaacccagggcagaacattttaacgctaggggcaagagaggggtgccggctgtcgtcttgagtatttagggcacattggaggccccgcggccaatgcagtaagaccagacaaggaaacgagaggcgtacgctttgggaaggaagcccacctgacaaggcaggaaaaagaaataggagttaacctctgaaagaaagagctgctgttaccctttgtacatgcttagtacgtgcctagaaaacccaacctggggagtccaggttgctacacatgtgagcccaccgcacgcacggggctgggcagagtgcgagtctgatacgctgtgggcgctcggtcagcgcaggccgacgggtgcacgagggactccccggggaacccgtttctcccagctctggtcccggcaggagtagctgcttgccccctgcctgcccagcactcctgtccctggcctgcaggaccctttgaggatgccctgaagttgcatgagtgctcagtggcggcaggcgtgacagcagcccctcttcccttggaggaccagtggcccagcccccctacccgccgggcccctgtggcccccacggaggaacagctgcgtcaggagccctggtaccacggccggatgagccgccgggcggcagagaggatgcttcgagctgacggggacttccttgtgcgagacagcgtcaccaaccccgggcagtatgtcctcaccggcatgcacgccgggcagcccaagcacctgctgctcgtggaccccgagggcgtggta

SEQ ID NO: 26965 - protein, 92 aa, Homo sapiens
MLTGQARSWSWLSPQGQGWRTPQDQELEGRETRERGSGREDPPGPGAGGAGDQGVRVRGGGPPRTRSWRNSRPPQPRVDASPSGLGLQHCRV

SEQ ID NO: 26966 - DNA, 471 bp, Homo sapiens
gcccacatccactgccccatctctctgcattgctggggtgggcagctgggaatcccggtggggggcccaggcaggtccagctggcccctccccgcccccaggacatgacggattacgtggcctacgtcgccaaggaccccatcaaccagagagcctgccacatcctggagtgctgtgagggcctggcacagagcatcatcagcaccgtgggccaagctttcgagctgcgcttcaagcagtacctgcacagcccgcccaaggtggcgctgcccccagaaaggattggggaggactaagcaagctgactccccggtgtgcctgaggctgtcagccctgctgctacaaccaatatccctcctccagacgcgcggccggctcccgcaatgggcagaaaacggcctccgtctcaccgcagaacatgtgtaaagggggggacgtgtctgtgtgctggtaacacgttttttatagaca

SEQ ID NO: 26967 - protein, 63 aa, Homo sapiens
MTDYVAYVAKDPINQRACHILECCEGLAQSIISTVGQAFELRFKQYLHSPPKVALPPERIGED

SEQ ID NO: 26968 - DNA, 774 bp, Homo sapiens
ggaaggcagcagggaggaggggtggaaaatgaaggcgtgcttggccctgggtccagcttgggcaaagtcctggaggcttgaaacacagaccatgtgtatggaggatggggaagggagagaaaggcacccaggctgcttgagaagccaggtcaccgtgaacaaagccagggctccagcgttctctatgggcatccgccactcgaaacgggccagcaccatggccgccaccacgccctcccggcctgcggggcacaggctgcccggccgctgctgctaggccaggcctgtttcccacacagtgaacggggggctggcgggcctctcctggggcctggctttggctggaggggctagaaggcgagaggggctgggaaaggagtcttccctcccctttcctgaactgtccaggtccttctaggacacctgatccttccagtccctgggggctgtgacccatggccctgtgcagggtgcagggtgagtctccttccagtgccccagtttcttccaggtcacgccaggccaggccaggccaggtggggaaagggacaccttccggccctccccagtagctggctggagatggagcttcctgtgtcccagaactcggcgtccagctccactagggcctggatccccatcacagcttgggttagccccggtcccagcccaaactcaggctggaggcagccccgaggcctgtgcctttcccactccaccttctacagttgcttagccaataaacctttcctgggctggagagctgtcagcatc

SEQ ID NO: 26969 - protein, 82 aa, Homo sapiens
MKACLALGPAWAKSWRLETQTMCMEDGEGRERHPGCLRSQVTVNKARAPAFSMGIRHSKRASTMAATTPSRPAGHRLPGRCC

SEQ ID NO: 26970 - DNA, 1370 bp, Homo sapiens
gctccccggggcccccaatcctcaccatggagggagaggggaacccaggctaaggctcaggagctgggtccagggctccttcttcggggaatctgggcccaggaggtgacctgagggctttgggctgcaggctcggggccaggcttgtatgtcctgccgtccaccgtgggcttcatcaaccacgactgcaccagggtggccagtcccgcctactcgctcgtccggaggcccagtgaggcaccacctcaggacaccagcccgggccccatctacttcttggaccccaaagtcacacgctttggccgcagctgcacccctgcctactccatgcagggccgggccaagtctcggggtccggaggtgacgccaggccctggggcctacagcccagagaaggtgccccctgtgcgccatcggacaccgccggctttcaccctgggctgccgcctccccctgaagcccctggacacctcagcccctgcccctaatgcctacaccatgccccctctgtggggctcacagatcttcaccaagcccagcagccccagctacacggtggtgggccgcaccccccccgcccgccccccgcaggatcctgctgagataccaggcccgggccagtacgacagcccggacgcaaacacctaccgccagcgcctgcctgccttcaccatgctggggcggccccgggccccgcgacccctggaggagacccccggccctggcgcccactgcccagagcaggtcaccgtgaacaaagccagggctccagcgttctctatgggcatccgccactcgaaacgggccagcaccatggccgccaccacgccctcccggcctgcggggcacaggctgcccggccgctgctgctaggccaggcctgtttcccacacagtgaacggggggctggcgggcctctcctggggcctggctttggctggaggggctagaaggcgagaggggctgggaaaggagtcttccctcccctttcctgaactgtccaggtccttctaggacacctgatccttccagtccctgggggctgtgacccatggccctgtgcagggtgcagggtgagtctccttccagtgccccagtttcttccaggtcacgccaggccaggccaggccaggtggggaaagggacaccttccggccctccccagtagctggctggagatggagcttcctgtgtcccagaactcggcgtccagctccactagggcctggatccccatcacagcttgggttagccccggtcccagcccaaactcaggctggaggcagccccgaggcctgtgcctttcccactccaccttctacagttgcttagccaataaacctttcctgggctggagagctgtcagcatc

SEQ ID NO: 26971 - protein, 181 aa, Homo sapiens
MQGRAKSRGPEVTPGPGAYSPEKVPPVRHRTPPAFTLGCRLPLKPLDTSAPAPNAYTMPPLWGSQIFTKPSSPSYTVVGRTPPARPPQDPAEIPGPGQYDSPDANTYRQRLPAFTMLGRPRAPRPLEETPGPGAHCPEQVTVNKARAPAFSMGIRHSKRASTMAATTPSRPAGHRLPGRCC

SEQ ID NO: 26972 - DNA, 1603 bp, Homo sapiens
actcgatcccggccccacttccaggccagtgtccggccgaccagcctgccttgggccagggccccacgactccctgctgcgggacaagaggccgtctgtgcggctgtggtcgtgggagggtgtggtgaggccgtgaaggtggggacggtgcctgggcctgtggccgccagagctgctgcggctcagaaggtagcaccaggccccgtgggtgctgtgggggccatcgcctgcccaccatggggaccctcagctgcgactccaccccacggctggccacagccccccttggccggcgagtgacggagggccagattccggagaccggcctgaggaagtcctgtgggacggccaccctggagaacggctcggggccaggcttgtatgtcctgccgtccaccgtgggcttcatcaaccacgactgcaccagggtggccagtcccgcctactcgctcgtccggaggcccagtgaggcaccacctcaggacaccagcccgggccccatctacttcttggaccccaaagtcacacgctttggccgcagctgcacccctgcctactccatgcagggccgggccaagtctcggggtccggaggtgacgccaggccctggggcctacagcccagagaaggtgccccctgtgcgccatcggacaccgccggctttcaccctgggctgccgcctccccctgaagcccctggacacctcagcccctgcccctaatgcctacaccatgccccctctgtggggctcacagatcttcaccaagcccagcagccccagctacacggtggtgggccgcaccccccccgcccgccccccgcaggatcctgctgagataccaggcccgggccagtacgacagcccggacgcaaacacctaccgccagcgcctgcctgccttcaccatgctggggcggccccgggccccgcgacccctggaggagacccccggccctggcgcccactgcccagagcaggtcaccgtgaacaaagccagggctccagcgttctctatgggcatccgccactcgaaacgggccagcaccatggccgccaccacgccctcccggcctgcggggcacaggctgcccggccgctgctgctaggccaggcctgtttcccacacagtgaacggggggctggcgggcctctcctggggcctggctttggctggaggggctagaaggcgagaggggctgggaaaggagtcttccctcccctttcctgaactgtccaggtccttctaggacacctgatccttccagtccctgggggctgtgacccatggccctgtgcagggtgcagggtgagtctccttccagtgccccagtttcttccaggtcacgccaggccaggccaggccaggtggggaaagggacaccttccggccctccccagtagctggctggagatggagcttcctgtgtcccagaactcggcgtccagctccactagggcctggatccccatcacagcttgggttagccccggtcccagcccaaactcaggctggaggcagccccgaggcctgtgcctttcccactccaccttctacagttgcttagccaataaacctttcctgggctggagagctgtcagcatc

SEQ ID NO: 26973 - protein, 289 aa, Homo sapiens; identical to SEQ ID NO: 3621

SEQ ID NO: 26974 - DNA, 1723 bp, Homo sapiens
acccgcggaaaaggagggggagcggctggtcagctgcgccctgcgggtcgagaatgtcatcagcagggatggcggcgctttgagtgctgagcgcggccccgaccgggaccccctacccttgacccaccctcgcaggccgagccccgactcccgacccgccgtcgcagcccgcggccccgacctctgacccgccctcgcagcccgcggccccgacctctgacccgccctcccagccagaccctctacgcccgacccgccctcgcagcccatggcccatcggcccggcagtggacgcagagcctcggccccgttccctccccggaccccccggacccgctctccgtcctccctgcagagccgagggccttggcccagccccgcatcctccccgaccgtgctcgatccagcccgggtgtgctgcacccgaaacaggctcccgggggccgtcgggcctgtgggtgaccgtgcaggccaggatctcccccttcccagtcgtgacaaccacagatggccccagatgccacgttagggttagtgcctcctgggggcgggattgcggccgggggagaaccaccctcccaacccgttaggaactgcagggacggagagcgcgctcgggatgtccagcactcagcgcgggttgggtggcgaatggagagcgagtcgtcctcagaggccgccggcctgcaggcgagaaccctcccagccaggaggctgcggctctgcctgaaccccgacccagggcgaacacccacatttggcccctgcccggtgctgagagaggccagagcggcgtccccagaagcggagcgggagccccacgtccggcggccacgatagaaagaagaaaagaaatgggtggtatcctgcacagcccgacctccccggagcctcccgacaccacctccccggagtctcccgacaccacctccccggagtctcccgacaccacctcccaggagcctcccgacaccacctccccggagcctcccgacaagacctccccggagcccgccccccagcagggctccacacacacccccaggagcccaggctccaccaggactcgccgccctgagatctcccaggctgggcccacgcagggagaagtgatcccaacaggctcgtccaaacctgcgggtgaccagctgcccgcggctctgtggaccagcagtgcggtgctgggactgctgctcctggccttgcccacctatcacctctggaaacgctgccggcacctggctgaggacgacacccacccaccagcttctctgaggcttctgccccaggtgtcggcctgggctgggttaagggggaccggccaggtcgggatcagcccctcctgagtggccagcctttccccctgtgaaagcaaaatagcttggaccccttcaagttgagaactggtcagggcaaacctgcctcccattctactcaaagtcatccctctgttcacagagatggatgcatgttctgattgcctctttggagaagctcatcagaaactcaaaagaaggccactgtttgtctcacctacccatgacctgaagcccctccctgagtggtccccacctttctggacggaaccacgtactttttacatacattgattcatgtctcacgtctccctaaaaatgcgtaagaccaagctgtgccctgaccaccctgggcccctgtcgtcaggacctcctgaggctttggcaaataaacctcctaaaatgat

SEQ ID NO: 26975 - protein, 163 aa, Homo sapiens
MGGILHSPTSPEPPDTTSPESPDTTSPESPDTTSQEPPDTTSPEPPDKTSPEPAPQQGSTHTPRSPGSTRTRRPEISQAGPTQGEVIPTGSSKPAGDQLPAALWTSSAVLGLLLLALPTYHLWKRCRHLAEDDTHPPASLRLLPQVSAWAGLRGTGQVGISPS

SEQ ID NO: 26976 - DNA, 876 bp, Homo sapiens
cctctgggagtggtgggccaggcgaaggtgccatagcgcgcggcccaggcgctgctgctgcagcaggagctggcccgggggctccccggcgccgccgtttacaggcgagcgcaggcccatgttctcgaagtagtgagccaggaaggcgatcggctcctcgggccgcgcctccagcaccttcagcagggccgcacgtagcatttccgtcacgccgacctgccgcaggaagtcctcctcgctctcggccgcccccgccgcccgggataccgactggcggccgctgtccgtgaaaccggccggcggtggtaccgcttgccgccgcttctccactgccgccatcttcgctgagggcagcgggaccggaagcaccgccatattccactgtgcgctagagcccccccaaggcggccatcttgattaagggcagagggcaccggtatcccgctgggagactttgggaagtgacaagggcttgcctctcctgcctcaatctccgcatctggatgaagggcttggaccagaacccctccaagccccttccctggaccactctgctggagtttcactcttgtcgcccaggctggagtacagtggtgctatctcggctcactgcaacctccacctcacgggttcaagtgattctactgtgacggccttccaagtaggtgggaccacaggcatgcgccaccacgcccggctaatttttgtatttttagtagagacgaggttttgccatgttggccaggctggtctcaaactcctgacctcaggtgatccacctgcctcggcctcccacagtgctgggattacaggcgtgagccaacgcgcccggccttgttttatgtttcatacgatttattttacttactaccaccc

SEQ ID NO: 26977 - protein, 48 aa, Homo sapiens
MKGLDQNPSKPLPWTTLLEFHSCRPGWSTVVLSRLTATSTSRVQVILL

SEQ ID NO: 26978 - DNA, 1536 bp, Homo sapiens
gggactgagcatggatttcggactggccctcctgctggcggggcttctggggctcctcctcggccagtccctccaggtgaagcccctgcaggtggagcccccggagccggtggtggccgtggccttgggcgcctcgcgccagctcacctgccgcctggcctgcgcggaccgcggggcctcggtgcagtggcggggcctggacaccagcctgggcgcggtgcagtcggacacgggccgcagcgtcctcaccgtgcgcaacgcctcgctgtcggcggccgggacccgcgtgtgcgtgggctcctgcgggggccgcaccttccagcacaccgtgcagctccttgtgtacgccttcccggaccagctgaccgtctccccagcagccctggtgcctggtgacccggaggtggcctgtacggcccacaaagtcacgcccgtggaccccaacgcgctctccttctccctgctcgtcgggggccaggaactggagggggcgcaagccctgggcccggaggtgcaggaggaggaggaggagccccagggggacgaggacgtgctgttcagggtgacagagcgctggcggctgccgcccctggggacccctgtcccgcccgccctctactgccaggccacgatgaggctgcctggcttggagctcagccaccgccaggccatccccgtcctgcacagcccgacctccccggagcctcccgacaccacctccccggagtctcccgacaccacctccccggagtctcccgacaccacctcccaggagcctcccgacaccacctccccggagcctcccgacaagacctccccggagcccgccccccagcagggctccacacacacccccaggagcccaggctccaccaggactcgccgccctgagatctcccaggctgggcccacgcagggagaagtgatcccaacaggctcgtccaaacctgcgggtgaccagctgcccgcggctctgtggaccagcagtgcggtgctgggactgctgctcctggccttgcccacctatcacctctggaaacgctgccggcacctggctgaggacgacacccacccaccagcttctctgaggcttctgccccaggtgtcggcctgggctgggttaagggggaccggccaggtcgggatcagcccctcctgagtggccagcctttccccctgtgaaagcaaaatagcttggaccccttcaagttgagaactggtcagggcaaacctgcctcccattctactcaaagtcatccctctgttcacagagatggatgcatgttctgattgcctctttggagaagctcatcagaaactcaaaagaaggccactgtttgtctcacctacccatgacctgaagcccctccctgagtggtccccacctttctggacggaaccacgtactttttacatacattgattcatgtctcacgtctccctaaaaatgcgtaagaccaagctgtgccctgaccaccctgggcccctgtcgtcaggacctcctgaggctttggcaaataaacctcctaaaatgat

SEQ ID NO: 26979 - protein, 382 aa, Homo sapiens; identical to SEQ ID NO: 3623

SEQ ID NO: 26980 - DNA, 1275 bp, Homo sapiens
gggactgagcatggatttcggactggccctcctgctggcggggcttctggggctcctcctcggccagtccctccaggtgaagcccctgcaggtggagcccccggagccggtggtggccgtggccttgggcgcctcgcgccagctcacctgccgcctggcctgcgcggaccgcggggcctcggtgcagtggcggggcctggacaccagcctgggcgcggtgcagtcggacacgggccgcagcgtcctcaccgtgcgcaacgcctcgctgtcggcggccgggacccgcgtgtgcgtgggctcctgcgggggccgcaccttccagcacaccgtgcagctccttgtgtacgccttcccggaccagctgaccgtctccccagcagccctggtgcctggtgacccggaggtggcctgtacggcccacaaagtcacgcccgtggaccccaacgcgctctccttctccctgctcgtcgggggccaggaactggagggggcgcaagccctgggcccggaggtgcaggaggaggaggaggagccccagggggacgaggacgtgctgttcagggtgacagagcgctggcggctgccgcccctggggacccctgtcccgcccgccctctactgccaggccacgatgaggctgcctggcttggagctcagccaccgccaggccatccccgcgtccaaacctgcgggtgaccagctgcccgcggctctgtggaccagcagtgcggtgctgggactgctgctcctggccttgcccacctatcacctctggaaacgctgccggcacctggctgaggacgacacccacccaccagcttctctgaggcttctgccccaggtgtcggcctgggctgggttaagggggaccggccaggtcgggatcagcccctcctgagtggccagcctttccccctgtgaaagcaaaatagcttggaccccttcaagttgagaactggtcagggcaaacctgcctcccattctactcaaagtcatccctctgttcacagagatggatgcatgttctgattgcctctttggagaagctcatcagaaactcaaaagaaggccactgtttgtctcacctacccatgacctgaagcccctccctgagtggtccccacctttctggacggaaccacgtactttttacatacattgattcatgtctcacgtctccctaaaaatgcgtaagaccaagctgtgccctgaccaccctgggcccctgtcgtcaggacctcctgaggctttggcaaataaacctcctaaaatgat

SEQ ID NO: 26981 - protein, 295 aa, Homo sapiens; identical to SEQ ID NO: 3625

SEQ ID NO: 26982 - DNA, 1430 bp, Homo sapiens
ggagagccaatcaatatacacaaagagggaggagaagagagagtgccaataaggacacaaggaaagtggtagcgtacccttgtcacttcccaaagtctcccagcgggataccggtgccctctgcccttaatcaagatggccgccttgggggggctctagcgcacagtggaatatggcggtgcttccggtcccgctgccctcagcgaagatggcggcagtggagaagcggcggcaagcggtaccaccgccggccggtttcacggacagcggccgccagtcggtatcccgggcggcgggggcggccgagagcgaggaggacttcctgcggcaggtcggcgtgacggaaatgctacgtgcggccctgctgaaggtgctggaggcgcggcccgaggagccgatcgccttcctggctcactacttcgagaacatgggcctgcgctcgcctgtaaacggcggcgccggggagcccccgggccagctcctgctgcagcagcagcgcctgggccgcgcgctatggcaccttcgcctggcccaccactcccagagatgccccagacagatgcctgccgttgattcaagacatttactgagcacctactgtgggcagggcagtgttctgggcaccagggctataaccaagacgaacttccggccctggagggcagggccgccttcaacaacaacgtgagcgtggcctacgagtgcctgagcgccggcgggcgcaggaagaggccggggctggacgggcgcacctacagcgagctgctcaggcgcatctgccgggacggccaagcccccgaggaggtggtggcgccgctgctgcgcaaggtgcagtgccgtgaccacgaggcggtgccgctgagcgtcttccgcgcgggcacactcacctgcttcgtgctgctggagttcgtggcgcgcgccggcgcgctcttccagctgctggaggactcggccgccgccgtggccgaccgccgcgtgggccaggccgtgctggacaccctggagggcgcgctgcaggccagcgacgccgccgcgcccgcgcgcttcctggaggccggctcgcgcttggggcccgacagcctggcgctggcgctggaccgcgccgtcggggggcggcggcccagcgcgcccatgacccgcgaggagtttctggagagggccgccgcgctcttcatcgcgaaggtcaagccggtgggctgaggcccgtgggccgcgcggatccgggatctgcgctggggggtccccgcgtgcggggcgcgcggagccttcccttcgccctggtgaggccctgccataaccaggcgcccagccctgcggaggaggccggggctcccaggaagcggacgcccggtccccacacagcgccgcggccgcccctccacccccgcgggagcccctgccccacgctaataaaatgtgttgcgaggctg

SEQ ID NO: 26983 - protein, 171 aa, Homo sapiens
MAVLPVPLPSAKMAAVEKRRQAVPPPAGFTDSGRQSVSRAAGAAESEEDFLRQVGVTEMLRAALLKVLEARPEEPIAFLAHYFENMGLRSPVNGGAGEPPGQLLLQQQRLGRALWHLRLAHHSQRCPRQMPAVDSRHLLSTYCGQGSVLGTRAITKTNFRPWRAGPPSTTT

SEQ ID NO: 26984 - DNA, 1311 bp, Homo sapiens
ggagagccaatcaatatacacaaagagggaggagaagagagagtgccaataaggacacaaggaaagtggtagcgtacccttgtcacttcccaaagtctcccagcgggataccggtgccctctgcccttaatcaagatggccgccttgggggggctctagcgcacagtggaatatggcggtgcttccggtcccgctgccctcagcgaagatggcggcagtggagaagcggcggcaagcggtaccaccgccggccggtttcacggacagcggccgccagtcggtatcccgggcggcgggggcggccgagagcgaggaggacttcctgcggcaggtcggcgtgacggaaatgctacgtgcggccctgctgaaggtgctggaggcgcggcccgaggagccgatcgccttcctggctcactacttcgagaacatgggcctgcgctcgcctgtaaacggcggcgccggggagcccccgggccagctcctgctgcagcagcagcgcctgggccgcgcgctatggcaccttcgcctggcccaccactcccagagggccgccttcaacaacaacgtgagcgtggcctacgagtgcctgagcgccggcgggcgcaggaagaggccggggctggacgggcgcacctacagcgagctgctcaggcgcatctgccgggacggccaagcccccgaggaggtggtggcgccgctgctgcgcaaggtgcagtgccgtgaccacgaggcggtgccgctgagcgtcttccgcgcgggcacactcacctgcttcgtgctgctggagttcgtggcgcgcgccggcgcgctcttccagctgctggaggactcggccgccgccgtggccgaccgccgcgtgggccaggccgtgctggacaccctggagggcgcgctgcaggccagcgacgccgccgcgcccgcgcgcttcctggaggccggctcgcgcttggggcccgacagcctggcgctggcgctggaccgcgccgtcggggggcggcggcccagcgcgcccatgacccgcgaggagtttctggagagggccgccgcgctcttcatcgcgaaggtcaagccggtgggctgaggcccgtgggccgcgcggatccgggatctgcgctggggggtccccgcgtgcggggcgcgcggagccttcccttcgccctggtgaggccctgccataaccaggcgcccagccctgcggaggaggccggggctcccaggaagcggacgcccggtccccacacagcgccgcggccgcccctccacccccgcgggagcccctgccccacgctaataaaatgtgttgcgaggctg

SEQ ID NO: 26985 - protein, 302 aa, Homo sapiens [sequence omitted]

SEQ ID NO: 26986 - DNA, 2154 bp, Homo sapiens
ggagagccaatcaatatacacaaagagggaggagaagagagagtgccaataaggacacaaggaaagtggtagcgtacccttgtcacttcccaaagtctcccagcgggataccggtgccctctgcccttaatcaagatggccgccttgggggggctctagcgcacagtggaatatggcggtgcttccggtcccgctgccctcagcgaagatggcggcagtggagaagcggcggcaagcggtaccaccgccggccggtttcacggacagcggccgccagtcggtatcccgggcggcgggggcggccgagagcgaggaggacttcctgcggcaggtcggcgtgacggaaatgctacgtgcggccctgctgaaggtgctggaggcgcggcccgaggagccgatcgccttcctggctcactacttcgagaacatgggcctgcgctcgcctgtaaacggcggcgccggggagcccccgggccagctcctgctgcagcagcagcgcctgggccgcgcgctatggcaccttcgcctggcccaccactcccagagggccgccttcaacaacaacgtgagcgtggcctacgagtgcctgagcgccggcgggcgcaggaagaggccggggctggacgggcgcacctacagcgagctgctcaggcgcatctgccgggacggccaagcccccgaggaggtggtggcgccgctgctgcgcaaggtgcagtgccgtgaccacgaggcggtgccgctgagcgtcttccgcgcgggcacactcacctgcttcgtgctgctggagttcgtggcgcgcgccggcgcgctcttccagctgctggaggactcggccgccgccgtggccgaccgccgcgtgggccaggccgtgctggacaccctggagggcgcgctgcaggccagcgacgccgccgcgcccgcgcgcttcctggaggccggctcgcgcttggggcccgacagcctggcgctggcgctggaccgcgccgtcggggggcggcggcccagcgcgcccatgacccgcgaggagtttctggagagggccgccgcgctcttcatcgcgaaggtcaagccggtgggctgaggcccgtgggccgcgcggatccgggatctgcgctggggggtccccgcgtgcggggcgcgcggagccttcccttcgccctggtgaggccctgccataaccaggcgcccagccctgcggaggaggccggggctcccaggaagcggacgcccggtccccacacagcgccgcggccgcccctccacccccgcgggagcccctgccccacgctaataaaatgtgttgcgaggctgacgctggtgtgtatgcgagcgcccgcctcccagccccggtgcccgcagaagacgcttttccccagcaggtcacccacggccccggaaccgcggcgactggaggctggattcgaggccggaaacgccgggacccctggacccggcctggtgggagcagcggagggggacgccccacggggccctgcggagcctgaagccggagagcaggcggctcttctggaacgcagggcccgggccctccagccccgcccggcccaggtatcctccctgagcctcagtctccccagatgtcaaatgaagaggccagctgggcagatggtagtgacattggtgagacaacagccctaacacttcccaggaactgaagtgcctcatgtgattgattcccaggcccaggcagcggaggttacaccctcagcaagggctcagctgggatctgcgcccggcctgctccagaacgcagcccactcgccaccggtggggagggtcgtccggtatcccccagtgcccaccaccaccaaccagaatcacttctcagactgcaagagcgaatccagccgggcgtggtggctcacacctgtaaccccagcactttgggaggctaaggcggcggatcacttgaggtcaggagttcaagatcagcctgaccaacatggtgaaaccctgtctctactaaaaatacgaaaaaaaaaaaaagctgggctgtggtggcaggcgcctgtaatcccagctactcaggaggctgaggcaggagaataacttgaacccaggaggcagaagtggcagtgagccgagattgagccactgcactccaatctgtgcgacagagtgagaccctgtctc

SEQ ID NO: 26987 - protein, 302 aa, Homo sapiens [sequence omitted]

SEQ ID NO: 26988 - DNA, 963 bp, Homo sapiens
ggggcgcgcgggcccggccaaggcaagcgccggtggggcggcggcgccagagctgctggagcgctcggggtccccgggcggcggcggcggcgcagaggaggaggcaggcggcggccccggtggctcccccccggacggtgcgcggcccggcccgtctcgcgaactcgcggtggtcgcgcggccccgcgctgctccgaccccgggcccctccgccgccgccatggctcggccgctagtgcccagctcgcagaaggcgctgctgctggagctcaaggggctgcaggaagagccggtcgagggattccgcgtgacactggtggacgagggcgatctatacaactgggaggtggccatcttcgggccccccaacacctactacgagggcggctacttcaaggcgcgcctcaagttccccatcgactacccatactctccaccagcctttcggttcctgaccaagatgtggcaccctaacatctacgagacgggggacgtgtgtatctccatcctccacccgccggtggacgacccccagagcggggagctgccctcagagaggtggaaccccacgcagaacgtcaggaccattctcctgagtgtgatctccctcctgaacgagcccaacaccttctcgcccgcaaacgtggacgcctccgtgatgtacaggaagtggaaagagagcaaggggaaggatcgggagtacacagacatcatccggaagcaggtcctggggaccaaggtggacgcggagcgtgacggcgtgaaggtgcccaccacgctggccgagtactgcgtgaagaccaaggcgccggcgcccgacgagggctcagacctcttctacgacgactactacgaggacggcgaggtggaggaggaggccgacagctgcttcggggacgatgaggatgactctggcacggaggagtcctgacaccaccagaataaacttgccgagtttacctc

SEQ ID NO: 26989 - protein, 236 aa, Homo sapiens; identical to SEQ ID NO: 3629

SEQ ID NO: 26990 - DNA, 1488 bp, Homo sapiens
ggggcgcgcgggcccggccaaggcaagcgccggtggggcggcggcgccagagctgctggagcgctcggggtccccgggcggcggcggcggcgcagaggaggaggcaggcggcggccccggtggctcccccccggacggtgcgcggcccggcccgtctcgcgaactcgcggtggtcgcgcggccccgcgctgctccgaccccgggcccctccgccgccgccatggctcggccgctagtgcccagctcgcagaaggcgctgctgctggagctcaaggggctgcaggaagagccggtcgagggattccgcgtgacactggtggacgagggcgatctatacaactgggaggtggccatcttcgggccccccaacacctactacgagggcggctacttcaaggcgcgcctcaagttccccatcgactacccatactctccaccagcctttcggttcctgaccaagatgtggcaccctaacatctacgagacgggggacgtgtgtatctccatcctccacccgccggtggacgacccccagagcggggagctgccctcagagaggtggaaccccacgcagaacgtcaggaccattctcctgagtgtgatctccctcctgaacgagcccaacaccttctcgcccgcaaacgtggacgcctccgtgatgtacaggaagtggaaagagagcaaggggaaggatcgggagtacacagacatcatccggaagcaggtcctggggaccaaggtggacgcggagcgtgacggcgtgaaggtgcccaccacgctggccgagtactgcgtgaagaccaaggcgccggcgcccgacgagggctcagacctcttctacgacgactactacgaggacggcgaggtggaggaggaggccgacagctgcttcggggacgatgaggatgactctggcacggaggagtcctgacaccaccagaataaacttgccgagtttacctcactagggccggacccgtggctccttagacgacagactacctcacggaggttttgtgctggtccccgtctcctctggttgtttcgttttggctttttctccctccccatgtctgttctgggttttcacgtgcttcagagaagaggggctgccccaccgccactcacgtcactcggggctcggtggacgggcccagggtgggagcggccggcccacctgtcccctcgggaggggagctgagcccgacttctaccggggtcccccagcttccggactggccgcaccccggaggagccacgggggcgctgctgggaacgtgggcggggggccgtttcctgacactaccagcctgggaggcccaggtgtagcggtccgaggggcccggtcctgcctgtcagctccaggtcctggagccacgtccagcacagagtggacggattcaccgtggccgactcttttccctgctttggtttgtttgaaatctaaataaaactactttatgagaggccagagaagctgtgcttggg

SEQ ID NO: 26991 - protein, 236 aa, Homo sapiens; identical to SEQ ID NO: 3629

SEQ ID NO: 26992 - DNA, 669 bp, Homo sapiens
gggcgcgcgggcccggccaaggcaagcgccggtggggcggcggcgccagagctgctggagcgctcggggtccccgggcggcggcggcggcgcagaggaggaggcaggcggcggccccggtggctcccccccggacggtgcgcggcccggcccgtctcgcgaactcgcggtggtcgcgcggccccgcgctgctccgaccccgggcccctccgccgccgccatggctcggccgctagtgcccagctcgcagaaggcgctgctgctggagctcaaggggctgcaggaagagccggtcgagggattccgcgtgacactggtggacgagggcgatctatacaactgggaggtggccatcttcgggccccccaacacctactacgagggcggctacttcaaggcgcgcctcaagttccccatcgactacccatactctccaccagcctttcggttcctgaccaagatgtggcaccctaacatctacgagacgggggacgtgtgtatctccatcctccacccgccggtggacgacccccagagcggggagctgccctcagagaggtggaaccccacgcagaacgtcaggaccattctcctgagtgtgatctccctcctgaacgagcccaacaccttctcgcccgcaaacgtggacgcctccgtgatgtacaggaag

SEQ ID NO: 26993 - protein, 149 aa, Homo sapiens
MARPLVPSSQKALLLELKGLQEEPVEGFRVTLVDEGDLYNWEVAIFGPPNTYYEGGYFKARLKFPIDYPYSPPAFRFLTKMWHPNIYETGDVCISILHPPVDDPQSGELPSERWNPTQNVRTILLSVISLLNEPNTFSPANVDASVMYR

SEQ ID NO: 26994 - DNA, 1281 bp, Homo sapiens
gcgcgggcccggccaaggcaagcgccggtggggcggcggcgccagagcgctgctgctggagctcaaggggctgcaggaagagccggtcgagggattccgcgtgacactggtggacgagggcgatctatacaactgggaggtggccatcttcgggccccccaacacctactacgagggcggctacttcaaggcgcgcctcaagttccccatcgactacccatactctccaccagcctttcggttcctgaccaagatgtggcaccctaacatctacgagacgggggacgtgtgtatctccatcctccacccgccggtggacgacccccagagcggggagctgccctcagagaggtggaaccccacgcagaacgtcaggaccattctcctgagtgtgatctccctcctgaacgagcccaacaccttctcgcccgcaaacgtggacgcctccgtgatgtacaggaagtggaaagagagcaaggggaaggatcgggagtacacagacatcatccggaagcaggtcctggggaccaaggtggacgcggagcgtgacggcgtgaaggtgcccaccacgctggccgagtactgcgtgaagaccaaggcgccggcgcccgacgagggctcagacctcttctacgacgactactacgaggacggcgaggtggaggaggaggccgacagctgcttcggggacgatgaggatgactctggcacggaggagtcctgacaccaccagaataaacttgccgagtttacctcactagggccggacccgtggctccttagacgacagactacctcacggaggttttgtgctggtccccgtctcctctggttgtttcgttttggctttttctccctccccatgtctgttctgggttttcacgtgcttcagagaagaggggctgccccaccgccactcacgtcactcggggctcggtggacgggcccagggtgggagcggccggcccacctgtcccctcgggaggggagctgagcccgacttctaccggggtcccccagcttccggactggccgcaccccggaggagccacgggggcgctgctgggaacgtgggcggggggccgtttcctgacactaccagcctgggaggcccaggtgtagcggtccgaggggcccggtcctgcctgtcagctccaggtcctggagccacgtccagcacagagtggacggattcaccgtggccgactcttttccctgctttggtttgtttgaaatctaaataaaactactttatgagaggccagagaagctgtgcttggg

SEQ ID NO: 26995 - protein, 156 aa, Homo sapiens [sequence omitted]

SEQ ID NO: 26996 - DNA, 920 bp, Homo sapiens
gcggcggcgccagagctgctggagcgctcggggtccccgggcggcggcggcggcgcagaggaggaggcaggcggcggccccggtggctcccccccggacggtgcgcggcccggcccgtctcgcgaactcgcggtggtcgcgcggccccgcgctgctccgaccccgggcccctccgccgccgccatggctcggccgctagtgcccagctcgcagaaggcgctgctgctggagctcaaggggctgcaggaagagccggtcgagggattccgcgtgacactggtggacgagggcgatctatacaactgggaggtggccatcttcgggccccccaacacctactacgagggcggctacttcaaggcgcgcctcaagttccccatcgactacccatactctccaccagcctttcggttcctgaccaagatgtggcaccctaacatctacgagacgggggacgtgtgtatctccatcctccacccgccggtggacgacccccagagcggggagctgccctcagagaggtggaaccccacgcagaacgtcaggtaagccggcccaaccccctgtgtccacccagaacatcaggtaggccgggctccgtcccgtatccacccagaccatcaggtaggccgggctcccccacaggctgtggcgccaaggcctgattcgggacctgccagctggcggtcctgggcctcgctgtacctgcacggtaggtgctttcacggggcctgcggcaccgtgtgtcggtgcagactcccaccaggaccccaggccggccccaccgtctggaaccacctagaggtgtcccgccatcctcagtcctggggccttctccttacccagccgtctctgggttggtcacctcgtgccacgtgtgccgcctgggcctcgtccccaggtacaagcactgggccgtg

SEQ ID NO: 26997 - protein, 121 aa, Homo sapiens
MARPLVPSSQKALLLELKGLQEEPVEGFRVTLVDEGDLYNWEVAIFGPPNTYYEGGYFKARLKFPIDYPYSPPAFRFLTKMWHPNIYETGDVCISILHPPVDDPQSGELPSERWNPTQNVR

SEQ ID NO: 26998 - DNA, 861 bp, Homo sapiens
gcggcggcgccagagctgctggagcgctcggggtccccgggcggcggcggcggcgcagaggaggaggcaggcggcggccccggtggctcccccccggacggtgcgcggcccggcccgtctcgcgaactcgcggtggtcgcgcggccccgcgctgctccgaccccgggcccctccgccgccgccatggctcggccgctagtgcccagctcgcagaaggcgctgctgctggagctcaaggggctgcaggaagagccggtcgagggattccgcgtgacactggtggacgagggcgatctatacaactgggaggtggccatcttcgggccccccaacacctactacgagggcggctacttcaaggcgcgcctcaagttccccatcgactacccatactctccaccagcctttcggttcctgaccaagatgtggcaccctaacatctacgagacgggggacgtgtgtatctccatcctccacccgccggtggacgacccccagagcggggagctgccctcagagaggtggaaccccacgcagaacgtcaggaccattctcctgagtgtgatctccctcctgaacgagcccaacaccttctcgcccgcaaacgtggacgcctccgtgatgtacaggaagtggaaagagagccacgggggcgctgctgggaacgtgggcggggggccgtttcctgacactaccagcctgggaggcccaggtgtagcggtccgaggggcccggtcctgcctgtcagctccaggtcctggagccacgtccagcacagagtggacggattcaccgtggccgactcttttccctgctttggtttgtttgaaatctaaataaaactactttatgagaggccag

SEQ ID NO: 26999 - protein, 218 aa, Homo sapiens
MARPLVPSSQKALLLELKGLQEEPVEGFRVTLVDEGDLYNWEVAIFGPPNTYYEGGYFKARLKFPIDYPYSPPAFRFLTKMWHPNIYETGDVCISILHPPVDDPQSGELPSERWNPTQNVRTILLSVISLLNEPNTFSPANVDASVMYRKWKESHGGAAGNVGGGPFPDTTSLGGPGVAVRGARSCLSAPGPGATSSTEWTDSPWPTLFPALVCLKSK

SEQ ID NO: 27000 - DNA, 383 bp, Homo sapiens
gagcgctcggggtccccgggcggcggcggcggcgcagaggaggaggcaggcggcggccccggtggctccccccccggccggcccacctgtcccctcgggaggggagctgagcccgacttctaccggggtcccccagcttccggactggccgcaccccggaggagccacgggggcgctgctgggaacgtgggcggggggccgtttcctgacactaccagcctgggaggcccaggtgtagcggtccgaggggcccggtcctgcctgtcagctccaggtcctggagccacgtccagcacagagtggacggattcaccgtggccgactcttttccctgctttggtttgtttgaaatctaaataaaactactttatgagaggccagag

SEQ ID NO: 27001 - protein, 119 aa, Homo sapiens
ERSGSPGGGGGAEEEAGGGPGGSPPGRPTCPLGRGAEPDFYRGPPASGLAAPRRSHGGAAGNVGGGPFPDTTSLGGPGVAVRGARSCLSAPGPGATSSTEWTDSPWPTLFPALVCLKSK

SEQ ID NO: 27002 - DNA, 699 bp, Homo sapiens
ggagctcaaggggctgcaggaagagccggtcgagggattccgcgtgacactggtggacgagggcgatctatacaactgggaggtggccatcttcgggccccccaacacctactacgagggcggctacttcaaggcgcgcctcaagttccccatcgactacccatactctccaccagcctttcggttcctgaccaagatgtggcaccctaacatctacgagacgggggacgtgtgtatctccatcctccacccgccggtggacgacccccagagcggggagctgccctcagagaggtggaaccccacgcagaacgtcaggaccattctcctgagtgtgatctccctcctgaacgagcccaacaccttctcgcccgcaaacgtggacgcctccgtgatgtacaggaagtggaaagagagcaaggggaaggatcgggagtacacagacatcatccggaagcaggtcctggggaccaaggtggacgcggagcgtgacggcgtgaaggtgcccaccacgctggccgagtactgcgtgaagaccaaggcgccggcgcccgacgagggctcagacctcttctacgacgactactacgaggacggcgaggtggaggaggaggccgacagctgcttcggggacgatgaggatgactctggcacggaggagtcctgacaccaccagaataaacttgccgagtttacctc

SEQ ID NO: 27003 - protein, 156 aa, Homo sapiens [sequence omitted]

SEQ ID NO: 27004 - DNA, 968 bp, Homo sapiens
agagaagagccggaaggctggggtgccccgggccgccccactccgacccactctccccacaggaccattctcctgagtgtgatctccctcctgaacgagcccaacaccttctcgcccgcaaacgtggacgcctccgtgatgtacaggaagtggaaagagagcaaggggaaggatcgggagtacacagacatcatccggaagcaggtcctggggaccaaggtggacgcggagcgtgacggcgtgaaggtgcccaccacgctggccgagtactgcgtgaagaccaaggcgccggcgcccgacgagggctcagacctcttctacgacgactactacgaggacggcgaggtggaggaggaggccgacagctgcttcggggacgatgaggatgactctggcacggaggagtcctgacaccaccagaataaacttgccgagtttacctcactagggccggacccgtggctccttagacgacagactacctcacggaggttttgtgctggtccccgtctcctctggttgtttcgttttggctttttctccctccccatgtctgttctgggttttcacgtgcttcagagaagaggggctgccccaccgccactcacgtcactcggggctcggtggacgggcccagggtgggagcggccggcccacctgtcccctcgggaggggagctgagcccgacttctaccggggtcccccagcttccggactggccgcaccccggaggagccacgggggcgctgctgggaacgtgggcggggggccgtttcctgacactaccagcctgggaggcccaggtgtagcggtccgaggggcccggtcctgcctgtcagctccaggtcctggagccacgtccagcacagagtggacggattcaccgtggccgactcttttccctgctttggtttgtttgaaatctaaataaaactactttatgagaggccagagaagctgtgcttggg

SEQ ID NO: 27005 - protein, 90 aa, Homo sapiens [sequence omitted]

SEQ ID NO: 27006 - DNA, 805 bp, Homo sapiens
cacacgccgttttaagagaaacctgagcgttggggaagcaggtcctggggaccaaggtggacgcggagcgtgacggcgtgaaggtgcccaccacgctggccgagtactgcgtgaagaccaaggcgccggcgcccgacgagggctcagacctcttctacgacgactactacgaggacggcgaggtggaggaggaggccgacagctgcttcggggacgatgaggatgactctggcacggaggagtcctgacaccaccagaataaacttgccgagtttacctcactagggccggacccgtggctccttagacgacagactacctcacggaggttttgtgctggtccccgtctcctctggttgtttcgttttggctttttctccctccccatgtctgttctgggttttcacgtgcttcagagaagaggggctgccccaccgccactcacgtcactcggggctcggtggacgggcccagggtgggagcggccggcccacctgtcccctcgggaggggagctgagcccgacttctaccggggtcccccagcttccggactggccgcaccccggaggagccacgggggcgctgctgggaacgtgggcggggggccgtttcctgacactaccagcctgggaggcccaggtgtagcggtccgaggggcccggtcctgcctgtcagctccaggtcctggagccacgtccagcacagagtggacggattcaccgtggccgactcttttccctgctttggtttgtttgaaatctaaataaaactactttatgagaggccagagaagctgtgcttggg

SEQ ID NO: 27007 - protein, 43 aa, Homo sapiens
MSVLGFHVLQRRGAAPPPLTSLGARWTGPGWERPAHLSPREGS

SEQ ID NO: 27008 - DNA, 372 bp, Homo sapiens
caggtcctggggaccaaggtggacgcggagcgtgacggcgtgaaggtgcccaccacgctggccgagtactgcgtgaagaccaaggcgccggcgcccgacgagggctcagacctcttctacgacgactactacgaggacggcgaggtggaggaggaggccgacagctgcttcggggacgatgaggatgactctggcacggaggagtcctgacaccaccagaataaacttgccgagtttacctcactaggcccggtcctgcctgtcagctccaggtcctggagccacgtccagcacagagtggacggattcaccgtggccgactcttttccctgctttggtttgtttgaaatctaaataaaactactttatgag

SEQ ID NO: 27009 - protein, 47 aa, Homo sapiens
HHQNKLAEFTSLGPVLPVSSRSWSHVQHRVDGFTVADSFPCFGLFEI

SEQ ID NO: 27010 - DNA, 290 bp, Homo sapiens
gcttcggggacgatgaggatgactctggcacggaggagtcctgacaccaccagaataaacttgccgagtttacctcactaggggcgctgctgggaacgtgggcggggggccgtttcctgacactaccagcctgggaggcccaggtgtagcggtccgaggggcccggtcctgcctgtcagctccaggtcctggagccacgtccagcacagagtggacggattcaccgtggccgactcttttccctgctttggtttgtttgaaatctaaataaaactactttatgagaggcc

SEQ ID NO: 27011 - protein, 70 aa, Homo sapiens
TCRVYLTRGAAGNVGGGPFPDTTSLGGPGVAVRGARSCLSAPGPGATSSTEWTDSPWPTLFPALVCLKSK

SEQ ID NO: 27012 - DNA, 949 bp, Homo sapiens
ggctcggggccggggccagcacccacactgggtctccacagcggcatggaggcctgcgtgtcttcactgctggtgctggccctgggggccctgtcagtaggcagctcctttgggacccagatcatcgggggccgggaggtgatcccccactcgcgcccgtacatggcctcactgcagagaaatggctcccacctgtgcgggggtgtcctggtgcacccaaagtgggtgctgacggctgcccactgcctggcccagcggatggcccagctgaggctggtgctggggctccacaccctggacagccccggtctcaccttccacatcaaggcagccatccagcaccctcgctacaagcccgtccctgccctggagaacgacctcgcgctgcttcagctggacgggaaagtgaagcccagccggaccatccggccgttggccctgcccagtaagcgccaggtggtggcagcagggactcggtgcagcatggccggctgggggctgacccaccagggcgggcgcctgtcccgggtgctgcgggagctggacctccaagtgctggacacccgcatgtgtaacaacagccgcttctggaacggcagcctctcccccagcatggtctgcctggcggccgactccaaggaccaggctccctgcaagggtgactcgggcgggcccctggtgtgtggcaaaggccgggtgttggccagagtcctgtccttcagctccagggtctgcactgacatcttcaagcctcccgtggccaccgctgtggcgccttacgtgtcctggatcaggaaggtcaccggccgatcggcctgatgccctggggtgatggggaccccctcgctgtctccacaggacccttcccctccaggggtgcagtggggtgggtgaggacgggtgggagggacagggagggaccaataaatcataatgaagaaacgctcag

SEQ ID NO: 27013 - protein, 257 aa, Homo sapiens
MEACVSSLLVLALGALSVGSSFGTQIIGGREVIPHSRPYMASLQRNGSHLCGGVLVHPKWVLTAAHCLAQRMAQLRLVLGLHTLDSPGLTFHIKAAIQHPRYKPVPALENDLALLQLDGKVKPSRTIRPLALPSKRQVVAAGTRCSMAGWGLTHQGGRLSRVLRELDLQVLDTRMCNNSRFWNGSLSPSMVCLAADSKDQAPCKGDSGGPLVCGKGRVLARVLSFSSRVCTDIFKPPVATAVAPYVSWIRKVTGRSA

SEQ ID NO: 27014 - DNA, 1623 bp, Homo sapiens
cctgcccctttccagttagcccttcgcgttcggcttagtctgcggtcctcttgcattgcgactccgagtttaacttccaacacacactttcaacctccaagagacgcccccacctgtgtcgccccaatagcgacttttctcaccgtggtcgccgcggaacttcaagggtccttcctacccgcgttgctgagagtctgggtttacgcgtcacctcgggcgggacccgatcctccgctcctgaggcccccacaatgaagcagtcggacgcgtctccccaagaaagggtggactccgacgaccagtggggagagtactcctgcgtcttcctccccgagcccatgggcacggccaacatccagctccacgggcctcccagagtgaaggctgtgaagtcgtcagaacacatcaacgagggggagacggccatgctggtctgcaagtcagagtccgtgccacctgtcactgactgggcctggtacaagatcactgactctgaggacaaggccctcatgaacggctccgagagcaggttcttcgtgagttcctcgcagggccggtcagagctacacattgagaacctgaacatggaggccgaccccggccagtaccggtgcaacggcaccagctccaagggctccgaccaggccatcatcacgctccgcgtgcgcagccacctggccgccctctggcccttcctgggcatcgtggctgaggtgctggtgctggtcaccatcatcttcatctacgagaagcgccggaagcccgaggacgtcctggatgatgacgacgccggctctgcacccctgaagagcagcgggcagcaccagaatgacaaaggcaagaacgtccgccagaggaactcttcctgaggcaggtggcccgaggacgctccctgctccacgtctgcgccgccgccggagtccactcccagtgcttgcaagattccaagttctcacctcttaaagaaaacccaccccgtagattcccatcatacacttccttcttttttaaaaaagttgggttttctccattcaggattctgttccttaggtttttttccttctgaagtgtttcacgagagcccgggagctgctgccctgcggccccgtctgtggctttcagcctctgggtctgagtcatggccgggtgggcggcacagccttctccactggccggagtcagtgccaggtccttgccctttgtggaaagtcacaggtcacacgaggggccccgtgtcctgcctgtctgaagccaatgctgtctggttgcgccatttttgtgcttttatgtttaattttatgagggccacgggtctgtgttcgactcagcctcagggacgactctgacctcttggccacagaggactcacttgcccacaccgagggcgaccccgtcacagcctcaagtcactcccaagccccctccttgtctgtgcatccgggggcagctctggagggggtttgctggggaactggcgccatcgccgggactccagaaccgcagaagcctccccagctcacccctggaggacggccggctctctatagcaccagggctcacgtgggaacccccctcccacccaccgccacaataaagatcgcccccacctccaccctcaccctc

SEQ ID NO: 27015 - protein, 205 aa, Homo sapiens; identical to SEQ ID NO: 3639

SEQ ID NO: 27016 - DNA, 1165 bp, Homo sapiens
ttcggcttagtctgcggtcctcttgcattgcgactccgagtttaacttccaacacacactttcaacctccaagagacgcccccacctgtgtcgccccaatagcgacttttctcaccgtggtcgccgcggaacttcaagggtccttcctacccgcgttgctgagagtctgggtttacgcgtcacctcgggcgggacccgatcctccgctcctgaggcccccacaatgaagcagtcggacgcgtctccccaagaaagccggcacagtcttcactaccgtagaagaccttggctccaagatactcctcacctgctccttgaatgacagcgccacagaggtcacagggcaccgctggctgaaggggggcgtggtgctgaaggaggacgcgctgcccggccagaaaacggagttcaaggtggactccgacgaccagtggggagagtactcctgcgtcttcctccccgagcccatgggcacggccaacatccagctccacgggcctcccagagtgaaggctgtgaagtcgtcagaacacatcaacgagggggagacggccatgctggtctgcaagtcagagtccgtgccacctgtcactgactgggcctggtacaagatcactgactctgaggacaaggccctcatgaacggctccgagagcaggttcttcgtgagttcctcgcagggccggtcagagctacacattgagaacctgaacatggaggccgaccccggccagtaccggtgcaacggcaccagctccaagggctccgaccaggccatcatcacgctccgcgtgcgcagccacctggccgccctctggcccttcctgggcatcgtggctgaggtgctggtgctggtcaccatcatcttcatctacgagaagcgccggaagcccgaggacgtcctggatgatgacgacgccggctctgcacccctgaagagcagcgggcagcaccagaatgacaaaggcaagaacgtccgccagaggaactcttcctgaggcaggtggcccgaggacgctccctgctccacgtctgcgccgccgccggagtccactcccagtgcttgcaagattccaagttctcacctcttaaagaaaacccaccccgtagattcccatcatacacttccttcttttttaaaaaagttgggttttctccattcagg

SEQ ID NO: 27017 - protein, 176 aa, Homo sapiens; identical to SEQ ID NO: 3637

SEQ ID NO: 27018 - DNA, 1752 bp, Homo sapiens
ttcggcttagtctgcggtcctcttgcattgcgactccgagtttaacttccaacacacactttcaacctccaagagacgcccccacctgtgtcgccccaatagcgacttttctcaccgtggtcgccgcggaacttcaagggtccttcctacccgcgttgctgagagtctgggtttacgcgtcacctcgggcgggacccgatcctccgctcctgaggcccccacaatgaagcagtcggacgcgtctccccaagaaagccggcacagtcttcactaccgtagaagaccttggctccaagatactcctcacctgctccttgaatgacagcgccacagaggtcacagggcaccgctggctgaaggggggcgtggtgctgaaggaggacgcgctgcccggccagaaaacggagttcaaggtggactccgacgaccagtggggagagtactcctgcgtcttcctccccgagcccatgggcacggccaacatccagctccacgggcctcccagagtgaaggctgtgaagtcgtcagaacacatcaacgagggggagacggccatgctggtctgcaagtcagagtccgtgccacctgtcactgactgggcctggtacaagatcactgactctgaggacaaggccctcatgaacggctccgagagcaggttcttcgtgagttcctcgcagggccggtcagagctacacattgagaacctgaacatggaggccgaccccggccagtaccggtgcaacggcaccagctccaagggctccgaccaggccatcatcacgctccgcgtgcgcagccacctggccgccctctggcccttcctgggcatcgtggctgaggtgctggtgctggtcaccatcatcttcatctacgagaagcgccggaagcccgaggacgtcctggatgatgacgacgccggctctgcacccctgaagagcagcgggcagcaccagaatgacaaaggcaagaacgtccgccagaggaactcttcctgaggcaggtggcccgaggacgctccctgctccacgtctgcgccgccgccggagtccactcccagtgcttgcaagattccaagttctcacctcttaaagaaaacccaccccgtagattcccatcatacacttccttcttttttaaaaaagttgggttttctccattcaggattctgttccttaggtttttttccttctgaagtgtttcacgagagcccgggagctgctgccctgcggccccgtctgtggctttcagcctctgggtctgagtcatggccgggtgggcggcacagccttctccactggccggagtcagtgccaggtccttgccctttgtggaaagtcacaggtcacacgaggggccccgtgtcctgcctgtctgaagccaatgctgtctggttgcgccatttttgtgcttttatgtttaattttatgagggccacgggtctgtgttcgactcagcctcagggacgactctgacctcttggccacagaggactcacttgcccacaccgagggcgaccccgtcacagcctcaagtcactcccaagccccctccttgtctgtgcatccgggggcagctctggagggggtttgctggggaactggcgccatcgccgggactccagaaccgcagaagcctccccagctcacccctggaggacggccggctctctatagcaccagggctcacgtgggaacccccctcccacccaccgccacaataaagatcgcccccacctccaccctcaccctc

SEQ ID NO: 27019 - protein, 176 aa, Homo sapiens; identical to SEQ ID NO: 3637

SEQ ID NO: 27020 - DNA, 1450 bp, Homo sapiens
ctcccgggctcaagcgatcttcccgcctcgacctcccaaggctctgggagtacagacgtgagccacagcggccggcccgtgtttaactcagataaaatctgggtaacacactttcaacgcttcaaccccctcgggcgcaccgctctgcgctcattgcaactttgaaagcaggaaggaagaaatgcgcaggctccagccgcgtccccgcaggccccactcccgtttcctagcaacgccgggtcacgtgcgccgccgcccggattccgtagcgtgagcctgccggagccggcgcgtacatgcgagcgtgtgcgcgcgtgcgcaggcggggcgaccggcgtccccggcgctcgccccgcccccgagatgacgccgtgcgtgcgcgcgcccggtccgcgcctccgccgctttttatagcggccgcgggcggcggcggcagcggttggaggttgtaggaccggcgaggaataggaatcatggcggctgcgctgttcgtgctgctgggattcgcgctgctgggcacccacggagcctccggggctgccggcacagtcttcactaccgtagaagaccttggctccaagatactcctcacctgctccttgaatgacagcgccacagaggtcacagggcaccgctggctgaaggggggcgtggtgctgaaggaggacgcgctgcccggccagaaaacggagttcaaggtggactccgacgaccagtggggagagtactcctgcgtcttcctccccgagcccatgggcacggccaacatccagctccacgggcctcccagagtgaaggctgtgaagtcgtcagaacacatcaacgagggggagacggccatgctggtctgcaagtcagagtccgtgccacctgtcactgactgggcctggtacaagatcactgactctgaggacaaggccctcatgaacggctccgagagcaggttcttcgtgagttcctcgcagggccggtcagagctacacattgagaacctgaacatggaggccgaccccggccagtaccggtgcaacggcaccagctccaagggctccgaccaggccatcatcacgctccgcgtgcgcagccacctggccgccctctggcccttcctgggcatcgtggctgaggtgctggtgctggtcaccatcatcttcatctacgagaagcgccggaagcccgaggacgtcctggatgatgacgacgccggctctgcacccctgaagagcagcgggcagcaccagaatgacaaaggcaagaacgtccgccagaggaactcttcctgaggcaggtggcccgaggacgctccctgctccacgtctgcgccgccgccggagtccactcccagtgcttgcaagattccaagttctcacctcttaaagaaaacccaccccgtagattcccatcatacacttccttcttttttaaaaaagttgggttttctccattcagg

SEQ ID NO: 27021 - protein, 269 aa, Homo sapiens; identical to SEQ ID NO: 3635

SEQ ID NO: 27022 - DNA, 2037 bp, Homo sapiens
ctcccgggctcaagcgatcttcccgcctcgacctcccaaggctctgggagtacagacgtgagccacagcggccggcccgtgtttaactcagataaaatctgggtaacacactttcaacgcttcaaccccctcgggcgcaccgctctgcgctcattgcaactttgaaagcaggaaggaagaaatgcgcaggctccagccgcgtccccgcaggccccactcccgtttcctagcaacgccgggtcacgtgcgccgccgcccggattccgtagcgtgagcctgccggagccggcgcgtacatgcgagcgtgtgcgcgcgtgcgcaggcggggcgaccggcgtccccggcgctcgccccgcccccgagatgacgccgtgcgtgcgcgcgcccggtccgcgcctccgccgctttttatagcggccgcgggcggcggcggcagcggttggaggttgtaggaccggcgaggaataggaatcatggcggctgcgctgttcgtgctgctgggattcgcgctgctgggcacccacggagcctccggggctgccggcacagtcttcactaccgtagaagaccttggctccaagatactcctcacctgctccttgaatgacagcgccacagaggtcacagggcaccgctggctgaaggggggcgtggtgctgaaggaggacgcgctgcccggccagaaaacggagttcaaggtggactccgacgaccagtggggagagtactcctgcgtcttcctccccgagcccatgggcacggccaacatccagctccacgggcctcccagagtgaaggctgtgaagtcgtcagaacacatcaacgagggggagacggccatgctggtctgcaagtcagagtccgtgccacctgtcactgactgggcctggtacaagatcactgactctgaggacaaggccctcatgaacggctccgagagcaggttcttcgtgagttcctcgcagggccggtcagagctacacattgagaacctgaacatggaggccgaccccggccagtaccggtgcaacggcaccagctccaagggctccgaccaggccatcatcacgctccgcgtgcgcagccacctggccgccctctggcccttcctgggcatcgtggctgaggtgctggtgctggtcaccatcatcttcatctacgagaagcgccggaagcccgaggacgtcctggatgatgacgacgccggctctgcacccctgaagagcagcgggcagcaccagaatgacaaaggcaagaacgtccgccagaggaactcttcctgaggcaggtggcccgaggacgctccctgctccacgtctgcgccgccgccggagtccactcccagtgcttgcaagattccaagttctcacctcttaaagaaaacccaccccgtagattcccatcatacacttccttcttttttaaaaaagttgggttttctccattcaggattctgttccttaggtttttttccttctgaagtgtttcacgagagcccgggagctgctgccctgcggccccgtctgtggctttcagcctctgggtctgagtcatggccgggtgggcggcacagccttctccactggccggagtcagtgccaggtccttgccctttgtggaaagtcacaggtcacacgaggggccccgtgtcctgcctgtctgaagccaatgctgtctggttgcgccatttttgtgcttttatgtttaattttatgagggccacgggtctgtgttcgactcagcctcagggacgactctgacctcttggccacagaggactcacttgcccacaccgagggcgaccccgtcacagcctcaagtcactcccaagccccctccttgtctgtgcatccgggggcagctctggagggggtttgctggggaactggcgccatcgccgggactccagaaccgcagaagcctccccagctcacccctggaggacggccggctctctatagcaccagggctcacgtgggaacccccctcccacccaccgccacaataaagatcgcccccacctccaccctcaccctc

SEQ ID NO: 27023 - protein, 269 aa, Homo sapiens; identical to SEQ ID NO: 3635

SEQ ID NO: 27024 - DNA, 1407 bp, Homo sapiens
ctcccgggctcaagcgatcttcccgcctcgacctcccaaggctctgggagtacagacgtgagccacagcggccggcccgtgtttaactcagataaaatctgggtaacacactttcaacgcttcaaccccctcgggcgcaccgctctgcgctcattgcaactttgaaagcaggaaggaagaaatgcgcaggctccagccgcgtccccgcaggccccactcccgtttcctagcaacgccgggtcacgtgcgccgccgcccggattccgtagcgtgagcctgccggagccggcgcgtacatgcgagcgtgtgcgcgcgtgcgcaggcggggcgaccggcgtccccggcgctcgccccgcccccgagatgacgccgtgcgtgcgcgcgcccggtccgcgcctccgccgctttttatagcggccgcgggcggcggcggcagcggttggaggttgtaggaccggcgaggaataggaatcatggcggctgcgctgttcgtgctgctgggattcgcgctgctgggcacccacggagcctccggggctgccggcacagtcttcactaccgtagaagaccttggctccaagatactcctcacctgctccttgaatgacagcgccacagaggtcacagggcaccgctggctgaaggggggcgtggtgctgaaggaggacgcgctgcccggccagaaaacggagttcaaggtggactccgacgaccatgcttgcaagattccaagttctcacctcttaaagaaaacccaccccgtagattcccatcatacacttccttcttttttaaaaaagttgggttttctccattcaggattctgttccttaggtttttttccttctgaagtgtttcacgagagcccgggagctgctgccctgcggccccgtctgtggctttcagcctctgggtctgagtcatggccgggtgggcggcacagccttctccactggccggagtcagtgccaggtccttgccctttgtggaaagtcacaggtcacacgaggggccccgtgtcctgcctgtctgaagccaatgctgtctggttgcgccatttttgtgcttttatgtttaattttatgagggccacgggtctgtgttcgactcagcctcagggacgactctgacctcttggccacagaggactcacttgcccacaccgagggcgaccccgtcacagcctcaagtcactcccaagccccctccttgtctgtgcatccgggggcagctctggagggggtttgctggggaactggcgccatcgccgggactccagaaccgcagaagcctccccagctcacccctggaggacggccggctctctatagcaccagggctcacgtgggaacccccctcccacccaccgccacaataaagatcgcccccacctccaccctcaccctc

SEQ ID NO: 27025 - protein, 218 aa, Homo sapiens
MAAALFVLLGFALLGTHGASGAAGTVFTTVEDLGSKILLTCSLNDSATEVTGHRWLKGGVVLKEDALPGQKTEFKVDSDDHACKIPSSHLLKKTHPVDSHHTLPSFLKKLGFLHSGFCSLGFFPSEVFHESPGAAALRPRLWLSASGSESWPGGRHSLLHWPESVPGPCPLWKVTGHTRGPVSCLSEANAVWLRHFCAFMFNFMRATGLCSTQPQGRL

SEQ ID NO: 27026 - DNA, 2012 bp, Homo sapiens
ctcccgggctcaagcgatcttcccgcctcgacctcccaaggctctgggagtacagacgtgagccacagcggccggcccgtgtttaactcagataaaatctgggtaacacactttcaacgcttcaaccccctcgggcgcaccgctctgcgctcattgcaactttgaaagcaggaaggaagaaatgcgcaggctccagccgcgtccccgcaggccccactcccgtttcctagcaacgccgggtcacgtgcgccgccgcccggattccgtagcgtgagcctgccggagccggcgcgtacatgcgagcgtgtgcgcgcgtgcgcaggcggggcgaccggcgtccccggcgctcgccccgcccccgagatgacgccgtgcgtgcgcgcgcccggtccgcgcctccgccgctttttatagcggccgcgggcggcggcggcagcggttggaggttgtaggaccggcgaggaataggaatcatggcggctgcgctgttcgtgctgctgggattcgcgctgctgggcacccacggagcctccggggctgccggcacagtcttcactaccgtagaagaccttggctccaagatactcctcacctgctccttgaatgacagcgccacagaggtcacagggcaccgctggctgaaggggggcgtggtgctgaaggaggacgcgctgcccggccagaaaacggagttcaaggtggactccgacgaccagtggggagagtactcctgcgtcttcctccccgagcccatgggcacggccaacatccagctccacgggcctcccagagtgaaggctgtgaagtcgtcagaacacatcaacgagggggagacggccatgctggtctgcaagtcagagtccgtgccacctgtcactgactgggcctggtacaagatcactgactctgaggacaaggccctcatgaacggctccgagagcaggttcttcgtgagttcctcgcagggccggtcagagctacacattgagaacctgaacatggaggccgaccccggccagtaccggtgcaacggcaccagctccaagggctccgaccaggccatcatcacgctccgcgtgcgcagccacctggccgccctctggcccttcctgggcatcgtggctgaggtgctggtgctggtcaccatcatcttcatctacgagaagcgccggaagcccgaggacgtcctggatggaagagcagcgggcagcaccagaatgacaaaggcaagaacgtccgccagaggaactcttcctgaggcaggtggcccgaggacgctccctgctccacgtctgcgccgccgccggagtccactcccagtgcttgcaagattccaagttctcacctcttaaagaaaacccaccccgtagattcccatcatacacttccttcttttttaaaaaagttgggttttctccattcaggattctgttccttaggtttttttccttctgaagtgtttcacgagagcccgggagctgctgccctgcggccccgtctgtggctttcagcctctgggtctgagtcatggccgggtgggcggcacagccttctccactggccggagtcagtgccaggtccttgccctttgtggaaagtcacaggtcacacgaggggccccgtgtcctgcctgtctgaagccaatgctgtctggttgcgccatttttgtgcttttatgtttaattttatgagggccacgggtctgtgttcgactcagcctcagggacgactctgacctcttggccacagaggactcacttgcccacaccgagggcgaccccgtcacagcctcaagtcactcccaagccccctccttgtctgtgcatccgggggcagctctggagggggtttgctggggaactggcgccatcgccgggactccagaaccgcagaagcctccccagctcacccctggaggacggccggctctctatagcaccagggctcacgtgggaacccccctcccacccaccgccacaataaagatcgcccccacctccaccctcaccctc

SEQ ID NO: 27027 - protein, 292 aa, Homo sapiens
MAAALFVLLGFALLGTHGASGAAGTVFTTVEDLGSKILLTCSLNDSATEVTGHRWLKGGVVLKEDALPGQKTEFKVDSDDQWGEYSCVFLPEPMGTANIQLHGPPRVKAVKSSEHINEGETAMLVCKSESVPPVTDWAWYKITDSEDKALMNGSESRFFVSSSQGRSELHIENLNMEADPGQYRCNGTSSKGSDQAIITLRVRSHLAALWPFLGIVAEVLVLVTIIFIYEKRRKPEDVLDGRAAGSTRMTKARTSARGTLPEAGGPRTLPAPRLRRRRSPLPVLARFQVLTS

SEQ ID NO: 27028 - DNA, 2385 bp, Homo sapiens
ctcccgggctcaagcgatcttcccgcctcgacctcccaaggctctgggagtacagacgtgagccacagcggccggcccgtgtttaactcagataaaatctgggtaacacactttcaacgcttcaaccccctcgggcgcaccgctctgcgctcattgcaactttgaaagcaggaaggaagaaatgcgcaggctccagccgcgtccccgcaggccccactcccgtttcctagcaacgccgggtcacgtgcgccgccgcccggattccgtagcgtgagcctgccggagccggcgcgtacatgcgagcgtgtgcgcgcgtgcgcaggcggggcgaccggcgtccccggcgctcgccccgcccccgagatgacgccgtgcgtgcgcgcgcccggtccgcgcctccgccgctttttatagcggccgcgggcggcggcggcagcggttggaggttgtaggaccggcgaggaataggaatcatggcggctgcgctgttcgtgctgctgggattcgcgctgctgggcacccacggagcctccggggctgccggcttcgtccaggcgccgctgtcccagcagaggtgggtggggggcagtgtggagctgcactgcgaggccgtgggcagcccggtgcccgagatccagtggtggtttgaagggcagggtcccaacgacacctgctcccagctctgggacggcgcccggctggaccgcgtccacatccacgccacctaccaccagcacgcggccagcaccatctccatcgacacgctcgtggaggaggacacgggcacttacgagtgccgggccagcaacgacccggatcgcaaccacctgacccgggcgcccagggtcaagtgggtccgcgcccaggcagtcgtgctagtcctggaacccggcacagtcttcactaccgtagaagaccttggctccaagatactcctcacctgctccttgaatgacagcgccacagaggtcacagggcaccgctggctgaaggggggcgtggtgctgaaggaggacgcgctgcccggccagaaaacggagttcaaggtggactccgacgaccagtggggagagtactcctgcgtcttcctccccgagcccatgggcacggccaacatccagctccacgggcctcccagagtgaaggctgtgaagtcgtcagaacacatcaacgagggggagacggccatgctggtctgcaagtcagagtccgtgccacctgtcactgactgggcctggtacaagatcactgactctgaggacaaggccctcatgaacggctccgagagcaggttcttcgtgagttcctcgcagggccggtcagagctacacattgagaacctgaacatggaggccgaccccggccagtaccggtgcaacggcaccagctccaagggctccgaccaggccatcatcacgctccgcgtgcgcagccacctggccgccctctggcccttcctgggcatcgtggctgaggtgctggtgctggtcaccatcatcttcatctacgagaagcgccggaagcccgaggacgtcctggatgatgacgacgccggctctgcacccctgaagagcagcgggcagcaccagaatgacaaaggcaagaacgtccgccagaggaactcttcctgaggcaggtggcccgaggacgctccctgctccacgtctgcgccgccgccggagtccactcccagtgcttgcaagattccaagttctcacctcttaaagaaaacccaccccgtagattcccatcatacacttccttcttttttaaaaaagttgggttttctccattcaggattctgttccttaggtttttttccttctgaagtgtttcacgagagcccgggagctgctgccctgcggccccgtctgtggctttcagcctctgggtctgagtcatggccgggtgggcggcacagccttctccactggccggagtcagtgccaggtccttgccctttgtggaaagtcacaggtcacacgaggggccccgtgtcctgcctgtctgaagccaatgctgtctggttgcgccatttttgtgcttttatgtttaattttatgagggccacgggtctgtgttcgactcagcctcagggacgactctgacctcttggccacagaggactcacttgcccacaccgagggcgaccccgtcacagcctcaagtcactcccaagccccctccttgtctgtgcatccgggggcagctctggagggggtttgctggggaactggcgccatcgccgggactccagaaccgcagaagcctccccagctcacccctggaggacggccggctctctatagcaccagggctcacgtgggaacccccctcccacccaccgccacaataaagatcgcccccacctccaccctcaccctc

SEQ ID NO: 27029 - protein, 385 aa, Homo sapiens; identical to SEQ ID NO: 3633

SEQ ID NO: 27030 - DNA, 605 bp, Homo sapiens
atagcggccgcgggcggcggcggcagcggttggaggttgtaggaccggcgaggaataggaatcatggcggctgcgctgttcgtgctgctgggattcgcgctgctgggcacccacggagcctccggggctgccggcttcgtccaggcgccgctgtcccagcagaggtgggtggggggcagtgtggagctgcactgcgaggccgtgggcagcccggtgcccgagatccagtggtggtttgaagggcagggtcccaacgacacctgctcccagctctgggacggcgcccggctggaccgcgtccacatccacgccacctaccaccagcacgcggccagcaccatctccatcgacacgctcgtggaggaggacacgggcacttacgagtgccgggccagcaacgacccggatcgcaaccacctgacccgggcgcccagggtcaagtgggtccgcgcccaggcagtcgtgctagtcctggaacccggcacagtcttcactaccgtagaagaccttggctccaagatactcctcacctgctccttgaatgacagcgccacagaggtcacagggcaccgctggctgaaggggggcgtggtgctgaaggagga

SEQ ID NO: 27031 - protein, 179 aa, Homo sapiens
MAAALFVLLGFALLGTHGASGAAGFVQAPLSQQRWVGGSVELHCEAVGSPVPEIQWWFEGQGPNDTCSQLWDGARLDRVHIHATYHQHAASTISIDTLVEEDTGTYECRASNDPDRNHLTRAPRVKWVRAQAVVLVLEPGTVFTTVEDLGSKILLTCSLNDSATEVTGHRWLKGGVVLK

SEQ ID NO: 27032 - DNA, 678 bp, Homo sapiens
atagcggccgcgggcggcggcggcagcggttggaggttgtaggaccggcgaggaataggaatcatggcggctgcgctgttcgtgctgctgggattcgcgctgctgggcacccacggagcctccggggctgccggcttcgtccaggcgccgctgtcccagcagaggtgggtggggggcagtgtggagctgcactgcgaggccgtgggcagcccggtgcccgagatccagtggtggtttgaagggcagggtcccaacgacacctgctcccagctctgggacggcgcccggctggaccgcgtccacatccacgccacctaccaccagcacgcggccagcaccatctccatcgacacgctcgtggaggaggacacgggcacttacgagtgccgggccagcaacgacccggatcgcaaccacctgacccgggcgcccagggtcaagtgggtccgcgcccaggcagtcgtgctagtcctggaacccggcacagtcttcactaccgtagaagaccttggctccaagatactcctcacctgctccttgaatgacagcgccacagaggtcacagggcaccgctggctgaaggggggcgtggtgctgaaggaggacgcgctgcccggccagaaaacggagttcaaggtggactccgacgaccagtggggagagtactcctgcgtcttc

SEQ ID NO: 27033 - protein, 204 aa, Homo sapiens
MAAALFVLLGFALLGTHGASGAAGFVQAPLSQQRWVGGSVELHCEAVGSPVPEIQWWFEGQGPNDTCSQLWDGARLDRVHIHATYHQHAASTISIDTLVEEDTGTYECRASNDPDRNHLTRAPRVKWVRAQAVVLVLEPGTVFTTVEDLGSKILLTCSLNDSATEVTGHRWLKGGVVLKEDALPGQKTEFKVDSDDQWGEYSCV

SEQ ID NO: 27034 - DNA, 800 bp, Homo sapiens
atagcggccgcgggcggcggcggcagcggttggaggttgtaggaccggcgaggaataggaatcatggcggctgcgctgttcgtgctgctgggattcgcgctgctgggcacccacggagcctccggggctgggcctcccagagtgaaggctgtgaagtcgtcagaacacatcaacgagggggagacggccatgctggtctgcaagtcagagtccgtgccacctgtcactgactgggcctggtacaagatcactgactctgaggacaaggccctcatgaacggctccgagagcaggttcttcgtgagttcctcgcagggccggtcagagctacacattgagaacctgaacatggaggccgaccccggccagtaccggtgcaacggcaccagctccaagggctccgaccaggccatcatcacgctccgcgtgcgcagccacctggccgccctctggcccttcctgggcatcgtggctgaggtgctggtgctggtcaccatcatcttcatctacgagaagcgccggaagcccgaggacgtcctggatgatgacgacgccggctctgcacccctgaagagcagcgggcagcaccagaatgacaaaggcaagaacgtccgccagaggaactcttcctgaggcaggtggcccgaggacgctccctgctccacgtctgcgccgccgccggagtccactcccagtgcttgcaagattccaagttctcacctcttaaagaaaacccaccccgtagattcccatcatacacttccttcttttttaaaaaagttgggttttctccattcagg

SEQ ID NO: 27035 - protein, 189 aa, Homo sapiens
MAAALFVLLGFALLGTHGASGAGPPRVKAVKSSEHINEGETAMLVCKSESVPPVTDWAWYKITDSEDKALMNGSESRFFVSSSQGRSELHIENLNMEADPGQYRCNGTSSKGSDQAIITLRVRSHLAALWPFLGIVAEVLVLVTIIFIYEKRRKPEDVLDDDDAGSAPLKSSGQHQNDKGKNVRQRNSS

SEQ ID NO: 27036 - DNA, 1387 bp, Homo sapiens
atagcggccgcgggcggcggcggcagcggttggaggttgtaggaccggcgaggaataggaatcatggcggctgcgctgttcgtgctgctgggattcgcgctgctgggcacccacggagcctccggggctgggcctcccagagtgaaggctgtgaagtcgtcagaacacatcaacgagggggagacggccatgctggtctgcaagtcagagtccgtgccacctgtcactgactgggcctggtacaagatcactgactctgaggacaaggccctcatgaacggctccgagagcaggttcttcgtgagttcctcgcagggccggtcagagctacacattgagaacctgaacatggaggccgaccccggccagtaccggtgcaacggcaccagctccaagggctccgaccaggccatcatcacgctccgcgtgcgcagccacctggccgccctctggcccttcctgggcatcgtggctgaggtgctggtgctggtcaccatcatcttcatctacgagaagcgccggaagcccgaggacgtcctggatgatgacgacgccggctctgcacccctgaagagcagcgggcagcaccagaatgacaaaggcaagaacgtccgccagaggaactcttcctgaggcaggtggcccgaggacgctccctgctccacgtctgcgccgccgccggagtccactcccagtgcttgcaagattccaagttctcacctcttaaagaaaacccaccccgtagattcccatcatacacttccttcttttttaaaaaagttgggttttctccattcaggattctgttccttaggtttttttccttctgaagtgtttcacgagagcccgggagctgctgccctgcggccccgtctgtggctttcagcctctgggtctgagtcatggccgggtgggcggcacagccttctccactggccggagtcagtgccaggtccttgccctttgtggaaagtcacaggtcacacgaggggccccgtgtcctgcctgtctgaagccaatgctgtctggttgcgccatttttgtgcttttatgtttaattttatgagggccacgggtctgtgttcgactcagcctcagggacgactctgacctcttggccacagaggactcacttgcccacaccgagggcgaccccgtcacagcctcaagtcactcccaagccccctccttgtctgtgcatccgggggcagctctggagggggtttgctggggaactggcgccatcgccgggactccagaaccgcagaagcctccccagctcacccctggaggacggccggctctctatagcaccagggctcacgtgggaacccccctcccacccaccgccacaataaagatcgcccccacctccaccctcaccctc

SEQ ID NO: 27037 - protein, 189 aa, Homo sapiens; identical to SEQ ID NO: 27035

SEQ ID NO: 27038 - DNA, 1022 bp, Homo sapiens
atagcggccgcgggcggcggcggcagcggttggaggttgtaggaccggcgaggaataggaatcatggcggctgcgctgttcgtgctgctgggattcgcgctgctgggcacccacggagcctccggggctgccggcacagtcttcactaccgtagaagaccttggctccaagatactcctcacctgctccttgaatgacagcgccacagagcagcgggcagcaccagaatgacaaaggcaagaacgtccgccagaggaactcttcctgaggcaggtggcccgaggacgctccctgctccacgtctgcgccgccgccggagtccactcccagtgcttgcaagattccaagttctcacctcttaaagaaaacccaccccgtagattcccatcatacacttccttcttttttaaaaaagttgggttttctccattcaggattctgttccttaggtttttttccttctgaagtgtttcacgagagcccgggagctgctgccctgcggccccgtctgtggctttcagcctctgggtctgagtcatggccgggtgggcggcacagccttctccactggccggagtcagtgccaggtccttgccctttgtggaaagtcacaggtcacacgaggggccccgtgtcctgcctgtctgaagccaatgctgtctggttgcgccatttttgtgcttttatgtttaattttatgagggccacgggtctgtgttcgactcagcctcagggacgactctgacctcttggccacagaggactcacttgcccacaccgagggcgaccccgtcacagcctcaagtcactcccaagccccctccttgtctgtgcatccgggggcagctctggagggggtttgctggggaactggcgccatcgccgggactccagaaccgcagaagcctccccagctcacccctggaggacggccggctctctatagcaccagggctcacgtgggaacccccctcccacccaccgccacaataaagatcgcccccacctccaccctcaccctc

SEQ ID NO: 27039 - protein, 55 aa, Homo sapiens
MAAALFVLLGFALLGTHGASGAAGTVFTTVEDLGSKILLTCSLNDSATEQRAAPE

SEQ ID NO: 27040 - DNA, 275 bp, Homo sapiens
agcagggaccagggcatcgagctcttgtagcagccccagcacaaactggaaattcttttctaaaaacgtagccagctgggcgcggtggtggccgggcgcggaggctcacgcctgtaatcccagcactttccaggagtcccgggctcccaggcgccatctgcaccggtcccggtgctcccgctgggtccgccagcttctcagcgggcagcatcgctcccaaagggaccaaaaggctttggatggaacaaccctgtgtccctccggatgctgatgat

SEQ ID NO: 27041 - protein, 89 aa, Homo sapiens
AGTRASSSCSSPSTNWKFFSKNVASWARWWPGAEAHACNPSTFQESRAPRRHLHRSRCSRWVRQLLSGQHRSQRDQKALDGTTLCPSGC

SEQ ID NO: 27042 - DNA, 2440 bp, Homo sapiens
cgggaatattgtaaactaaccaagaaccaagagatttgcttggttggggattggcagaagaaccggggtgctcccagcactgctggagtgccgtcagcctggggctggggggatgtggggccacctgagtgcctcctagagaagggcacgggagccttggccgggggtgctgtggctattttttttttttttcctggagatggagtcttgctgttcccaggtggagtgtggtggcacaatctcggctcactgcaacttccgcctcccgggttcaagcgattcttctgcctcagcctcctgagtagctgggattacaggcatgagccaacatgcccagctaattttttgtatttttagaagagacggggtttcaccgtgttagccaggatggtctcgatctcccgacctcgagatccacccgccttggcctcccaaagtgctgggattacaggcgtgagcctccgcgcccggccaccaccgcgcccagctggctacgtttttagaaaagaatttccagtttgtgctggggctgctacaagagctcgatgccctggtccctgctcagggacgtgggtgggtgccttgtctgtccccacaccctggtcccagcctcgtgtgtctctgggcaggaacatcgccaggcggggcctctgggttcccagcgccttagcccagggcccgccagctgccagcgaagggtgccttcccgaagggggtgccttcccgaaggggcctcctcagcaggcgctgggctcttcccttcccggaggcgtggccagaagttccccttgggcctccggtcctcggggcgtaagggccacggtgtatttttgggatgaaaaccagtccttcccggggaggagccgcaggttcctgggggtcaggcaggcagcgcgggccgtgctcctccactctgctgaccgcgtctcgccgggccttgcagccggcacagtcttcactaccgtagaagaccttggctccaagatactcctcacctgctccttgaatgacagcgccacagaggtcacagggcaccgctggctgaaggggggcgtggtgctgaaggaggacgcgctgcccggccagaaaacggagttcaaggtggactccgacgaccagtggggagagtactcctgcgtcttcctccccgagcccatgggcacggccaacatccagctccacgggcctcccagagtgaaggctgtgaagtcgtcagaacacatcaacgagggggagacggccatgctggtctgcaagtcagagtccgtgccacctgtcactgactgggcctggtacaagatcactgactctgaggacaaggccctcatgaacggctccgagagcaggttcttcgtgagttcctcgcagggccggtcagagctacacattgagaacctgaacatggaggccgaccccggccagtaccggtgcaacggcaccagctccaagggctccgaccaggccatcatcacgctccgcgtgcgcagccacctggccgccctctggcccttcctgggcatcgtggctgaggtgctggtgctggtcaccatcatcttcatctacgagaagcgccggaagcccgaggacgtcctggatgatgacgacgccggctctgcacccctgaagagcagcgggcagcaccagaatgacaaaggcaagaacgtccgccagaggaactcttcctgaggcaggtggcccgaggacgctccctgctccacgtctgcgccgccgccggagtccactcccagtgcttgcaagattccaagttctcacctcttaaagaaaacccaccccgtagattcccatcatacacttccttcttttttaaaaaagttgggttttctccattcaggattctgttccttaggtttttttccttctgaagtgtttcacgagagcccgggagctgctgccctgcggccccgtctgtggctttcagcctctgggtctgagtcatggccgggtgggcggcacagccttctccactggccggagtcagtgccaggtccttgccctttgtggaaagtcacaggtcacacgaggggccccgtgtcctgcctgtctgaagccaatgctgtctggttgcgccatttttgtgcttttatgtttaattttatgagggccacgggtctgtgttcgactcagcctcagggacgactctgacctcttggccacagaggactcacttgcccacaccgagggcgaccccgtcacagcctcaagtcactcccaagccccctccttgtctgtgcatccgggggcagctctggagggggtttgctggggaactggcgccatcgccgggactccagaaccgcagaagcctccccagctcacccctggaggacggccggctctctatagcaccagggctcacgtgggaacccccctcccacccaccgccacaataaagatcgcccccacctccaccctcaccctc

SEQ ID NO: 27043 - protein, 432 aa, Homo sapiens
MVSISRPRDPPALASQSAGITGVSLRARPPPRPAGYVFRKEFPVCAGAATRARCPGPCSGTWVGALSVPTPWSQPRVSLGRNIARRGLWVPSALAQGPPAASEGCLPEGGAFPKGPPQQALGSSLPGGVARSSPWASGPRGVRATVYFWDENQSFPGRSRRFLGVRQAARAVLLHSADRVSPGLAAGTVFTTVEDLGSKILLTCSLNDSATEVTGHRWLKGGVVLKEDALPGQKTEFKVDSDDQWGEYSCVFLPEPMGTANIQLHGPPRVKAVKSSEHINEGETAMLVCKSESVPPVTDWAWYKITDSEDKALMNGSESRFFVSSSQGRSELHIENLNMEADPGQYRCNGTSSKGSDQAIITLRVRSHLAALWPFLGIVAEVLVLVTIIFIYEKRRKPEDVLDDDDAGSAPLKSSGQHQNDKGKNVRQRNSS

SEQ ID NO: 27044 - DNA, 748 bp, Homo sapiens
gccggcacagtcttcactaccgtagaagaccttggctccaagatactcctcacctgctccttgaatgacagcgccacagaggtcacagggcaccgctggctgaaggggggcgtggtgctgaaggaggggagacggccatgctggtctgcaagtcagagtccgtgccacctgtcactgactgggcctggtacaagatcactgactctgaggacaaggccctcatgaacggctccgagagcaggttcttcgtgagttcctcgcagggccggtcagagctacacattgagaacctgaacatggaggccgaccccggccagtaccggtgcaacggcaccagctccaagggctccgaccaggccatcatcacgctccgcgtgcgcagccacctggccgccctctggcccttcctgggcatcgtggctgaggtgctggtgctggtcaccatcatcttcatctacgagaagcgccggaagcccgaggacgtcctggatgatgacgacgccggctctgcacccctgaagagcagcgggcagcaccagaatgacaaaggcaagaacgtccgccagaggaactcttcctgaggcaggtggcccgaggacgctccctgctccacgtctgcgccgccgccggagtccactcccagtgcttgcaagattccaagttctcacctcttaaagaaaacccaccccgtagattcccatcatacacttccttcttttttaaaaaagttgggttttctccattcagg

SEQ ID NO: 27045 - protein, 147 aa, Homo sapiens [sequence omitted]

SEQ ID NO: 27046 - DNA, 1209 bp, Homo sapiens
gggagacggccatgctggtctgcaagtcagagtccgtgccacctgtcactgactgggcctggtacaagatcactgactctgaggacaaggccctcatgaacggctccgagagcaggttcttcgtgagttcctcgcagggccggtcagagctacacattgagaacctgaacatggaggccgaccccggccagtaccggtgcaacggcaccagctccaagggctccgaccaggccatcatcacgctccgcgtgcgcagccacctggccgccctctggcccttcctgggcatcgtggctgaggtgctggtgctggtcaccatcatcttcatctacgagaagcgccggaagcccgaggacgtcctggatgatgacgacgccggctctgcacccctgaagagcagcgggcagcaccagaatgacaaaggcaagaacgtccgccagaggaactcttcctgaggcaggtggcccgaggacgctccctgctccacgtctgcgccgccgccggagtccactcccagtgcttgcaagattccaagttctcacctcttaaagaaaacccaccccgtagattcccatcatacacttccttcttttttaaaaaagttgggttttctccattcaggattctgttccttaggtttttttccttctgaagtgtttcacgagagcccgggagctgctgccctgcggccccgtctgtggctttcagcctctgggtctgagtcatggccgggtgggcggcacagccttctccactggccggagtcagtgccaggtccttgccctttgtggaaagtcacaggtcacacgaggggccccgtgtcctgcctgtctgaagccaatgctgtctggttgcgccatttttgtgcttttatgtttaattttatgagggccacgggtctgtgttcgactcagcctcagggacgactctgacctcttggccacagaggactcacttgcccacaccgagggcgaccccgtcacagcctcaagtcactcccaagccccctccttgtctgtgcatccgggggcagctctggagggggtttgctggggaactggcgccatcgccgggactccagaaccgcagaagcctccccagctcacccctggaggacggccggctctctatagcaccagggctcacgtgggaacccccctcccacccaccgccacaataaagatcgcccccacctccaccctcaccctc

SEQ ID NO: 27047 - protein, 147 aa, Homo sapiens [sequence omitted]

SEQ ID NO: 27048 - DNA, 426 bp, Homo sapiens
ccatgctggtctgcaagtcagagtccgtgccacctgtcactgactgggcctggtacaagatcactgactctgaggacaaggcccttcctgggcatcgtggctgaggtgctggtgctggtcaccatcatcttcatctacgagaagcgccggaagcccgaggacgtcctggatgatgacgacgccggctctgcacccctgaagagcagcgggcagcaccagaatgacaaaggcaagaacgtccgccagaggaactcttcctgaggcaggtggcccgaggacgctccctgctccacgtctgcgccgccgccggagtccactcccagtgcttgcaagattccaagttctcacctcttaaagaaaacccaccccgtagattcccatcatacacttccttcttttttaaaaaagttgggttttctccattca

SEQ ID NO: 27049 - protein, 44 aa, Homo sapiens
MTKARTSARGTLPEAGGPRTLPAPRLRRRRSPLPVLARFQVLTS

SEQ ID NO: 27050 - DNA, 752 bp, Homo sapiens
cgagagcaggttcttcgtgagttcctcgcagggccggtcagagctacacattgagaacctgaacatggaggccgaccccggccagtaccggtgcaacggcaccagctccaagggctccgaccaggccatcatcacgctccgcgtgcgcagccacctggccgccctctggcccttcctgggcatcgtggctgaggtgctggtgctggtcaccatcatcttcatctacgagaagcgccggaagcccgaggacgtcctggatgatgacgacgccggctctgcacccctgaagagcagcgggcagcaccagaatgacaaaggcaagaacgtccgccagaggaactcttcctgaggcaggtggcccgaggacgctccctgctccacgtctgcgccgccgccggagtccactcccagtgcttgcaagattccaagttctcacctcttaaagaaaacccaccccgtagattcccatcatacacttccttcttttttaaaaaagttgggttttctccattcaggattctgttccttaggtttttttccttctgaagtgtttcacgagagcccgggagctgctgccctgcggccccgtctgtggctttcagcctctgggtctgagtcatggccgggtgggcggcacagccttctccactggccggagtcagtgccaggtccttgccctttgtggaaagtcacaggtcacacgaggggccccgtgtcctgcctgtctgaagccaatgctgtctggttgcgcc

SEQ ID NO: 27051 - protein, 94 aa, Homo sapiens [sequence omitted]

SEQ ID NO: 27052 - DNA, 988 bp, Homo sapiens
cgagagcaggttcttcgtgagttcctcgcagggccggtcagagctacacattgagaacctgaacatggaggccgaccccggccagtaccggtgcaacggcaccagctccaagggctccgaccaggccatcatcacgctccgcgtgcgcagccacctggccgccctctggcccttcctgggcatcgtggctgaggtgctggtgctggtcaccatcatcttcatctacgagaagcgccggaagcccgaggacgtcctggatgatgacgacgccggctctgcaccccttccactcccagtgcttgcaagattccaagttctcacctcttaaagaaaacccaccccgtagattcccatcatacacttccttcttttttaaaaaagttgggttttctccattcaggattctgttccttaggtttttttccttctgaagtgtttcacgagagcccgggagctgctgccctgcggccccgtctgtggctttcagcctctgggtctgagtcatggccgggtgggcggcacagccttctccactggccggagtcagtgccaggtccttgccctttgtggaaagtcacaggtcacacgaggggccccgtgtcctgcctgtctgaagccaatgctgtctggttgcgccatttttgtgcttttatgtttaattttatgagggccacgggtctgtgttcgactcagcctcagggacgactctgacctcttggccacagaggactcacttgcccacaccgagggcgaccccgtcacagcctcaagtcactcccaagccccctccttgtctgtgcatccgggggcagctctggagggggtttgctggggaactggcgccatcgccgggactccagaaccgcagaagcctccccagctcacccctggaggacggccggctctctatagcaccagggctcacgtgggaacccccctcccacccaccgccacaataaagatcgcccccacctccaccctcaccctc

SEQ ID NO: 27053 - protein, 87 aa, Homo sapiens
MEADPGQYRCNGTSSKGSDQAIITLRVRSHLAALWPFLGIVAEVLVLVTIIFIYEKRRKPEDVLDDDDAGSAPLPLPVLARFQVLTS

SEQ ID NO: 27054 - DNA, 1103 bp, Homo sapiens
cgagagcaggttcttcgtgagttcctcgcagggccggtcagagctacacattgagaacctgaacatggaggccgaccccggccagtaccggtgcaacggcaccagctccaagggctccgaccaggccatcatcacgctccgcgtgcgcagccacctggccgccctctggcccttcctgggcatcgtggctgaggtgctggtgctggtcaccatcatcttcatctacgagaagcgccggaagcccgaggacgtcctggatgatgacgacgccggctctgcacccctgaagagcagcgggcagcaccagaatgacaaaggcaagaacgtccgccagaggaactcttcctgaggcaggtggcccgaggacgctccctgctccacgtctgcgccgccgccggagtccactcccagtgcttgcaagattccaagttctcacctcttaaagaaaacccaccccgtagattcccatcatacacttccttcttttttaaaaaagttgggttttctccattcaggattctgttccttaggtttttttccttctgaagtgtttcacgagagcccgggagctgctgccctgcggccccgtctgtggctttcagcctctgggtctgagtcatggccgggtgggcggcacagccttctccactggccggagtcagtgccaggtccttgccctttgtggaaagtcacaggtcacacgaggggccccgtgtcctgcctgtctgaagccaatgctgtctggttgcgccatttttgtgcttttatgtttaattttatgagggccacgggtctgtgttcgactcagcctcagggacgactctgacctcttggccacagaggactcacttgcccacaccgagggcgaccccgtcacagcctcaagtcactcccaagccccctccttgtctgtgcatccgggggcagctctggagggggtttgctggggaactggcgccatcgccgggactccagaaccgcagaagcctccccagctcacccctggaggacggccggctctctatagcaccagggctcacgtgggaacccccctcccacccaccgccacaataaagatcgcccccacctccaccctcaccctc

SEQ ID NO: 27055 - protein, 94 aa, Homo sapiens [sequence omitted]

SEQ ID NO: 27056 - DNA, 927 bp, Homo sapiens
tgggcatcgtggctgaggtgctggtgctggtcaccatcatcttcatctacgagaagcgccggaagcccgaggacgtcctggatgatgacgacgccggctctgcacccctgaagagcagcgggcagcaccagaatgacaaaggcaagaacgtccgccagaggaactcttcctgaggcaggtggcccgaggacgctccctgctccacgtctgcgccgccgccggagtccactcccagtgcttgcaagattccaagttctcacctcttaaagaaaacccaccccgtagattcccatcatacacttccttcttttttaaaaaagttgggttttctccattcaggattctgttccttaggtttttttccttctgaagtgtttcacgagagcccgggagctgctgccctgcggccccgtctgtggctttcagcctctgggtctgagtcatggccgggtgggcggcacagccttctccactggccggagtcagtgccaggtccttgccctttgtggaaagtcacaggtcacacgaggggccccgtgtcctgcctgtctgaagccaatgctgtctggttgcgccatttttgtgcttttatgtttaattttatgagggccacgggtctgtgttcgactcagcctcagggacgactctgacctcttggccacagaggactcacttgcccacaccgagggcgaccccgtcacagcctcaagtcactcccaagccccctccttgtctgtgcatccgggggcagctctggagggggtttgctggggaactggcgccatcgccgggactccagaaccgcagaagcctccccagctcacccctggaggacggccggctctctatagcaccagggctcacgtgggaacccccctcccacccaccgccacaataaagatcgcccccacctccaccctcaccctc

SEQ ID NO: 27057 - protein, 44 aa, Homo sapiens; identical to SEQ ID NO: 27049

SEQ ID NO: 27058 - DNA, 887 bp, Homo sapiens
gctgtcctctcgtcctctttttcatggcggcggtccttcttcagatgacgacgccggctctgcacccctgaagagcagcgggcagcaccagaatgacaaaggcaagaacgtccgccagaggaactcttcctgaggcaggtggcccgaggacgctccctgctccacgtctgcgccgccgccggagtccactcccagtgcttgcaagattccaagttctcacctcttaaagaaaacccaccccgtagattcccatcatacacttccttcttttttaaaaaagttgggttttctccattcaggattctgttccttaggtttttttccttctgaagtgtttcacgagagcccgggagctgctgccctgcggccccgtctgtggctttcagcctctgggtctgagtcatggccgggtgggcggcacagccttctccactggccggagtcagtgccaggtccttgccctttgtggaaagtcacaggtcacacgaggggccccgtgtcctgcctgtctgaagccaatgctgtctggttgcgccatttttgtgcttttatgtttaattttatgagggccacgggtctgtgttcgactcagcctcagggacgactctgacctcttggccacagaggactcacttgcccacaccgagggcgaccccgtcacagcctcaagtcactcccaagccccctccttgtctgtgcatccgggggcagctctggagggggtttgctggggaactggcgccatcgccgggactccagaaccgcagaagcctccccagctcacccctggaggacggccggctctctatagcaccagggctcacgtgggaacccccctcccacccaccgccacaataaagatcgcccccacctccaccctcaccctc

SEQ ID NO: 27059 - protein, 44 aa, Homo sapiens; identical to SEQ ID NO: 27049

SEQ ID NO: 27060 - DNA, 809 bp, Homo sapiens
cgggcagcaccagaatgacaaaggcaagaacgtccgccagaggaactcttcctgaggcaggtggcccgaggacgctccctgctccacgtctgcgccgccgccggagtccactcccagtgcttgcaagattccaagttctcacctcttaaagaaaacccaccccgtagattcccatcatacacttccttcttttttaaaaaagttgggttttctccattcaggattctgttccttaggtttttttccttctgaagtgtttcacgagagcccgggagctgctgccctgcggccccgtctgtggctttcagcctctgggtctgagtcatggccgggtgggcggcacagccttctccactggccggagtcagtgccaggtccttgccctttgtggaaagtcacaggtcacacgaggggccccgtgtcctgcctgtctgaagccaatgctgtctggttgcgccatttttgtgcttttatgtttaattttatgagggccacgggtctgtgttcgactcagcctcagggacgactctgacctcttggccacagaggactcacttgcccacaccgagggcgaccccgtcacagcctcaagtcactcccaagccccctccttgtctgtgcatccgggggcagctctggagggggtttgctggggaactggcgccatcgccgggactccagaaccgcagaagcctccccagctcacccctggaggacggccggctctctatagcaccagggctcacgtgggaacccccctcccacccaccgccacaataaagatcgcccccacctccaccctcaccctc

SEQ ID NO: 27061 - protein, 44 aa, Homo sapiens; identical to SEQ ID NO: 27049

SEQ ID NO: 27062 - DNA, 3408 bp, Homo sapiens
ggccggcggcggcggcggcggctccgctccgcactgcccggcgccgcctcgccatggacgcgcgcgggggcggcgggcggcccggggagagcccgggcgcgacccccgcgccggggccgccgccgccgccgccgcccgcgcccccccaacagcagccgccgccgccgccgccgcccgcgccccccccgggccccgggcccgcgcccccccagcacccgccccgggccgaggcgttgcccccggaggcggcggatgagggcggcccgcggggccggctccgcagccgcgacagctcgtgcggccgccccggcaccccgggcgcggcgagcacggccaagggcagcccgaacggcgagtgcgggcgcggcgagccgcagtgcagccccgcggggcccgagggcccggcgcgggggcccaaggtgtcgttctcgtgccgcggggcggcctcggggcccgcgccggggccggggccggcggaggaggcgggcagcgaggaggcgggcccggcgggggagccgcgcggcagccaggccagcttcatgcagcgccagttcggcgcgctcctgcagccgggcgtcaacaagttctcgctgcggatgttcggcagccagaaggccgtggagcgcgagcaggagcgcgtcaagtcggcgggggcctggatcatccacccgtacagcgacttcaggttctactgggacttcaccatgctgctgttcatggtgggaaacctcatcatcatcccagtgggcatcaccttcttcaaggatgagaccactgccccgtggatcgtgttcaacgtggtctcggacaccttcttcctcatggacctggtgttgaacttccgcaccggcattgtgatcgaggacaacacggagatcatcctggaccccgagaagatcaagaagaagtatctgcgcacgtggttcgtggtggacttcgtgtcctccatccccgtggactacatcttccttatcgtggagaagggcattgactccgaggtctacaagacggcacgcgccctgcgcatcgtgcgcttcaccaagatcctcagcctcctgcggctgctgcgcctctcacgcctgatccgctacatccatcagtgggaggagatcttccacatgacctatgacctggccagcgcggtgatgaggatctgcaatctcatcagcatgatgctgctgctctgccactgggacggctgcctgcagttcctggtgcctatgctgcaggacttcccgcgcaactgctgggtgtccatcaatggcatggtgaaccactcgtggagtgaactgtactccttcgcactcttcaaggccatgagccacatgctgtgcatcgggtacggccggcaggcgcccgagagcatgacggacatctggctgaccatgctcagcatgattgtgggtgccacctgctacgccatgttcatcggccacgccactgccctcatccagtcgctggactcctcgcggcgccagtaccaggagaagtacaagcaggtggagcagtacatgtccttccacaagctgccagctgacttccgccagaagatccacgactactatgagcaccgttaccagggcaagatgtttgacgaggacagcatcctgggcgagctcaacgggcccctgcgggaggagatcgtcaacttcaactgccggaagctggtggcctccatgccgctgttcgccaacgccgaccccaacttcgtcacggccatgctgaccaagctcaagttcgaggtcttccagccgggtgactacatcatccgcgaaggcaccatcgggaagaagatgtacttcatccagcacggcgtggtcagcgtgctcactaagggcaacaaggagatgaagctgtccgatggctcctacttcggggagatctgcctgctcacccggggccgccgcacggcgagcgtgcgggctgacacctactgccgcctctattcgctgagcgtggacaacttcaacgaggtgctggaggagtaccccatgatgcggcgcgccttcgagacggtggccatcgaccgcctggaccgcatcggcaagaagaattccatcctcctgcacaaggtgcagcatgacctcaactcgggcgtattcaacaaccaggagaacgccatcatccaggagatcgtcaagtacgaccgcgagatggtgcagcaggccgagctgggtcagcgcgtgggcctcttcccgccgccgccgccgccgccgcaggtcacctcggccatcgccacgctgcagcaggcggcggccatgagcttctgcccgcaggtggcgcggccgctcgtggggccgctggcgctcggctcgccgcgcctcgtgcgccgcccgcccccggggcccgcacctgccgccgcctcacccgggcccccgccccccgccagccccccgggcgcgcccgccagcccccgggcaccgcggacctcgccctacggcggcctgcccgccgccccccttgctgggcccgccctgcccgcgcgccgcctgagccgcgcgtcgcgcccactgtccgcctcgcagccctcgctgcctcacggcgcccccggccccgcggcctccacacgcccggccagcagctccacaccgcgcttggggcccacgcccgctgcccgggccgccgcgcccagcccggaccgcagggactcggcctcacccggcgccgccggcggcctggacccccaggactccgcgcgctcgcgcctctcgtccaacttgtgaccctcgccgaccgccccgcgggcccaggcgggccgggggcggggccgtcatccagaccaaagccatgccattgcgctgccccggccgccagtccgcccagaagccatagacgagacgtaggtagccgtagttggacggacgggcagggccggcggggcagccccctccgcgcccccggccgtcccccctcatcgccccgcgcccacccccatcgcccctgcccccggcggcggcctcgcgtgcgagggggctcccttcacctcggtgcctcagttcccccagctgtaagacagggacggggcggcccagtggctgagaggagccggctgtggagccccgcccgccccccaccctctaggtggcccccgtccgaggaggatcgttttctaagtgcaatacttggcccgccggcttcccgctgcccccatcgcgctcacgcaataaccggcccggcccccgtccgcgcgcgtcccccggtgacctcggggagcagcaccccgcctccctccagcactggcaccgagaggcaggcctggctgcgcagggcgcgggggggaggctggggtcccgccgccgtgatgaatgtactgacgagccgaggcagcagtgcccccaccgtggccccccacgccccattaacccccacacccccattccgcgcaataaacgacagcattggcgccaa

SEQ ID NO: 27063 - protein, 889 aa, Homo sapiens
MDARGGGGRPGESPGATPAPGPPPPPPPAPPQQQPPPPPPPAPPPGPGPAPPQHPPRAEALPPEAADEGGPRGRLRSRDSSCGRPGTPGAASTAKGSPNGECGRGEPQCSPAGPEGPARGPKVSFSCRGAASGPAPGPGPAEEAGSEEAGPAGEPRGSQASFMQRQFGALLQPGVNKFSLRMFGSQKAVEREQERVKSAGAWIIHPYSDFRFYWDFTMLLFMVGNLIIIPVGITFFKDETTAPWIVFNVVSDTFFLMDLVLNFRTGIVIEDNTEIILDPEKIKKKYLRTWFVVDFVSSIPVDYIFLIVEKGIDSEVYKTARALRIVRFTKILSLLRLLRLSRLIRYIHQWEEIFHMTYDLASAVMRICNLISMMLLLCHWDGCLQFLVPMLQDFPRNCWVSINGMVNHSWSELYSFALFKAMSHMLCIGYGRQAPESMTDIWLTMLSMIVGATCYAMFIGHATALIQSLDSSRRQYQEKYKQVEQYMSFHKLPADFRQKIHDYYEHRYQGKMFDEDSILGELNGPLREEIVNFNCRKLVASMPLFANADPNFVTAMLTKLKFEVFQPGDYIIREGTIGKKMYFIQHGVVSVLTKGNKEMKLSDGSYFGEICLLTRGRRTASVRADTYCRLYSLSVDNFNEVLEEYPMMRRAFETVAIDRLDRIGKKNSILLHKVQHDLNSGVFNNQENAIIQEIVKYDREMVQQAELGQRVGLFPPPPPPPQVTSAIATLQQAAAMSFCPQVARPLVGPLALGSPRLVRRPPPGPAPAAASPGPPPPASPPGAPASPRAPRTSPYGGLPAAPLAGPALPARRLSRASRPLSASQPSLPHGAPGPAASTRPASSSTPRLGPTPAARAAAPSPDRRDSASPGAAGGLDPQDSARSRLSSNL

SEQ ID NO: 27064 - DNA, 530 bp, Homo sapiens
cccggggcacctgcgggaccagccccgggcactcttccttgggggacgaggggcgccacacctcaggctggtgccttcccccaggcacctatgggaccagccccgggcattcctccctggggggcgagggtgcccacacctcaggctggtgccttccccccaggcacctatgggaccagccccgggcattcctccctggggggcgagggtgcccacagctcaggctggtgcattcccccaggcacctatgggaccagccccgggcattcctccctgggggacgagggtgcccacagctcaggccggtgccttccccccaggcgcctgcaggacaagccctgggcactcctccctcgggaccaggctcccaccccaggaaggccacccagccccgagggagcccaacgcccactgcgctgccctagcccaggtcccttcctcaggcccaactttgaccccgtgtccttgaagatgcaggagacctcacaaggcccaagaggtggctcaaaatagattaagtgcttcacatg

SEQ ID NO: 27065 - protein, 140 aa, Homo sapiens
MGPAPGIPPWGARVPTPQAGAFPPGTYGTSPGHSSLGGEGAHSSGWCIPPGTYGTSPGHSSLGDEGAHSSGRCLPPRRLQDKPWALLPRDQAPTPGRPPSPEGAQRPLRCPSPGPFLRPNFDPVSLKMQETSQGPRGGSK

SEQ ID NO: 27066 - DNA, 506 bp, Homo sapiens
cgtcaagtacgaccgcgagatggtgcagcaggccgagctgggtcagcgcgtgggcctcgcgtgcgagggggctcccttcacctcggtgcctcagttcccccagctgtaagacagggacggggcggcccagtggctgagaggagccggctgtggagccccgcccgccccccaccctctaggtggcccccgtccgaggaggatcgttttctaagtgcaatacttggcccgccggcttcccgctgcccccatcgcgctcacgcaataaccggcccggcccccgtccgcgcgcgtcccccggtgacctcggggagcagcaccccgcctccctccagcactggcaccgagaggcaggcctggctgcgcagggcgcgggggggaggctggggtcccgccgccgtgatgaatgtactgacgagccgaggcagcagtgcccccaccgtggccccccacgccccattaacccccacacccccattccgcgcaataaacgacagcattggcgccaa

SEQ ID NO: 27067 - protein, 34 aa, Homo sapiens
MNVLTSRGSSAPTVAPHAPLTPTPPFRAINDSIG

SEQ ID NO: 27068 - DNA, 450 bp, Homo sapiens
gggcgaggcctgcaggagggtgggcttccctggacctcaagtggagggggctgagcgcagggccaggatgctggtcactgggtggccctgtgagctcccctcccttcaggagtcctccgctctgccacaggaagggcctgaccttcgtctctgtgcacgactgttactggactcacgcagctgatgtctccgtcatgaaccaggtgtgccgggagcagtttgtccgcttgcacagcgagcccatcctgcaggacctgtccagattcctggtcaagcggttctgctctgagccccagaagatcttggaggccagccagctgaaggagacactgcaggcggtgcccaagccaggggccttcgacctggagcaggtgaagcgttccacctacttcttcagctgacaccccgtgagccttgtcagtgtgtaaataaagctcttttgccaccccc

SEQ ID NO: 27069 - protein, 68 aa, Homo sapiens
MNQVCREQFVRLHSEPILQDLSRFLVKRFCSEPQKILEASQLKETLQAVPKPGAFDLEQVKRSTYFFS

SEQ ID NO: 27070 - DNA, 579 bp, Homo sapiens
gaggtcaagcacgcgcggaagaccctgaagaccctgcgggaccaatgggagaaagcactgtgccgggcgctgcgggagaccaagaaccgcctagagcgcgaggtcaaataggaggtggaattcagagcatcacctacacccacaacggagacatcagccgaaagcccaacacacgtaagcagaagaacggcttcccgcccaacttcatccactcgctggactcctcccacatgatgctcaccgccctgcactgctacaggaagggcctgaccttcgtctctgtgcacgactgttactggactcacgcagctgatgtctccgtcatgaaccaggtgtgccgggagcagtttgtccgcttgcacagcgagcccatcctgcaggacctgtccagattcctggtcaagcggttctgctctgagccccagaagatcttggaggccagccagctgaaggagacactgcaggcggtgcccaagccaggggccttcgacctggagcaggtgaagcgttccacctacttcttcagctgacaccccgtgagccttgtcagtgtgtaaataaagctcttttgccaccccc

SEQ ID NO: 27071 - protein, 161 aa, Homo sapiens
MGESTVPGAAGDQEPPRARGQIGGGIQSITYTHNGDISRKPNTRKQKNGFPPNFIHSLDSSHMMLTALHCYRKGLTFVSVHDCYWTHAADVSVMNQVCREQFVRLHSEPILQDLSRFLVKRFCSEPQKILEASQLKETLQAVPKPGAFDLEQVKRSTYFFS

SEQ ID NO: 27072 - DNA, 3802 bp, Homo sapiens
aggcggcgcgggcgcatgcgcaggcgcgggccggtggggtggcctggagcggcgtgcgtaatgtcggcactttgctggggccgcggagcggcggggctcaaacgagccctacggccttgcggccgcccgggactccccggcaaagaagggaccgccggtggcgtctgcggccccaggaggagctcgtccgccagcccccaggagcaagaccaagaccgcaggaaggactggggccacgtggagctgctggaggtgctccaggcgcgggtgcggcagctgcaggctgagagcgtgtcggaggtggtggtgaacagggtggatgtggcgcggctcccagaatgtggcagtggagatggtagcctccagccacccaggaaggtccagatgggggccaaggatgccaccccggtgccctgtggccgctgggcaaagatactggagaaggataagcggacccagcagatgcgtatgcagcggttgaaggcgaagctgcagatgccattccagagcggggagttcaaggcgctgaccaggcgcctgcaggtggagccccggctcctgagcaagcagatggccgggtgcctggaggactgcacgcgccaggcccccgagagcccctgggaggagcagctggcccggctgctgcaggaggcccctgggaagctgagcctcgatgtggagcaggccccgtcggggcagcactcgcaggcccagctctcaggtcagcagcagaggctcctggccttcttcaagtgctgcctgctcactgaccagctgcccctcgcccaccacctgctggtcgtccaccacggccagcggcagaagcggaagctgctcacgctggacatgtacaacgccgtgatgcttggctgggcgcggcagggtgccttcaaggagctggtatatgtgttattcatggtgaaggatgccggcttgactccggacctgctgtcctatgcggctgccctccagtgcatggggaggcaggaccaggacgccgggaccatcgaaaggtgtctggaacagatgagccaggaggggctgaagctgcaggcactcttcaccgccgttctgctgtctgaggaggatcgggccactgttctgaaggccgtgcacaaggtgaagcccaccttcagcctcccgccgcagctgccgcccccggtcaacacctccaagctgctcagggacgtgtatgccaaggatgggcgtgtgtcctacccgaagctgcacctgcccttgaagaccctgcagtgcctctttgagaagcagctccacatggagctggccagcagggtgtgcgtggtgtccgtggagaagcccacgttgccaagcaaggaggtcaagcacgcgcggaagaccctgaagaccctgcgggaccaatgggagaaagcactgtgccgggcgctgcgggagaccaagaaccgcctagagcgcgaggtgtacgagggccggttctcactttaccccttcctgtgcctgctggacgagcgcgaggtggtgcggatgctcctgcaggtcctgcaggcgctgcccgcccaaggtgagtccttcaccaccctggcccgggagctgagtgcgcgcactttcagccggcacgtggtgcagaggcagcgggtcagtggccaggtgcaggcgctgcagaaccactacaggaagtacctctgcttgctggcctccgacgccgaggtgcccgagccctgcctgccgcggcagtactgggaggagctgggggcgcccgaggccctgcgggagcagccctggcccctgccagtgcagatggagctgggcaagctgctggcggagatgctggtgcaggctacgcagatgccatgcagcctggacaagccgcatcgttcctctcggcttgtccccgtgctctaccacgtgtattccttccgcaacgtccagcagatcggcatcctgaagccgcacccggcctacgtgcagctgctggagaaggccgcggagcccacgctgaccttcgaggcggtggatgtacccatgctttgccccccgctgccctggacatcgccgcactctggtgctttcctgctcagccccaccaagctgatgcgcacggtggaaggcgccacgcagcaccaggagctgctggaaacctgcccgcccaccgcgctgcatggcgcactggacgccctcacccaactgggcaactgcgcctggcgcgtcaacgggcgcgtgctggacctggtgctgcagctcttccaggccaagggctgcccccagctaggcgtgccggccccgccctccgaggcgccccagccgcccgaggcccacctgccgcacagcgccgcgcccgcccgcaaggccgagctgcgccgtgagctggcgcactgccagaaggtggcccgggagatgcacagcctgcgggcggaggcgctgtaccgcctctcgctggcgcagcacctgcgggaccgcgtcttctggctgccgcacaacatggacttccgcggccgcacctacccctgcccgccgcacttcaaccacctgggcagcgacgtggcgcgggccctgctggagttcgcccagggccgcccgctcggcccgcacggcctggattggctcaagatccacctggtcaatctcacggggttgaagaagcgggagccgctgcggaagcgcctggcctttgcggaggaggtgatggatgacatcctggactccgcggaccaacccttgacgggccgaaagtggtggatgggcgcggaggaaccctggcagacgctggcctgctgtatggaggtggcgaacgctgtgcgcgcctccgaccctgccgcctatgtctcccacctccccgtccatcaggacggctcttgcaacggcctgcagcattatgctgctctgggccgcgacagcgtgggcgccgcctccgtcaacctggagccctcggatgtgccgcaggacgtgtacagcggcgtggccgcgcaggtggaggtgttccgtaggcaggacgcccagcggggcatgcgggtggcacaggtgctggaaggtttcatcacccgcaaggtggtgaagcagacggtgatgacggtggtgtacggggtcacgcgctatggcgggcgcctgcagattgagaagcgcctccgggagctgagcgactttccccaggagttcgtgtgggaggcctctcactatctcgtacgccaggtcttcaagagtctacaggagatgttctcggggacccgggccatccagcactggctgaccgagagtgcccgcctcatctcccacatgggctctgtggtggagtgggtcacacccctgggcgtccccgtcatccagccctatcgcctggactccaaggtcaagcaaataggaggtggaattcagagcatcacctacacccacaacggagacatcagccgaaagcccaacacacgtaagcagaagaacggcttcccgcccaacttcatccactcgctggactcctcccacatgatgctcaccgccctgcactgctacaggaagggcctgaccttcgtctctgtgcacgactgttactggactcacgcagctgatgtctccgtcatgaaccaggtgtgccgggagcagtttgtccgcttgcacagcgagcccatcctgcaggacctgtccagattcctggtcaagcggttctgctctgagccccagaagatcttggaggccagccagctgaaggagacactgcaggcggtgcccaagccaggggccttcgacctggagcaggtgaagcgttccacctacttcttcagctgacaccccgtgagccttgtcagtgtgtaaataaagctcttttgccaccccc

SEQ ID NO: 27073 - protein, 1245 aa, Homo sapiens
MRRRGPVGWPGAACVMSALCWGRGAAGLKRALRPCGRPGLPGKEGTAGGVCGPRRSSSASPQEQDQDRRKDWGHVELLEVLQARVRQLQAESVSEVVVNRVDVARLPECGSGDGSLQPPRKVQMGAKDATPVPCGRWAKILEKDKRTQQMRMQRLKAKLQMPFQSGEFKALTRRLQVEPRLLSKQMAGCLEDCTRQAPESPWEEQLARLLQEAPGKLSLDVEQAPSGQHSQAQLSGQQQRLLAFFKCCLLTDQLPLAHHLLVVHHGQRQKRKLLTLDMYNAVMLGWARQGAFKELVYVLFMVKDAGLTPDLLSYAAALQCMGRQDQDAGTIERCLEQMSQEGLKLQALFTAVLLSEEDRATVLKAVHKVKPTFSLPPQLPPPVNTSKLLRDVYAKDGRVSYPKLHLPLKTLQCLFEKQLHMELASRVCVVSVEKPTLPSKEVKHARKTLKTLRDQWEKALCRALRETKNRLEREVYEGRFSLYPFLCLLDEREVVRMLLQVLQALPAQGESFTTLARELSARTFSRHVVQRQRVSGQVQALQNHYRKYLCLLASDAEVPEPCLPRQYWEELGAPEALREQPWPLPVQMELGKLLAEMLVQATQMPCSLDKPHRSSRLVPVLYHVYSFRNVQQIGILKPHPAYVQLLEKAAEPTLTFEAVDVPMLCPPLPWTSPHSGAFLLSPTKLMRTVEGATQHQELLETCPPTALHGALDALTQLGNCAWRVNGRVLDLVLQLFQAKGCPQLGVPAPPSEAPQPPEAHLPHSAAPARKAELRRELAHCQKVAREMHSLRAEALYRLSLAQHLRDRVFWLPHNMDFRGRTYPCPPHFNHLGSDVARALLEFAQGRPLGPHGLDWLKIHLVNLTGLKKREPLRKRLAFAEEVMDDILDSADQPLTGRKWWMGAEEPWQTLACCMEVANAVRASDPAAYVSHLPVHQDGSCNGLQHYAALGRDSVGAASVNLEPSDVPQDVYSGVAAQVEVFRRQDAQRGMRVAQVLEGFITRKVVKQTVMTVVYGVTRYGGRLQIEKRLRELSDFPQEFVWEASHYLVRQVFKSLQEMFSGTRAIQHWLTESARLISHMGSVVEWVTPLGVPVIQPYRLDSKVKQIGGGIQSITYTHNGDISRKPNTRKQKNGFPPNFIHSLDSSHMMLTALHCYRKGLTFVSVHDCYWTHAADVSVMNQVCREQFVRLHSEPILQDLSRFLVKRFCSEPQKILEASQLKETLQAVPKPGAFDLEQVKRSTYFFS

SEQ ID NO: 27074 - DNA, 1011 bp, Homo sapiens
agctggcaaggctgggtctagctgggggcagggactgggcagagtggatctgctgtgtctgtggggcctgtgtagaggccctgaggctgtgtgccccgaatgtaggtggtcctggcagctcccctcctgtggcccgacagggagagccgagcatgggcgctgccccttcctgctgggcatttcttggcaccgcgatgtgtggttagatctggagcacgtggaggtcgttccagcagaatctaccggccacgggagctgggaatgctcaggatgcggggtggtggccctggcaggaggggacctcgtagccgccctcggagctgaggctcccacagcagcgtggggggcggcaggggtggggcgaggaggcttctgggaacatttcctccccctgtactgatacctaacccaggatgtttggggaggggcggggcgaggggtggggcgaggcctgcaggagggtgggcttccctggacctcaagtggagggggctgagcgcagggccaggatgctggtcactgggtggccctgtgagctcccctcccttcaggagtcctccgctctgccacaggaagggcctgaccttcgtctctgtgcacgactgttactggactcacgcagctgatgtctccgtcatgaaccaggtgcccccgtagtctgagcctcagtccacccatgggtggggcccccacactggggcgttgggtaggggtggtgcccagagcctgcctgatcacccctggggatcctctgactcctgcccaggtgtgccgggagcagtttgtccgcttgcacagcgagcccatcctgcaggacctgtccagattcctggtcaagcggttctgctctgagccccagaagatcttggaggccagccagctgaaggagacactgcaggcggtgcccaagccaggggccttcgacctggagcaggtgaagcgttccacctacttcttcagctgacaccccgtgagccttgtcagtgtgtaaataaagctcttttgccaccc

SEQ ID NO: 27075 - protein, 95 aa, Homo sapiens
MGGAPTLGRWVGVVPRACLITPGDPLTPAQVCREQFVRLHSEPILQDLSRFLVKRFCSEPQKILEASQLKETLQAVPKPGAFDLEQVKRSTYFFS

SEQ ID NO: 27076 - DNA, 852 bp, Homo sapiens
cccccgcaacccgaggtcctagcccgcccggggactcggctgactcacggacacgccccgcgagacaaacaacaaacgcgcggaggccgagcgcggagtcccgcacggccgcgcccctgtgcacctggcccccgcccccgagacgtcccattggccggcgccctagcctggtcccgcccaagtggaccccgcccccgccccgaggcaccccattggccggcgtccccgccccagcgaacccggccccgcccccgaggcgccccattggccccgccgcgcgaaggcagagccgcggacgcccgggagcgacgagcgcgcagcgaaccgggtgccgggtcatgcgccgccgcctgtggctgggcctggcctggctgctgctggcgcgggcgccggacgccgcgggaaccccgagcgcgtcgcggggaccgcgcagctacccgcacctggagggcgacgtgcgctggcggcgcctcttctcctccactcacttcttcctgcgcgtggatcccggcggccgcgtgcagggcacccgctggcgccacggccaggacagcatcctggagatccgctctgtacacgtgggcgtcgtggtcatcaaagcagtgtcctcaggcttctacgtggccatgaaccgccggggccgcctctacgggtcgcgactctacaccgtggactgcaggttccgggagcgcatcgaagagaacggccacaacacctacgcctcacagcgctggcgccgccgcggccagcccatgttcctggcgctggacaggaggggggggccccggccaggcggccggacgcggcggtaccacctgtccgcccacttcctgcccgtcctggtctcctgag

SEQ ID NO: 27077 - protein, 170 aa, Homo sapiens; identical to SEQ ID NO: 3645

SEQ ID NO: 27078 - DNA, 2939 bp, Homo sapiens
ttaaaaccagaaacaccagcgttaaagcgccagggcccagcgcctctgccccacgcttcggtcacacctcagccacgcgggttcctggccccttctgaaaagccggaccccactgctcaaggttgctggatgcctggcccggggtgcagccagctcgggcacagctggcaaggcgtggggacctgcgggctcagggggccggggcagtgggttcatctcagttgctgatgatcccaccatcctgggatccaagaatcagacgatggagacagctaacggagaggagcctccagcaggaccacccgtgtccctccacggtagacggctcctgcgcgtgggaggcgcgtgccccacgcccctacctgttctccaaagactcccgccctccgctctgcaccacactcttcactgtgtcccgcgacgtgtctgcgtcagcccccttggccaggtaactcggatcccacctgtccggaccgtgcgcagggcaccttctgggctgctgccgcaacgccgtggcgggccctcctggtggccgccctctggggtcgcgcgtggcgggccctcctggtggccgccctctggggtcgtgcgtggcgggccctcctcgtggccgccctctggggttgcggagccgagagaagcgttgggacttccatgactgtggccgccagggcagagtgccagccctgagggcgtccacatctcaaccccaggacccgcggactcggctcctcacgaggtaacgtacccggtgccctaagacgaggttgcatggaggacaccgaggtagggaggttacctcggatcgtccttgatctccggactgagagaacaagtgttttaggccccgagtctgcgcgacaggctgggccgcctgctccgggtcacagtcccccggccgagccgttttcctgttggaagatggagttttgagtcaggaggcgttgagggagacaaggctcgggttctgtgtgtccgtggtggttcttgggagttggagttggagctggagaggagggctgggcaggtgaggcttgcagcggcgggacctggagactcggaactggagggcctttgtcagagatgctgccggggtgtgcgcctgcctgtgaggctgggacttccctcgcgtggagtggccagaggagcaggaccgattggttcgccccacccaggcatgagcctcgggggcgctgggcccagaggacaccggcaccctggtgggggctgtgaggccgcattgctcgaggtcagacagcagtaagaagtggccgcccctggtgtcttccctgccccaggagcctgctgcacgacaggacagggccctggtaaggcccgcacccctgcgtccccgggcccctcgcgcctgcagccgccctctccccatccgccctgccgctcaggagtgcttcgtaagcggaagcacagtttgcaacagtttggggttgtcttattttcactgctggcgatttcctggggagccgctggttctgtgcccccaggccgctcctctctgttggggggcccccacctcactgcctgaggacaacgggggtccccaggtttgggcttgcgaataagctgctgagggctctgtgtgaaccgggatttcactgccctgggatgtgcggagctgtacgcccattccacgctctgttttagaaacaaagaaacaactgctgacctgtttcttttttttttttttttttgagacggagtctcgctctgtcgcccaggctggagtgcagtggcgcgatctcagctcactgcaacctccgcctcccggattcaagcgattccccgcctcagcctctcaagtagctggaattacaggcgcccgccaccacgcccggctaattttttgtatttttagtagacacggggtttcaccatgttgaccaagatggccttgatctcctgacctcgtgatccacccgcctcggcctcccaaagtgctgggatgacaggcgtgagcccccgcgcccggcctgctgacccgtttcttcgaggcacatgttacgttcctgcgtggggtgccagcaagttttatttcagctgtggtgacctgtgcagctcccagtgacaactcaagtggcgacgccctccgactggccaacgtgggccgatctcccctcacactgccaacctggggacatcctgggtgcagccctgtcctccacccactccatgccagccaaagatgtccccagaggccgcctggtgtcccctggggtggggctcgcttctgtctgcagggtgagcagaagctctcgggccgggcacgaccctcccttcccagaagggttttccgtgtcaggctgctcagcacctcccagcaagtgcctcggcccagtcttcctgtatttatgtggaaggcggcggctggggatggagccctggccgtccccggggacttcaccagggcgatgctgctgtcgccccacacacagaaggggagacaggcccagggtgtcactgcctggctccaggctgtggggctcttggctctgaccttttctctgagaggctggagtttgactcccagggctgtaggcagaagtcccagcggagtcaggatgtcaggagggcgctgggcacaggtgggggcgcccccacaccgacggccagccctctctgcgtcccgcaggacagcggcatgaagcccccaggcctgccctgcacccagcacggctcctgccctcagcctctgcccttcccgggggatctgaggagcaccgaggcgtcggcctctgcccttcccgggggatccgaggaacaccgaggcgtcggcctccgcccttcccgggggatcggaggaacaccgaggcgttggcctccgcccttccccgggggatctgaggcttattttgtcatgagaacagtttcagacaccgtgtgcatatttccgacgtctgctgtaacaaaagaccacaaagttg

SEQ ID NO: 27079 - protein, 131 aa, Homo sapiens
METANGEEPPAGPPVSLHGRRLLRVGGACPTPLPVLQRLPPSALHHTLHCVPRRVCVSPLGQVTRIPPVRTVRRAPSGLLPQRRGGPSWWPPSGVARGGPSWWPPSGVVRGGPSSWPPSGVAEPREALGLP

SEQ ID NO: 27080 - DNA, 2096 bp, Homo sapiens
aaaaaaaaaagtagccgagagtggtggacctcttctgtggtcccagctacttgggaggctgaggcgggaggatcgcttaagcccagcaggttggggctgcagtgaaccaagatcaagctgcttctctcctgcctcggcattagagtgagaccctggctcatagtaaaataaataaatagaagctaatctagaagctgatgctggccctgcccttggtgctcaccacggacctggcaggcctggcgcctctcctgtgcgtggggcggcctcaccccgtgactggcgctctcttttccaggatcatccagcagctcgtcaacggcatcatcacgcccgccaccatccccagcctgggcccctggggagtcctgcactcaaaccctatggactacgcctggggggccaacggcctggatgccatcatcacacaggtacagcgtggccacggcccagagtgcctgctgggggagggctgggctgcccacccctgggagctgccccactgcctggacccacgaagccccacaaaggtcaaaggggatgcgggcacagcctccacgctctggcgggcacagggggcagctccggccttcctcctgccatttctgagtcttggcaactttgggggttctcctgtgttcacgcggaacgttgtagcaaaaccgcggggaggactcgcccacagtcacatggtcaggaggccacgcggtccctcttcccgagaggtcgcgccctgacctgcttccaagtgccacccgtctcagccttgctgaggagcccttggagcattttgtcactggcaggacccgaccctcacagtagcccaccagccggagcacggcccccccattccgccgtcagggcactcaggagcgcggcccccccccccattccgctgtcagggacccaggagcgcgggcctccgcccattcccccattccaccgtcaggggacccaggagcgggggggccgcgtgggctccacagtgatctccgaccccgggcgggctccaaggggcccagggcccaggacaaacgcggcctcggtgcttttgcaggtcctgcagcctcgcgtttcagagccccgggccgggcccccgaggagctcccggcactctcgcctcttgtctttcagctcctcaatcagtttgaaaacacaggccccccaccggcagataaagagaaaatccaggccctccccaccgtccccgtcactgaggagcacgtaggctccgggctcgagtgccctgtgtgcaaggacgactacgcgctgggtgagcgtgtgcggcagctgccctgcaaccacctgttccacgacggctgcatcgtgccctggctggagcagcacgacagctgccccgtctgccgaaaaagcctcacgggacagaacacggccacgaacccccctggcctcactggggtgagcttctcctcctcgtcgtcatcgtcctcctccagctcgcccagcaacgagaacgccacaagcaactcgtgagcccacgtcggccgtcgggaaagcacggggcctttcccacccaccctcagccagcgccacacggcacccacagactgggtgccccggcggcgccacgcttggctggtcagcgctgcaggtcccgcctgttccagggcaggacccgggcccggcccaccggccccctggcttgggaaggcgtgggccacatggtcccctctggggcgtccccagcctccccgtcctctgtctaacctcaccctctaaacgttcagcggtggaaagatttttataattttaaattattactgctttgaaataaacggacgtttgagctcacgtggcggccatgcatggtttgtggcggaagacggggcccagcggctcccccagcgctgaagcacggggttcagcggctcccccagtgctgcaggtgccgccaggacgggccacgtgggcccccagcctccccctcggccgcctccacgacccggagtaggggggctcgggaccatgaggatgaccagcaaaattcaagaacaaaactgctccaacagacttttttaaaggaaaaaatatgtgtatcttgaaagctatttaaaatacactacttacaaagagaa

SEQ ID NO: 27081 - protein, 179 aa, Homo sapiens
MLALPLVLTTDLAGLAPLLCVGRPHPVTGALFSRIIQQLVNGIITPATIPSLGPWGVLHSNPMDYAWGANGLDAIITQVQRGHGPECLLGEGWAAHPWELPHCLDPRSPTKVKGDAGTASTLWRAQGAAPAFLLPFLSLGNFGGSPVFTRNVVAKPRGGLAHSHMVRRPRGPSSREVAP

SEQ ID NO: 27082 - DNA, 1059 bp, Homo sapiens
ccccacgttccctcctggggcgcaggctgacgacggcagggaccctgagagccggcgggagagagaccatccgtcccggcaccggtacggcgcccgacagccccgcgcccgcctcaccacgcggcgggccaccggccggcacgaaggcgtccccacgctggaagggatcatccagcagctcgtcaacggcatcatcacgcccgccaccatccccagcctgggcccctggggagtcctgcactcaaaccctatggactacgcctggggggccaacggcctggatgccatcatcacacagctcctcaatcagtttgaaaacacaggccccccaccggcagataaagagaaaatccaggccctccccaccgtccccgtcactgaggagcacgtaggctccgggctcgagtgccctgtgtgcaaggacgactacgcgctgggtgagcgtgtgcggcagctgccctgcaaccacctgttccacgacggctgcatcgtgccctggctggagcagcacgacagctgccccgtctgccgaaaaagcctcacgggacagaacacggccacgaacccccctggcctcactggggtgagcttctcctcctcgtcgtcatcgtcctcctccagctcgcccagcaacgagaacgccacatggtcccctctggggcgtccccagcctccccgtcctctgtctaacctcaccctctaaacgttcagcggtggaaagatttttataattttaaattattactgctttgaaataaacggacgtttgagctcacgtggcggccatgcatggtttgtggcggaagacggggcccagcggctcccccagcgctgaagcacggggttcagcggctcccccagtgctgcaggtgccgccaggacgggccacgtgggcccccagcctccccctcggccgcctccacgacccggagtaggggggctcgggaccatgaggatgaccagcaaaattcaagaacaaaactgctccaacagacttttttaaaggaaaaaatatgtgtatcttgaaagctatttaaaatacactacttacaaagagaa

SEQ ID NO: 27083 - protein, 150 aa, Homo sapiens
MDYAWGANGLDAIITQLLNQFENTGPPPADKEKIQALPTVPVTEEHVGSGLECPVCKDDYALGERVRQLPCNHLFHDGCIVPWLEQHDSCPVCRKSLTGQNTATNPPGLTGVSFSSSSSSSSSSSPSNENATWSPLGRPQPPRPLSNLTL

SEQ ID NO: 27084 - DNA, 1433 bp, Homo sapiens
ctggccgtggcaggagaggctggttgcctgacagcccgccagattatatctgtccaagatgcgagtctggttttatcgaggagcttccggaagagaccaggagcacagaaaatggttctgccccctccacagctcccacagaccagagccggccaccgttggagcttcgagatccccacgttccctcctggggcgcaggctgacgacggcagggaccctgagagccggcgggagagagaccatccgtcccggcaccggtacggcgcccgacagccccgcgcccgcctcaccacgcggcgggccaccggccggcacgaaggcgtccccacgctggaagggatcatccagcagctcgtcaacggcatcatcacgcccgccaccatccccagcctgggcccctggggagtcctgcactcaaaccctatggactacgcctggggggccaacggcctggatgccatcatcacacagctcctcaatcagtttgaaaacacaggccccccaccggcagataaagagaaaatccaggccctccccaccgtccccgtcactgaggagcacgtaggctccgggctcgagtgccctgtgtgcaaggacgactacgcgctgggtgagcgtgtgcggcagctgccctgcaaccacctgttccacgacggctgcatcgtgccctggctggagcagcacgacagctgccccgtctgccgaaaaagcctcacgggacagaacacggccacgaacccccctggcctcactggggtgagcttctcctcctcgtcgtcatcgtcctcctccagctcgcccagcaacgagaacgccacaagcaactcgtgagcccacgtcggccgtcgggaaagcacggggcctttcccacccaccctcagccagcgccacacggcacccacagactgggtgccccggcggcgccacgcttggctggtcagcgctgcaggtcccgcctgttccagggcaggacccgggcccggcccaccggccccctggcttgggaaggcgtgggccacatggtcccctctggggcgtccccagcctccccgtcctctgtctaacctcaccctctaaacgttcagcggtggaaagatttttataattttaaattattactgctttgaaataaacggacgtttgagctcacgtggcggccatgcatggtttgtggcggaagacggggcccagcggctcccccagcgctgaagcacggggttcagcggctcccccagtgctgcaggtgccgccaggacgggccacgtgggcccccagcctccccctcggccgcctccacgacccggagtaggggggctcgggaccatgaggatgaccagcaaaattcaagaacaaaactgctccaacagacttttttaaaggaaaaaatatgtgtatcttgaaagctatttaaaatacactacttacaaagagaa

SEQ ID NO: 27085 - protein, 239 aa, Homo sapiens
MVLPPPQLPQTRAGHRWSFEIPTFPPGAQADDGRDPESRRERDHPSRHRYGARQPRARLTTRRATGRHEGVPTLEGIIQQLVNGIITPATIPSLGPWGVLHSNPMDYAWGANGLDAIITQLLNQFENTGPPPADKEKIQALPTVPVTEEHVGSGLECPVCKDDYALGERVRQLPCNHLFHDGCIVPWLEQHDSCPVCRKSLTGQNTATNPPGLTGVSFSSSSSSSSSSSPSNENATSNS

SEQ ID NO: 27086 - DNA, 1520 bp, Homo sapiens
gtcgcccgggccgctgcccgccgagtacgcagctttcgccgctcccgcgcccccgctccgccccgcgtgccgtgcgtgccgtgcgtgagcgtgcgcgggcgcgtcggccggcgagggagcagcaaacggccggcggcgggtgccgcgcggggggcgggcggcgcggagtaggtggcggcggccatggccgaggcgtcgccgcatcccggacggtacttctgccactgctgctccgtggagatcgtcccgcgcctgccggattatatctgtccaagatgcgagtctggttttatcgaggagcttccggaagagaccaggagcacagaaaatggttctgccccctccacagctcccacagaccagagccggccaccgttggagcacgtggaccagcacctgttcacgctgccgcagggctacggacagtttgctttcggcatcttcgatgacagcttcgagatccccacgttccctcctggggcgcaggctgacgacggcagggaccctgagagccggcgggagagagaccatccgtcccggcaccggtacggcgcccgacagccccgcgcccgcctcaccacgcggcgggccaccggccggcacgaaggcgtccccacgctggaagggatcatccagcagctcgtcaacggcatcatcacgcccgccaccatccccagcctgggcccctggggagtcctgcactcaaaccctatggactacgcctggggggccaacggcctggatgccatcatcacacagctcctcaatcagtttgaaaacacaggccccccaccggcagataaagagaaaatccaggccctccccaccgtccccgtcactgaggagcacgtaggctccgggctcgagtgccctgtgtgcaaggacgactacgcgctgggtgagcgtgtgcggcagctgccctgcaaccacctgttccacgacggctgcatcgtgccctggctggagcagcacgacagctgccccgtctgccgaaaaagcctcacgggacagaacacggccacgaacccccctggcctcactggggtgagcttctcctcctcgtcgtcatcgtcctcctccagctcgcccagcaacgagaacgccacatggtcccctctggggcgtccccagcctccccgtcctctgtctaacctcaccctctaaacgttcagcggtggaaagatttttataattttaaattattactgctttgaaataaacggacgtttgagctcacgtggcggccatgcatggtttgtggcggaagacggggcccagcggctcccccagcgctgaagcacggggttcagcggctcccccagtgctgcaggtgccgccaggacgggccacgtgggcccccagcctccccctcggccgcctccacgacccggagtaggggggctcgggaccatgaggatgaccagcaaaattcaagaacaaaactgctccaacagacttttttaaaggaaaaaatatgtgtatcttgaaagctatttaaaatacactacttacaaagagaa

SEQ ID NO: 27087 - protein, 326 aa, Homo sapiens; identical to SEQ ID NO: 3649

SEQ ID NO: 27088 - DNA, 1721 bp, Homo sapiens
gtcgcccgggccgctgcccgccgagtacgcagctttcgccgctcccgcgcccccgctccgccccgcgtgccgtgcgtgccgtgcgtgagcgtgcgcgggcgcgtcggccggcgagggagcagcaaacggccggcggcgggtgccgcgcggggggcgggcggcgcggagtaggtggcggcggccatggccgaggcgtcgccgcatcccggacggtacttctgccactgctgctccgtggagatcgtcccgcgcctgccggattatatctgtccaagatgcgagtctggttttatcgaggagcttccggaagagaccaggagcacagaaaatggttctgccccctccacagctcccacagaccagagccggccaccgttggagcacgtggaccagcacctgttcacgctgccgcagggctacggacagtttgctttcggcatcttcgatgacagcttcgagatccccacgttccctcctggggcgcaggctgacgacggcagggaccctgagagccggcgggagagagaccatccgtcccggcaccggtacggcgcccgacagccccgcgcccgcctcaccacgcggcgggccaccggccggcacgaaggcgtccccacgctggaagggatcatccagcagctcgtcaacggcatcatcacgcccgccaccatccccagcctgggcccctggggagtcctgcactcaaaccctatggactacgcctggggggccaacggcctggatgccatcatcacacagctcctcaatcagtttgaaaacacaggccccccaccggcagataaagagaaaatccaggccctccccaccgtccccgtcactgaggagcacgtaggctccgggctcgagtgccctgtgtgcaaggacgactacgcgctgggtgagcgtgtgcggcagctgccctgcaaccacctgttccacgacggctgcatcgtgccctggctggagcagcacgacagctgccccgtctgccgaaaaagcctcacgggacagaacacggccacgaacccccctggcctcactggggtgagcttctcctcctcgtcgtcatcgtcctcctccagctcgcccagcaacgagaacgccacaagcaactcgtgagcccacgtcggccgtcgggaaagcacggggcctttcccacccaccctcagccagcgccacacggcacccacagactgggtgccccggcggcgccacgcttggctggtcagcgctgcaggtcccgcctgttccagggcaggacccgggcccggcccaccggccccctggcttgggaaggcgtgggccacatggtcccctctggggcgtccccagcctccccgtcctctgtctaacctcaccctctaaacgttcagcggtggaaagatttttataattttaaattattactgctttgaaataaacggacgtttgagctcacgtggcggccatgcatggtttgtggcggaagacggggcccagcggctcccccagcgctgaagcacggggttcagcggctcccccagtgctgcaggtgccgccaggacgggccacgtgggcccccagcctccccctcggccgcctccacgacccggagtaggggggctcgggaccatgaggatgaccagcaaaattcaagaacaaaactgctccaacagacttttttaaaggaaaaaatatgtgtatcttgaaagctatttaaaatacactacttacaaagagaa

SEQ ID NO: 27089 - protein, 311 aa, Homo sapiens; identical to SEQ ID NO: 3651

SEQ ID NO: 27090 - DNA, 535 bp, Homo sapiens
cccgtctgccgaaaaagcctcacgggacagaacacggccacgaacccccctggcctcactggggtgagcttctcctcctcgtcgtcatcgtcctcctccagctcgcccagcaacgagaacgccacaagcaactcgtgagcccacgtcggccgtcgggaaagcacggggcctttcccacccaccctcagccagcgccacacggcacccacagactgggtgccccggcggcgccacgcttggctggtcagcgctgcaggtcccgcctgttccagggcaggacccgggcccggcccaccggccccctggcttgggaaggcgtgggccacatggtcccctagtgctgcaggtgccgccaggacgggccacgtgggcccccagcctccccctcggccgcctccacgacccggagtaggggggctcgggaccatgaggatgaccagcaaaattcaagaacaaaactgctccaacagacttttttaaaggaaaaaatatgtgtatcttgaaagctatttaaaatacactacttacaaagaga

SEQ ID NO: 27091 - protein, 114 aa, Homo sapiens
ASPPRRHRPPPARPATRTPQATREPTSAVGKARGLSHPPSASATRHPQTGCPGGATLGWSALQVPPVPGQDPGPAHRPPGLGRRGPHGPLVLQVPPGRATWAPSLPLGRLHDPE

SEQ ID NO: 27092 - DNA, 1148 bp, Homo sapiens
ctggccgtggcaggagaggctggttgcctgacagcccgccagattatatctgtccaagatgcgagtctggttttatcgaggagcttccggaagagaccaggagcacagaaaatggttctgccccctccacagctcccacagaccagagccggccaccgttggagcttcgagatccccacgttccctcctggggcgcaggctgacgacggcagggaccctgagagccggcgggagagagaccatccgtcccggcaccggtacggcgcccgacagccccgcgcccgcctcaccacgcggcgggccaccggccggcacgaaggcgtccccacgctggaagggatcatccagcagctcgtcaacggcatcatcacgcccgccaccatccccagcctgggcccctggggagtcctgcactcaaaccctatggactacgcctggggggccaacggcctggatgccatcatcacacagctcctcaatcagtttgaaaacacaggccccccaccggcagataaagagaaaatccaggccctccccaccgtccccgtcactgaggagcacgtaggctccgggctcgagtgccctgtgtgcaaggacgactacgcgctgggtgagcgtgtgcggcagctgccctgcaaccacctgttccacgacggctgcatcgtgccctggctggagcagcacgacagctgccccgtctgccgaaaaagcctcacgggacagaacacggccacgaacccccctggcctcactggggtgagcttctcctcctcgtcgtcatcgtcctcctccagctcgcccagcaacgagaacgccacaagcaactcgtgagcccacgtcggccgtcgggaaagcacggggcctttcccacccaccctcagccagcgccacacggcacccacagactgggtgccccggcggcgccacgcttggctggtcagcgctgcaggtcccgcctgttccagggcaggacccgggcccggcccaccggccccctggcttgggaaggcgtgggccacatggtcccctctggggcgtccccagcctccccgtcctctgtctaacctcaccctctaaacgttcagcggtggaaagatttttataattttaaattattactgctttgaaataaacggacgtttgagctc

SEQ ID NO: 27093 - protein, 239 aa, Homo sapiens; identical to SEQ ID NO: 27085

SEQ ID NO: 27094 - DNA, 1436 bp, Homo sapiens
gtcgcccgggccgctgcccgccgagtacgcagctttcgccgctcccgcgcccccgctccgccccgcgtgccgtgcgtgccgtgcgtgagcgtgcgcgggcgcgtcggccggcgagggagcagcaaacggccggcggcgggtgccgcgcggggggcgggcggcgcggagtaggtggcggcggccatggccgaggcgtcgccgcatcccggacggtacttctgccactgctgctccgtggagatcgtcccgcgcctgccggattatatctgtccaagatgcgagtctggttttatcgaggagcttccggaagagaccaggagcacagaaaatggttctgccccctccacagctcccacagaccagagccggccaccgttggagcacgtggaccagcacctgttcacgctgccgcagggctacggacagtttgctttcggcatcttcgatgacagcttcgagatccccacgttccctcctggggcgcaggctgacgacggcagggaccctgagagccggcgggagagagaccatccgtcccggcaccggtacggcgcccgacagccccgcgcccgcctcaccacgcggcgggccaccggccggcacgaaggcgtccccacgctggaagggatcatccagcagctcgtcaacggcatcatcacgcccgccaccatccccagcctgggcccctggggagtcctgcactcaaaccctatggactacgcctggggggccaacggcctggatgccatcatcacacagctcctcaatcagtttgaaaacacaggccccccaccggcagataaagagaaaatccaggccctccccaccgtccccgtcactgaggagcacgtaggctccgggctcgagtgccctgtgtgcaaggacgactacgcgctgggtgagcgtgtgcggcagctgccctgcaaccacctgttccacgacggctgcatcgtgccctggctggagcagcacgacagctgccccgtctgccgaaaaagcctcacgggacagaacacggccacgaacccccctggcctcactggggtgagcttctcctcctcgtcgtcatcgtcctcctccagctcgcccagcaacgagaacgccacaagcaactcgtgagcccacgtcggccgtcgggaaagcacggggcctttcccacccaccctcagccagcgccacacggcacccacagactgggtgccccggcggcgccacgcttggctggtcagcgctgcaggtcccgcctgttccagggcaggacccgggcccggcccaccggccccctggcttgggaaggcgtgggccacatggtcccctctggggcgtccccagcctccccgtcctctgtctaacctcaccctctaaacgttcagcggtggaaagatttttataattttaaattattactgctttgaaataaacggacgtttgagctc

SEQ ID NO: 27095 - protein, 311 aa, Homo sapiens; identical to SEQ ID NO: 3651

SEQ ID NO: 27096 - DNA, 758 bp, Homo sapiens
gtcgcccgggccgctgcccgccgagtacgcagctttcgccgctcccgcgcccccgctccgccccgcgtgccgtgcgtgccgtgcgtgagcgtgcgcgggcgcgtcggccggcgagggagcagcaaacggccggcggcgggtgccgcgcggggggcgggcggcgcggagtaggtggcggcggccatggccgaggcgtcgccgcatcccggacggtacttctgccactgctgctccgtggagatcgtcccgcgcctgccggattatatctgtccaagatgcgagtctggttttatcgaggagcttccggaagagaccaggagcacagaaaatggttctgccccctccacagctcccacagaccagagccggccaccgttggagcacgtggaccagcacctgttcacgctgccgcagggctacggacagtttgctttcggcatcttcgatgacagcttcgagatccccacgttccctcctggggcgcaggctgacgacggcagggaccctgagagccggcgggagagagaccatccgtcccggcaccggtacggcgcccgacagccccgcgcccgcctcaccacgcggcgggccaccggccggcacgaaggcgtccccacgctggaagggatcatccagcagctcgtcaacggcatcatcacgccctccccatccccagcctgggcccctggggagtcctgcactcaaaccctatggactacgcctggggggccaacggcctggatgccatcatcacacag

SEQ ID NO: 27097 - protein, 190 aa, Homo sapiens
MAEASPHPGRYFCHCCSVEIVPRLPDYICPRCESGFIEELPEETRSTENGSAPSTAPTDQSRPPLEHVDQHLFTLPQGYGQFAFGIFDDSFEIPTFPPGAQADDGRDPESRRERDHPSRHRYGARQPRARLTTRRATGRHEGVPTLEGIIQQLVNGIITPSPSPAWAPGESCTQTLWTTPGGPTAWMPSS

SEQ ID NO: 27098 - DNA, 759 bp, Homo sapiens
gtcgcccgggccgctgcccgccgagtacgcagctttcgccgctcccgcgcccccgctccgccccgcgtgccgtgcgtgccgtgcgtgagcgtgcgcgggcgcgtcggccggcgagggagcagcaaacggccggcggcgggtgccgcgcggggggcgggcggcgcggagtaggtggcggcggccatggccgaggcgtcgccgcatcccggacggtacttctgccactgctgctccgtggagatcgtcccgcgcctgccggattatatctgtccaagatgcgagtctggttttatcgaggagcttccggaagagaccaggagcacagaaaatggttctgccccctccacagctcccacagaccagagccggccaccgttggagcacgtggaccagcacctgttcacgctgccgcagggctacggacagtttgctttcggcatcttcgatgacagcttcgagatccccacgttccctcctggggcgcaggctgacgacggcagggaccctgagagccggcgggagagagaccatccgtcccggcaccggtacggcgcccgacagccccgcgcccgcctcaccacgcggcgggccaccggccggcacgaaggcgtccccacgctggaagggatcatccagcagctcgtcaacggcatcatcacgcccgccaccatccccagcctgggcccctggggagtcctgcactcaaaccctatggactacgcctggggggccaacggcctggatgccatcatcacacag

SEQ ID NO: 27099 - protein, 191 aa, Homo sapiens
MAEASPHPGRYFCHCCSVEIVPRLPDYICPRCESGFIEELPEETRSTENGSAPSTAPTDQSRPPLEHVDQHLFTLPQGYGQFAFGIFDDSFEIPTFPPGAQADDGRDPESRRERDHPSRHRYGARQPRARLTTRRATGRHEGVPTLEGIIQQLVNGIITPATIPSLGPWGVLHSNPMDYAWGANGLDAIIT

SEQ ID NO: 27100 - DNA, 1073 bp, Homo sapiens
agcaaacggccggcggcgggtgccgcgcggggggcgggcggcgcggagtaggtggcggcggccatggccgaggcgtcgccgcatcccggacggtacttctgccactgctgctccgtggagatcgtcccgcgcctgccggattatatctgtccaagatgcgagtctggttttatcgaggagcttccggaagagaccaggagcacagaaaatggttctgccccctccacagctcccacagaccagagccggccaccgttggagcacgtggaccagcacctgttcacgctgccgcagggctacggacagtttgctttcggcatcttcgatgacagcttcgagatccccacgttccctcctggggcgcaggctgacgacggcagggaccctgagagccggcgggagagagaccatccgtcccggcaccggtacggcgcccgacagccccgcgcccgcctcaccacgcggcgggccaccggccggcacgaaggcgtccccacgctggaagggtgagggggccccgggggtggccgcgagggccccacgccttgaggtcggaagttctggcgcttagaatccagcacgggttccacggaaacgtggcatcatccataggctctctggagaggccgcccggccaggccctccagccccctgtgactccccacacggcccttcggagacagaagtatgccggttcagggtgtgtgggttgaccacagagtggggcaccgtgtgcctgccaggcccacgtgctctggagactgctgtccacacgcgtgtcgtcaaacgctgtccaggccttgggcccagaacagagcctgggggagccgtcgcagggccccactcctggtggaacggagcctgggggagccgtcgcagggccccactcctggtggaacggagcctgggggagccgtcgcagggccccattcctggtggaacagagcctgggggagccgtcgctgggccctgctcctggtggaacagagcctgggggagccgtcgcagggccctactcctggcggttgatgcttttatggttgtgtgtctcacctgctggaaatgtcatcttt

SEQ ID NO: 27101 - protein, 148 aa, Homo sapiens
MAEASPHPGRYFCHCCSVEIVPRLPDYICPRCESGFIEELPEETRSTENGSAPSTAPTDQSRPPLEHVDQHLFTLPQGYGQFAFGIFDDSFEIPTFPPGAQADDGRDPESRRERDHPSRHRYGARQPRARLTTRRATGRHEGVPTLEG

SEQ ID NO: 27102 - DNA, 1882 bp, Homo sapiens
agtgcttccctacctcatcgccgtctcccctcacggtacttcagcccactgtccccaccgttcctggggctcgccaggcgccctctcccccgcccgctgcccggtgcagcgctctcccgacgcccgcgtggctttcttccaggtctttgctcaaatgtcagcttacaaggtcttctctgctgccctcctgctccgtggcactgattccctcccgatgcactgtcaggtcagctgcgcagcaaagggatttttggacccgcagcagcgcctgacacacagcaggcattccctcagcgctgcggaatacaggcagacccggggctcagggcgctgtctgggcctcactgggacccgtggggtcagacagaggctgaggtctgtgggttgtggccttgtttccaagatgctccacgggctgacggcccaggcgcctctcgggtgcggagaaggcaggaaacctaacccctgcttccaaatttaatcagtagaaacggtatcatcacccagcacaggccaggatcatttctgaggttagttctggcccaatcatgcatgcatttcttttttctttttttttttgagacggagtctcactctgtcacccaggctggggtgcaatggcccgatctcggctcactgcaacctccgcctgccgagggttcaagcgattctcccgcctcagcctctcgagtagctaggactagaggcacccgccaccacaccggctaatttttgtatttttagtagaaacggggtttcactatatttggccaggctggtcttgaactcctgacctcgtgatccgcccgcctcggcctcccaaagtgctgggattacaggcatgagccaccgcgcccggcctcatgcgtgtatttctttcttcactcaacactcattgagcaactactgcacaccagaccctatgctgaatgcacgcagatacccccagtcccatgagattggacaggagcgtggaactcaagggtgactctggctctgcctggggaaagagagagagggcttccgaggggcagaccaagcccaggtggaccacgtcccaggcagaccaagcccaggtggaccacgtcccaggcagaccaagcccaggcggaccacgtcccaggcggaccacgtcccaggcggaccacgtcccaggcggaccaagcccaggcggaccacgtcccaggcggaccacgtcccaggcggaccaagcccaggtggaccacgtcccaggcggaccacgtcccaggcggaccaagcccaggtggaccacgtcccaggcggaccatgtcccaggcagaccacgtcccaggcagaccaagcccaggcggaccacgtcccaggcagaccacgtcccaggcggaccaagcccaggtggaccacgtcccaggcagaccaagcccaggcagaccacgtcccaggtagacctagtggttgtgtattcacttctcccaacccccctgggaagaaataactgcagctggccccattgcaccaatgaggaaactgaggcccagggaggaagccgattgcctgaggcggcagctttgggactggactgtggctgcctcctgaggaaggaaacagttcctccctccaccctcatcctggcaggggttgggccaccgttgcttcatcaagtgtcgtggagcctccgctctgtgccaggagcggggcctgtgccacaaacgtctgctgaaaccagccatccacccaacagtatcgagcaccatgatcggaagagtaaaggccccaaactgggccaggggcggtggctcattcccgtaatcccagcactttggaaggctgaggcgggtggatcatttgaggtcaggagttcgaggctagtctggccaaaatggtgaaacccatctctactaac

SEQ ID NO: 27103 - protein, 311 aa, Homo sapiens
MHADTPSPMRLDRSVELKGDSGSAWGKRERASEGQTKPRWTTSQADQAQVDHVPGRPSPGGPRPRRTTSQADHVPGGPSPGGPRPRRTTSQADQAQVDHVPGGPRPRRTKPRWTTSQADHVPGRPRPRQTKPRRTTSQADHVPGGPSPGGPRPRQTKPRQTTSQVDLVVVYSLLPTPLGRNNCSWPHCTNEETEAQGGSRLPEAAALGLDCGCLLRKETVPPSTLILAGVGPPLLHQVSWSLRSVPGAGPVPQTSAETSHPPNSIEHHDRKSKGPKLGQGRWLIPVIPALWKAEAGGSFEVRSSRLVWPKW

SEQ ID NO: 27104 - DNA, 1186 bp, Homo sapiens
ccggccgcgcgctgggaagtcggtgccgctgccgtctctgcgttcgccatgcgtcccggggcgccagggccactctggcctctgccctggggggccctggcttgggccgtgggcttcgtgagctccatgggctcggggaaccccgcgcccggtggtgtttgctggctccagcagggccaggaggccacctgcagcctggtgctccagactgatgtcacccgggccgagtgctgtgcctccggcaacattgacaccgcctggtccaacctcacccacccggggaacaagatcaacctcctcggcttcttgggccttgtccactgccttccctgcaaagattcgtgcgacggcgtggagtgcggcccgggcaaggcgtgccgcatgctggggggccgcccgcgctgcgagtgcgcgcccgactgctcggggctcccggcgcggctgcaggtctgcggctcagacggcgccacctaccgcgacgagtgcgagctgcgcgccgcgcgctgccgcggccacccggacctgagcgtcatgtaccggggccgctgccgcaagtcctgtgagcacgtggtgtgcccgcggccacagtcgtgcgtcgtggaccagacgggcagcgcccactgcgtggtgtgtcgagcggcgccctgccctgtgccctccagccccggccaggagctttgcggcaacaacaacgtcacctacatctcctcgtgccacatgcgccaggccacctgcttcctgggccgctccatcggcgtgcgccacgcgggcagctgcgcaggcacccctgaggagccgccaggtggtgagtctgcagaagaggaagagaacttcgtgtgagcctgcaggacaggcctgggcctggtgcccgaggccccccatcatcccctgttatttattgccacagcagagtctaatttatatgccacggacactccttagagcccggattcggaccacttggggatcccagaacctccctgacgatatcctggaaggactgaggaagggaggcctgggggccggctggtgggtgggatagacctgcgttccggacactgagcgcctgatttagggcccttctctaggatgccccagcccctaccctaagacctattgccggggaggattccacacttccgctcctttggggataaacctattaattattgctactatcaagagg

SEQ ID NO: 27105 - protein, 263 aa, Homo sapiens; identical to SEQ ID NO: 3653

SEQ ID NO: 27106 - DNA, 2524 bp, Homo sapiens
ccggccgcgcgctgggaagtcggtgccgctgccgtctctgcgttcgccatgcgtcccggggcgccagggccactctggcctctgccctggggggccctggcttgggccgtgggcttcgtgagctccatgggctcggggaaccccgcgcccggtggtgtttgctggctccagcagggccaggaggccacctgcagcctggtgctccagactgatgtcacccgggccgagtgctgtgcctccggcaacattgacaccgcctggtccaacctcacccacccggggaacaagatcaacctcctcggcttcttgggccttgtccactgccttccctgcaaagattcgtgcgacggcgtggagtgcggcccgggcaaggcgtgccgcatgctggggggccgcccgcgctgcgagtgcgcgcccgactgctcggggctcccggcgcggctgcaggtctgcggctcagacggcgccacctaccgcgacgagtgcgagctgcgcgccgcgcgctgccgcggccacccggacctgagcgtcatgtaccggggccgctgccgcaagtcctgtgagcacgtggtgtgcccgcggccacagtcgtgcgtcgtggaccagacgggcagcgcccactgcgtggtgtgtcgagcggcgccctgccctgtgccctccagccccggccaggagctttgcggcaacaacaacgtcacctacatctcctcgtgccacatgcgccaggccacctgcttcctgggccgctccatcggcgtgcgccacgcgggcagctgcgcaggcacccctgaggagccgccaggtggtgagtctgcagaagaggaagagaacttcgtgtgagcctgcaggacaggcctgggcctggtgcccgaggccccccatcatcccctgttatttattgccacagcagagtctaatttatatgccacggacactccttagagcccggattcggaccacttggggatcccagaacctccctgacgatatcctggaaggactgaggaagggaggcctgggggccggctggtgggtgggatagacctgcgttccggacactgagcgcctgatttagggcccttctctaggatgccccagcccctaccctaagacctattgccggggaggattccacacttccgctcctttggggataaacctattaattattgctactatcaagagggctgggcattctctgctggtaattcctgaagaggcatgactgcttttctcagccccaagcctctagtctgggtgtgtacggagggtctagcctgggtgtgtacggagggtctagcctgggtgagtacggagggtctagcctgggtgagtacggagggtctagcctgggtgagtacggagggtctagcctgggtgtgtatggaggatctagcctgggtgagtatggagggtctagcctgggtgagtatggagggtctagcctgggtgtgtatggagggtctagcctgggtgagtatggagggtctagcctgggtgtgtatggagggtctagcctgggtgagtatggagggtctagcctgggtgtgtacggagggtctagtctgagtgcgtgtggggacctcagaacactgtgaccttagcccagcaagccaggcccttcatgaaggccaagaaggctgccaccattccctgccagcccaagaactccagcttccccactgcctctgtgtgcccctttgcgtcctgtgaaggccattgagaaatgcccagtgtgccccctgggaaagggcacggcctgtgctcctgacacgggctgtgcttggccacagaaccacccagcgtctcccctgctgctgtccacgtcagttcatgaggcaacgtcgcgtggtctcagacgtggagcagccagcggcagctcagagcagggcactgtgtccggcggagccaagtccactctgggggagctctggcggggaccacgggccactgctcacccactggccccgaggggggtgtagacgccaagactcacgcatgtgtgacatccggagtcctggagccgggtgtcccagtggcaccactaggtgcctgctgcctccacagtggggttcacacccagggctccttggtcccccacaacctgccccggccaggcctgcagacccagactccagccagacctgcctcacccaccaatgcagccggggctggcgacaccagccaggtgctggtcttgggccagttctcccacgacggctcaccctcccctccatctgcgttgatgctcagaatcgcctacctgtgcctgcgtgtaaaccacagcctcagaccagctatggggagaggacaacacggaggatatccagcttccccggtctggggtgaggaatgtggggagcttgggcatcctcctccagcctcctccagcccccaggcagtgccttacctgtggtgcccagaaaagtgcccctaggttggtgggtctacaggagcctcagccaggcagcccaccccaccctggggccctgcctcaccaaggaaataaagactcaagccattt

SEQ ID NO: 27107 - protein, 263 aa, Homo sapiens; identical to SEQ ID NO: 3653

SEQ ID NO: 27108 - DNA, 2616 bp, Homo sapiens
ccggccgcgcgctgggaagtcggtgccgctgccgtctctgcgttcgccatgcgtcccggggcgccagggccactctggcctctgccctggggggccctggcttgggccgtgggcttcgtgagctccatgggctcggggaaccccgcgcccggtggtgtttgctggctccagcagggccaggaggccacctgcagcctggtgctccagactgatgtcacccgggccgagtgctgtgcctccggcaacattgacaccgcctggtccaacctcacccacccggggaacaagatcaacctcctcggcttcttgggccttgtccactgccttccctgcaaagattcgtgcgacggcgtggagtgcggcccgggcaaggcgtgccgcatgctggggggccgcccgcgctgcgagtgcgcgcccgactgctcggggctcccggcgcggctgcaggtctgcggctcagacggcgccacctaccgcgacgagtgcgagctgcgcgccgcgcgctgccgcggccacccggacctgagcgtcatgtaccggggccgctgccgcaagtcctgtgagcacgtggtgtgcccgcggccacagtcgtgcgtcgtggaccagacgggcagcgcccactgcgtggtgtgtcgagcggcgccctgccctgtgccctccagccccggccaggagctttgcggcaacaacaacgtcacctacatctcctcgtgccacatgcgccaggccacctgcttcctgggccgctccatcggcgtgcgccacgcgggcagctgcgcaggcacccctgaggagccgccaggtggtgagtctgcagaagaggaagagaacttcgtgtgagcctgcaggacaggcctgggcctggtgcccgaggccccccatcatcccctgttatttattgccacagcagagtctaatttatatgccacggacactccttagagcccggattcggaccacttggggatcccagaacctccctgacgatatcctggaaggactgaggaagggaggcctgggggccggctggtgggtgggatagacctgcgttccggacactgagcgcctgatttagggcccttctctaggatgccccagcccctaccctaagacctattgccggggaggattccacacttccgctcctttggggataaacctattaattattgctactatcaagagggctgggcattctctgctggtaattcctgaagaggcatgactgcttttctcagccccaagcctctagtctgggtgtgtacggagggtctagcctgggtgtgtacggagggtctagcctgggtgagtacggagggtctagcctgggtgagtacggagggtctagcctgggtgagtacggagggtctagcctgggtgtgtatggaggatctagcctgggtgagtatggagggtctagcctgggtgagtatggagggtctagcctgggtgtgtatggagggtctagcctgggtgagtatggagggtctagcctgggtgtgtatggagggtctagcctgggtgagtatggagggtctagcctgggtgtgtacggagggtctagtctgagtgcgtgtggggacctcagaacactgtgaccttagcccagcaagccaggcccttcatgaaggccaagaaggctgccaccattccctgccagcccaagaactccagcttccccactgcctctgtgtgcccctttgcgtcctgtgaaggccattgagaaatgcccagtgtgccccctgggaaagggcacggcctgtgctcctgacacgggctgtgcttggccacagaaccacccagcgtctcccctgctgctgtccacgtcagttcatgaggcaacgtcgcgtggtctcagacgtggagcagccagcggcagctcagagcagggcactgtgtccggcggagccaagtccactctgggggagctctggcggggaccacgggccactgctcacccactggccccgaggggggtgtagacgccaagactcacgcatgtgtgacatccggagtcctggagccgggtgtcccagtggcaccactaggtgcctgctgcctccacagtggggttcacacccagggctccttggtcccccacaacctgccccggccaggcctgcagacccagactccagccagacctgcctcacccaccaatgcagccggggctggcgacaccagccaggtgctggtcttgggccagttctcccacgacggctcaccctcccctccatctgcgttgatgctcagaatcgcctacctgtgcctgcgtgtaaaccacagcctcagaccagctatggggagaggacaacacggaggatatccagcttccccggtctggggtgaggaatgtggggagcttgggcatcctcctccagcctcctccagcccccaggcagtgccttacctgtggtgcccagaaaagtgcccctaggttggtgggtctacaggagcctcagccaggcagcccaccccaccctggggccctgcctcaccaaggaaataaagactcaagccattttggggtgtccaggcctcagtttgtctcctctctcaaggcttcaggccgcccccacggctgtgggatgggcagcctggggcctggggtgccgc

SEQ ID NO: 27109 - protein, 263 aa, Homo sapiens; identical to SEQ ID NO: 3653

SEQ ID NO: 27110 - DNA, 448 bp, Homo sapiens
ggtgccgctgccgtctctgcgttcgccatgcgtcccggggcgccagggccactctggcctctgccctggggggccctggcttgggccgtgggcttcgtgagctccatgggctcggggaaccccgcgcccgaagagcgcgtgcatcgggagcagacgtcagccagctgcaaggaggagcggcccggggctgcgtagctccgctggaccccgattccgggcagagacccccccccgccccggcccgcgcgcaccgagcccagcccccgccccccagcgcaggcgcagcgcggacctcggccccaccggtcccgcgcccggaccctgagccctgcccctgggaacccgagggccccgactccgactgaccctgacctgggacggcgcccccgcctccgccctgcagaaggggcgcagggaggggccccgaggccttcgcgcggccccacgc

SEQ ID NO: 27111 - protein, 55 aa, Homo sapiens
MRPGAPGPLWPLPWGALAWAVGFVSSMGSGNPAPEERVHREQTSASCKEERPGAA

SEQ ID NO: 27112 - DNA, 1779 bp, Homo sapiens
ccagggccactctggcctctgccctggggggccctggcttgggccgtgggcttcgtgagctccatgggctcggggaaccccgcgcccggtggtgtttgctggctccagcagggccaggaggccacctgcagcctggtgctccagactgatgtcacccgggccgagtgctgtgcctccggcaacattgacaccgcctggtccaacctcacccacccggggaacaagatcaacctccctgacgatatcctggaaggactgaggaagggaggcctgggggccggctggtgggtgggatagacctgcgttccggacactgagcgcctgatttagggcccttctctaggatgccccagcccctaccctaagacctattgccggggaggattccacacttccgctcctttggggataaacctattaattattgctactatcaagagggctgggcattctctgctggtaattcctgaagaggcatgactgcttttctcagccccaagcctctagtctgggtgtgtacggagggtctagcctgggtgtgtacggagggtctagcctgggtgagtacggagggtctagcctgggtgagtacggagggtctagcctgggtgagtacggagggtctagcctgggtgtgtatggaggatctagcctgggtgagtatggagggtctagcctgggtgagtatggagggtctagcctgggtgtgtatggagggtctagcctgggtgagtatggagggtctagcctgggtgtgtatggagggtctagcctgggtgagtatggagggtctagcctgggtgtgtacggagggtctagtctgagtgcgtgtggggacctcagaacactgtgaccttagcccagcaagccaggcccttcatgaaggccaagaaggctgccaccattccctgccagcccaagaactccagcttccccactgcctctgtgtgcccctttgcgtcctgtgaaggccattgagaaatgcccagtgtgccccctgggaaagggcacggcctgtgctcctgacacgggctgtgcttggccacagaaccacccagcgtctcccctgctgctgtccacgtcagttcatgaggcaacgtcgcgtggtctcagacgtggagcagccagcggcagctcagagcagggcactgtgtccggcggagccaagtccactctgggggagctctggcggggaccacgggccactgctcacccactggccccgaggggggtgtagacgccaagactcacgcatgtgtgacatccggagtcctggagccgggtgtcccagtggcaccactaggtgcctgctgcctccacagtggggttcacacccagggctccttggtcccccacaacctgccccggccaggcctgcagacccagactccagccagacctgcctcacccaccaatgcagccggggctggcgacaccagccaggtgctggtcttgggccagttctcccacgacggctcaccctcccctccatctgcgttgatgctcagaatcgcctacctgtgcctgcgtgtaaaccacagcctcagaccagctatggggagaggacaacacggaggatatccagcttccccggtctggggtgaggaatgtggggagcttgggcatcctcctccagcctcctccagcccccaggcagtgccttacctgtggtgcccagaaaagtgcccctaggttggtgggtctacaggagcctcagccaggcagcccaccccaccctggggccctgcctcaccaaggaaataaagactcaagccattt

SEQ ID NO: 27113 - protein, 77 aa, Homo sapiens
MGSGNPAPGGVCWLQQGQEATCSLVLQTDVTRAECCASGNIDTAWSNLTHPGNKINLPDDILEGLRKGGLGAGWWVG

SEQ ID NO: 27114 - DNA, 1871 bp, Homo sapiens
ccagggccactctggcctctgccctggggggccctggcttgggccgtgggcttcgtgagctccatgggctcggggaaccccgcgcccggtggtgtttgctggctccagcagggccaggaggccacctgcagcctggtgctccagactgatgtcacccgggccgagtgctgtgcctccggcaacattgacaccgcctggtccaacctcacccacccggggaacaagatcaacctccctgacgatatcctggaaggactgaggaagggaggcctgggggccggctggtgggtgggatagacctgcgttccggacactgagcgcctgatttagggcccttctctaggatgccccagcccctaccctaagacctattgccggggaggattccacacttccgctcctttggggataaacctattaattattgctactatcaagagggctgggcattctctgctggtaattcctgaagaggcatgactgcttttctcagccccaagcctctagtctgggtgtgtacggagggtctagcctgggtgtgtacggagggtctagcctgggtgagtacggagggtctagcctgggtgagtacggagggtctagcctgggtgagtacggagggtctagcctgggtgtgtatggaggatctagcctgggtgagtatggagggtctagcctgggtgagtatggagggtctagcctgggtgtgtatggagggtctagcctgggtgagtatggagggtctagcctgggtgtgtatggagggtctagcctgggtgagtatggagggtctagcctgggtgtgtacggagggtctagtctgagtgcgtgtggggacctcagaacactgtgaccttagcccagcaagccaggcccttcatgaaggccaagaaggctgccaccattccctgccagcccaagaactccagcttccccactgcctctgtgtgcccctttgcgtcctgtgaaggccattgagaaatgcccagtgtgccccctgggaaagggcacggcctgtgctcctgacacgggctgtgcttggccacagaaccacccagcgtctcccctgctgctgtccacgtcagttcatgaggcaacgtcgcgtggtctcagacgtggagcagccagcggcagctcagagcagggcactgtgtccggcggagccaagtccactctgggggagctctggcggggaccacgggccactgctcacccactggccccgaggggggtgtagacgccaagactcacgcatgtgtgacatccggagtcctggagccgggtgtcccagtggcaccactaggtgcctgctgcctccacagtggggttcacacccagggctccttggtcccccacaacctgccccggccaggcctgcagacccagactccagccagacctgcctcacccaccaatgcagccggggctggcgacaccagccaggtgctggtcttgggccagttctcccacgacggctcaccctcccctccatctgcgttgatgctcagaatcgcctacctgtgcctgcgtgtaaaccacagcctcagaccagctatggggagaggacaacacggaggatatccagcttccccggtctggggtgaggaatgtggggagcttgggcatcctcctccagcctcctccagcccccaggcagtgccttacctgtggtgcccagaaaagtgcccctaggttggtgggtctacaggagcctcagccaggcagcccaccccaccctggggccctgcctcaccaaggaaataaagactcaagccattttggggtgtccaggcctcagtttgtctcctctctcaaggcttcaggccgcccccacggctgtgggatgggcagcctggggcctggggtgccgc

SEQ ID NO: 27115 - protein, 77 aa, Homo sapiens; identical to SEQ ID NO: 27113

SEQ ID NO: 27116 - DNA, 537 bp, Homo sapiens
ccagcccccgccccccagcgcaggcgcagcgcggacctcggccccaccggtcccgcgcccggaccctgagccctgcccctgggaacccgagggccccgactccgactgaccctgacctgggacggcgcccccgcctccgccctgcagaaggggcgcagggaggggccccgaggccttcgcgcggccccacgcccgggaccctcccgcgcccggccccacgcgcgtgtcctctgtccgcagattcgtgcgacggcgtggagtgcggcccgggcaaggcgtgccgcatgctggggggccgcccgcgctgcgagtgcgcgcccgactgctcggggctcccggcgcggctgcaggtctgcggctcagacggcgccacctaccgcgacgagtgcgagctgcgcgccgcgcgctgccgcggccacccggacctgagcgtcatgtaccggggccgctgccgcaagtcctgtgagcacgtggtgtgcccgcggccacagtcgtgcgtcgtggaccagacgggcagcgcccactgcgtggtgtgtc

SEQ ID NO: 27117 - protein, 83 aa, Homo sapiens
MLGGRPRCECAPDCSGLPARLQVCGSDGATYRDECELRAARCRGHPDLSVMYRGRCRKSCEHVVCPRPQSCVVDQTGSAHCVV

SEQ ID NO: 27118 - DNA, 783 bp, Homo sapiens
ggcctccagcccaggacaggtcacatgggtggcggtggggcctgagtaagggcgtctttatacttccgagggagtatcacggggtagggtcttttgtagggttgggatttggaaaatagtgggcctctgggggctcacactgggcaagagagtcctgtgagcacgtggtgtgcccgcggccacagtcgtgcgtcgtggaccagacgggcagcgcccactgcgtggtgtgtcgagcggcgccctgccctgtgccctccagccccggccaggagctttgcggcaacaacaacgtcacctacatctcctcgtgccacatgcgccaggccacctgcttcctgggccgctccatcggcgtgcgccacgcgggcagctgcgcaggcacccctgaggagccgccaggtggtgagtctgcagaagaggaagagaacttcgtgtgagcctgcaggacaggcctgggcctggtgcccgaggccccccatcatcccctgttatttattgccacagcagagtctaatttatatgccacggacactccttagagcccggattcggaccacttggggatcccagaacctccctgacgatatcctggaaggactgaggaagggaggcctgggggccggctggtgggtgggatagacctgcgttccggacactgagcgcctgatttagggcccttctctaggatgccccagcccctaccctaagacctattgccggggaggattccacacttccgctcctttggggataaacctattaattattgctactatcaagagg

SEQ ID NO: 27119 - protein, 40 aa, Homo sapiens
MRQATCFLGRSIGVRHAGSCAGTPEEPPGGESAEEEENFV

SEQ ID NO: 27120 - DNA, 2121 bp, Homo sapiens
ggcctccagcccaggacaggtcacatgggtggcggtggggcctgagtaagggcgtctttatacttccgagggagtatcacggggtagggtcttttgtagggttgggatttggaaaatagtgggcctctgggggctcacactgggcaagagagtcctgtgagcacgtggtgtgcccgcggccacagtcgtgcgtcgtggaccagacgggcagcgcccactgcgtggtgtgtcgagcggcgccctgccctgtgccctccagccccggccaggagctttgcggcaacaacaacgtcacctacatctcctcgtgccacatgcgccaggccacctgcttcctgggccgctccatcggcgtgcgccacgcgggcagctgcgcaggcacccctgaggagccgccaggtggtgagtctgcagaagaggaagagaacttcgtgtgagcctgcaggacaggcctgggcctggtgcccgaggccccccatcatcccctgttatttattgccacagcagagtctaatttatatgccacggacactccttagagcccggattcggaccacttggggatcccagaacctccctgacgatatcctggaaggactgaggaagggaggcctgggggccggctggtgggtgggatagacctgcgttccggacactgagcgcctgatttagggcccttctctaggatgccccagcccctaccctaagacctattgccggggaggattccacacttccgctcctttggggataaacctattaattattgctactatcaagagggctgggcattctctgctggtaattcctgaagaggcatgactgcttttctcagccccaagcctctagtctgggtgtgtacggagggtctagcctgggtgtgtacggagggtctagcctgggtgagtacggagggtctagcctgggtgagtacggagggtctagcctgggtgagtacggagggtctagcctgggtgtgtatggaggatctagcctgggtgagtatggagggtctagcctgggtgagtatggagggtctagcctgggtgtgtatggagggtctagcctgggtgagtatggagggtctagcctgggtgtgtatggagggtctagcctgggtgagtatggagggtctagcctgggtgtgtacggagggtctagtctgagtgcgtgtggggacctcagaacactgtgaccttagcccagcaagccaggcccttcatgaaggccaagaaggctgccaccattccctgccagcccaagaactccagcttccccactgcctctgtgtgcccctttgcgtcctgtgaaggccattgagaaatgcccagtgtgccccctgggaaagggcacggcctgtgctcctgacacgggctgtgcttggccacagaaccacccagcgtctcccctgctgctgtccacgtcagttcatgaggcaacgtcgcgtggtctcagacgtggagcagccagcggcagctcagagcagggcactgtgtccggcggagccaagtccactctgggggagctctggcggggaccacgggccactgctcacccactggccccgaggggggtgtagacgccaagactcacgcatgtgtgacatccggagtcctggagccgggtgtcccagtggcaccactaggtgcctgctgcctccacagtggggttcacacccagggctccttggtcccccacaacctgccccggccaggcctgcagacccagactccagccagacctgcctcacccaccaatgcagccggggctggcgacaccagccaggtgctggtcttgggccagttctcccacgacggctcaccctcccctccatctgcgttgatgctcagaatcgcctacctgtgcctgcgtgtaaaccacagcctcagaccagctatggggagaggacaacacggaggatatccagcttccccggtctggggtgaggaatgtggggagcttgggcatcctcctccagcctcctccagcccccaggcagtgccttacctgtggtgcccagaaaagtgcccctaggttggtgggtctacaggagcctcagccaggcagcccaccccaccctggggccctgcctcaccaaggaaataaagactcaagccattt

SEQ ID NO: 27121 - protein, 40 aa, Homo sapiens; identical to SEQ ID NO: 27119

SEQ ID NO: 27122 - DNA, 2213 bp, Homo sapiens
ggcctccagcccaggacaggtcacatgggtggcggtggggcctgagtaagggcgtctttatacttccgagggagtatcacggggtagggtcttttgtagggttgggatttggaaaatagtgggcctctgggggctcacactgggcaagagagtcctgtgagcacgtggtgtgcccgcggccacagtcgtgcgtcgtggaccagacgggcagcgcccactgcgtggtgtgtcgagcggcgccctgccctgtgccctccagccccggccaggagctttgcggcaacaacaacgtcacctacatctcctcgtgccacatgcgccaggccacctgcttcctgggccgctccatcggcgtgcgccacgcgggcagctgcgcaggcacccctgaggagccgccaggtggtgagtctgcagaagaggaagagaacttcgtgtgagcctgcaggacaggcctgggcctggtgcccgaggccccccatcatcccctgttatttattgccacagcagagtctaatttatatgccacggacactccttagagcccggattcggaccacttggggatcccagaacctccctgacgatatcctggaaggactgaggaagggaggcctgggggccggctggtgggtgggatagacctgcgttccggacactgagcgcctgatttagggcccttctctaggatgccccagcccctaccctaagacctattgccggggaggattccacacttccgctcctttggggataaacctattaattattgctactatcaagagggctgggcattctctgctggtaattcctgaagaggcatgactgcttttctcagccccaagcctctagtctgggtgtgtacggagggtctagcctgggtgtgtacggagggtctagcctgggtgagtacggagggtctagcctgggtgagtacggagggtctagcctgggtgagtacggagggtctagcctgggtgtgtatggaggatctagcctgggtgagtatggagggtctagcctgggtgagtatggagggtctagcctgggtgtgtatggagggtctagcctgggtgagtatggagggtctagcctgggtgtgtatggagggtctagcctgggtgagtatggagggtctagcctgggtgtgtacggagggtctagtctgagtgcgtgtggggacctcagaacactgtgaccttagcccagcaagccaggcccttcatgaaggccaagaaggctgccaccattccctgccagcccaagaactccagcttccccactgcctctgtgtgcccctttgcgtcctgtgaaggccattgagaaatgcccagtgtgccccctgggaaagggcacggcctgtgctcctgacacgggctgtgcttggccacagaaccacccagcgtctcccctgctgctgtccacgtcagttcatgaggcaacgtcgcgtggtctcagacgtggagcagccagcggcagctcagagcagggcactgtgtccggcggagccaagtccactctgggggagctctggcggggaccacgggccactgctcacccactggccccgaggggggtgtagacgccaagactcacgcatgtgtgacatccggagtcctggagccgggtgtcccagtggcaccactaggtgcctgctgcctccacagtggggttcacacccagggctccttggtcccccacaacctgccccggccaggcctgcagacccagactccagccagacctgcctcacccaccaatgcagccggggctggcgacaccagccaggtgctggtcttgggccagttctcccacgacggctcaccctcccctccatctgcgttgatgctcagaatcgcctacctgtgcctgcgtgtaaaccacagcctcagaccagctatggggagaggacaacacggaggatatccagcttccccggtctggggtgaggaatgtggggagcttgggcatcctcctccagcctcctccagcccccaggcagtgccttacctgtggtgcccagaaaagtgcccctaggttggtgggtctacaggagcctcagccaggcagcccaccccaccctggggccctgcctcaccaaggaaataaagactcaagccattttggggtgtccaggcctcagtttgtctcctctctcaaggcttcaggccgcccccacggctgtgggatgggcagcctggggcctggggtgccgc

SEQ ID NO: 27123 - protein, 40 aa, Homo sapiens; identical to SEQ ID NO: 27119

SEQ ID NO: 27124 - DNA, 2006 bp, Homo sapiens
ccaggacaggtcacatgggtggcggtggggcctgaagtcctgtgagcacgtggtgtgcccgcggccacagtcgtgcgtcgtggaccagacgggcagcgcccactgcgtggtgtgtcgagcggcgccctgccctgtgccctccagccccggccaggagctttgcggcaacaacaacgtcacctacatctcctcgtgccacatgcgccaggccacctgcttcctgggccgctccatcggcgtgcgccacgcgggcagctgcgcaggcacccctgaggagccgccaggtggtgagtctgcagaagaggaagagaacttcgtgtgagcctgcaggacaggcctgggcctggtgcccgaggccccccatcatcccctgttatttattgccacagcagagtctaatttatatgccacggacactccttagagcccggattcggaccacttggggatcccagaacctccctgacgatatcctggaaggactgaggaagggaggcctgggggccggctggtgggtgggatagacctgcgttccggacactgagcgcctgatttagggcccttctctaggatgccccagcccctaccctaagacctattgccggggaggattccacacttccgctcctttggggataaacctattaattattgctactatcaagagggctgggcattctctgctggtaattcctgaagaggcatgactgcttttctcagccccaagcctctagtctgggtgtgtacggagggtctagcctgggtgtgtacggagggtctagcctgggtgagtacggagggtctagcctgggtgagtacggagggtctagcctgggtgagtacggagggtctagcctgggtgtgtatggaggatctagcctgggtgagtatggagggtctagcctgggtgagtatggagggtctagcctgggtgtgtatggagggtctagcctgggtgagtatggagggtctagcctgggtgtgtatggagggtctagcctgggtgagtatggagggtctagcctgggtgtgtacggagggtctagtctgagtgcgtgtggggacctcagaacactgtgaccttagcccagcaagccaggcccttcatgaaggccaagaaggctgccaccattccctgccagcccaagaactccagcttccccactgcctctgtgtgcccctttgcgtcctgtgaaggccattgagaaatgcccagtgtgccccctgggaaagggcacggcctgtgctcctgacacgggctgtgcttggccacagaaccacccagcgtctcccctgctgctgtccacgtcagttcatgaggcaacgtcgcgtggtctcagacgtggagcagccagcggcagctcagagcagggcactgtgtccggcggagccaagtccactctgggggagctctggcggggaccacgggccactgctcacccactggccccgaggggggtgtagacgccaagactcacgcatgtgtgacatccggagtcctggagccgggtgtcccagtggcaccactaggtgcctgctgcctccacagtggggttcacacccagggctccttggtcccccacaacctgccccggccaggcctgcagacccagactccagccagacctgcctcacccaccaatgcagccggggctggcgacaccagccaggtgctggtcttgggccagttctcccacgacggctcaccctcccctccatctgcgttgatgctcagaatcgcctacctgtgcctgcgtgtaaaccacagcctcagaccagctatggggagaggacaacacggaggatatccagcttccccggtctggggtgaggaatgtggggagcttgggcatcctcctccagcctcctccagcccccaggcagtgccttacctgtggtgcccagaaaagtgcccctaggttggtgggtctacaggagcctcagccaggcagcccaccccaccctggggccctgcctcaccaaggaaataaagactcaagccattt

SEQ ID NO: 27125 - protein, 40 aa, Homo sapiens; identical to SEQ ID NO: 27119

SEQ ID NO: 27126 - DNA, 2098 bp, Homo sapiens
ccaggacaggtcacatgggtggcggtggggcctgaagtcctgtgagcacgtggtgtgcccgcggccacagtcgtgcgtcgtggaccagacgggcagcgcccactgcgtggtgtgtcgagcggcgccctgccctgtgccctccagccccggccaggagctttgcggcaacaacaacgtcacctacatctcctcgtgccacatgcgccaggccacctgcttcctgggccgctccatcggcgtgcgccacgcgggcagctgcgcaggcacccctgaggagccgccaggtggtgagtctgcagaagaggaagagaacttcgtgtgagcctgcaggacaggcctgggcctggtgcccgaggccccccatcatcccctgttatttattgccacagcagagtctaatttatatgccacggacactccttagagcccggattcggaccacttggggatcccagaacctccctgacgatatcctggaaggactgaggaagggaggcctgggggccggctggtgggtgggatagacctgcgttccggacactgagcgcctgatttagggcccttctctaggatgccccagcccctaccctaagacctattgccggggaggattccacacttccgctcctttggggataaacctattaattattgctactatcaagagggctgggcattctctgctggtaattcctgaagaggcatgactgcttttctcagccccaagcctctagtctgggtgtgtacggagggtctagcctgggtgtgtacggagggtctagcctgggtgagtacggagggtctagcctgggtgagtacggagggtctagcctgggtgagtacggagggtctagcctgggtgtgtatggaggatctagcctgggtgagtatggagggtctagcctgggtgagtatggagggtctagcctgggtgtgtatggagggtctagcctgggtgagtatggagggtctagcctgggtgtgtatggagggtctagcctgggtgagtatggagggtctagcctgggtgtgtacggagggtctagtctgagtgcgtgtggggacctcagaacactgtgaccttagcccagcaagccaggcccttcatgaaggccaagaaggctgccaccattccctgccagcccaagaactccagcttccccactgcctctgtgtgcccctttgcgtcctgtgaaggccattgagaaatgcccagtgtgccccctgggaaagggcacggcctgtgctcctgacacgggctgtgcttggccacagaaccacccagcgtctcccctgctgctgtccacgtcagttcatgaggcaacgtcgcgtggtctcagacgtggagcagccagcggcagctcagagcagggcactgtgtccggcggagccaagtccactctgggggagctctggcggggaccacgggccactgctcacccactggccccgaggggggtgtagacgccaagactcacgcatgtgtgacatccggagtcctggagccgggtgtcccagtggcaccactaggtgcctgctgcctccacagtggggttcacacccagggctccttggtcccccacaacctgccccggccaggcctgcagacccagactccagccagacctgcctcacccaccaatgcagccggggctggcgacaccagccaggtgctggtcttgggccagttctcccacgacggctcaccctcccctccatctgcgttgatgctcagaatcgcctacctgtgcctgcgtgtaaaccacagcctcagaccagctatggggagaggacaacacggaggatatccagcttccccggtctggggtgaggaatgtggggagcttgggcatcctcctccagcctcctccagcccccaggcagtgccttacctgtggtgcccagaaaagtgcccctaggttggtgggtctacaggagcctcagccaggcagcccaccccaccctggggccctgcctcaccaaggaaataaagactcaagccattttggggtgtccaggcctcagtttgtctcctctctcaaggcttcaggccgcccccacggctgtgggatgggcagcctggggcctggggtgccgc

SEQ ID NO: 27127 - protein, 40 aa, Homo sapiens; identical to SEQ ID NO: 27119

SEQ ID NO: 27128 - DNA, 1626 bp, Homo sapiens
caggcacccctgaggagccgccaggtggtgagtctgcagaagaggaagagaacttcgtgtgagcctgcaggacaggcctgggcctggtgcccgaggccccccatcatcccctgttatttattgccacagcagagtctaatttatatgccacggacactccttagagcccggattcggaccacttggggatcccagaacctccctgacgatatcctggaaggactgaggaagggaggcctgggggccggctggtgggtgggatagacctgcgttccggacactgagcgcctgatttagggcccttctctaggatgccccagcccctaccctaagacctattgccggggaggattccacacttccgctcctttggggataaacctattaattattgctactatcaagagggctgggcattctctgctggtaattcctgaagaggcatgactgcttttctcagccccaagcctctagtctgggtgtgtatggaggatctagcctgggtgagtatggagggtctagcctgggtgagtatggagggtctagcctgggtgtgtatggagggtctagcctgggtgagtatggagggtctagcctgggtgtgtatggagggtctagcctgggtgagtatggagggtctagcctgggtgtgtacggagggtctagtctgagtgcgtgtggggacctcagaacactgtgaccttagcccagcaagccaggcccttcatgaaggccaagaaggctgccaccattccctgccagcccaagaactccagcttccccactgcctctgtgtgcccctttgcgtcctgtgaaggccattgagaaatgcccagtgtgccccctgggaaagggcacggcctgtgctcctgacacgggctgtgcttggccacagaaccacccagcgtctcccctgctgctgtccacgtcagttcatgaggcaacgtcgcgtggtctcagacgtggagcagccagcggcagctcagagcagggcactgtgtccggcggagccaagtccactctgggggagctctggcggggaccacgggccactgctcacccactggccccgaggggggtgtagacgccaagactcacgcatgtgtgacatccggagtcctggagccgggtgtcccagtggcaccactaggtgcctgctgcctccacagtggggttcacacccagggctccttggtcccccacaacctgccccggccaggcctgcagacccagactccagccagacctgcctcacccaccaatgcagccggggctggcgacaccagccaggtgctggtcttgggccagttctcccacgacggctcaccctcccctccatctgcgttgatgctcagaatcgcctacctgtgcctgcgtgtaaaccacagcctcagaccagctatggggagaggacaacacggaggatatccagcttccccggtctggggtgaggaatgtggggagcttgggcatcctcctccagcctcctccagcccccaggcagtgccttacctgtggtgcccagaaaagtgcccctaggttggtgggtctacaggagcctcagccaggcagcccaccccaccctggggccctgcctcaccaaggaaataaagactcaagccattt

SEQ ID NO: 27129 - protein, 75 aa, Homo sapiens
MTAFLSPKPLVWVCMEDLAWVSMEGLAWVSMEGLAWVCMEGLAWVSMEGLAWVCMEGLAWVSMEGLAWVCTEGLV

SEQ ID NO: 27130 - DNA, 1718 bp, Homo sapiens
caggcacccctgaggagccgccaggtggtgagtctgcagaagaggaagagaacttcgtgtgagcctgcaggacaggcctgggcctggtgcccgaggccccccatcatcccctgttatttattgccacagcagagtctaatttatatgccacggacactccttagagcccggattcggaccacttggggatcccagaacctccctgacgatatcctggaaggactgaggaagggaggcctgggggccggctggtgggtgggatagacctgcgttccggacactgagcgcctgatttagggcccttctctaggatgccccagcccctaccctaagacctattgccggggaggattccacacttccgctcctttggggataaacctattaattattgctactatcaagagggctgggcattctctgctggtaattcctgaagaggcatgactgcttttctcagccccaagcctctagtctgggtgtgtatggaggatctagcctgggtgagtatggagggtctagcctgggtgagtatggagggtctagcctgggtgtgtatggagggtctagcctgggtgagtatggagggtctagcctgggtgtgtatggagggtctagcctgggtgagtatggagggtctagcctgggtgtgtacggagggtctagtctgagtgcgtgtggggacctcagaacactgtgaccttagcccagcaagccaggcccttcatgaaggccaagaaggctgccaccattccctgccagcccaagaactccagcttccccactgcctctgtgtgcccctttgcgtcctgtgaaggccattgagaaatgcccagtgtgccccctgggaaagggcacggcctgtgctcctgacacgggctgtgcttggccacagaaccacccagcgtctcccctgctgctgtccacgtcagttcatgaggcaacgtcgcgtggtctcagacgtggagcagccagcggcagctcagagcagggcactgtgtccggcggagccaagtccactctgggggagctctggcggggaccacgggccactgctcacccactggccccgaggggggtgtagacgccaagactcacgcatgtgtgacatccggagtcctggagccgggtgtcccagtggcaccactaggtgcctgctgcctccacagtggggttcacacccagggctccttggtcccccacaacctgccccggccaggcctgcagacccagactccagccagacctgcctcacccaccaatgcagccggggctggcgacaccagccaggtgctggtcttgggccagttctcccacgacggctcaccctcccctccatctgcgttgatgctcagaatcgcctacctgtgcctgcgtgtaaaccacagcctcagaccagctatggggagaggacaacacggaggatatccagcttccccggtctggggtgaggaatgtggggagcttgggcatcctcctccagcctcctccagcccccaggcagtgccttacctgtggtgcccagaaaagtgcccctaggttggtgggtctacaggagcctcagccaggcagcccaccccaccctggggccctgcctcaccaaggaaataaagactcaagccattttggggtgtccaggcctcagtttgtctcctctctcaaggcttcaggccgcccccacggctgtgggatgggcagcctggggcctggggtgccgc

SEQ ID NO: 27131 - protein, 75 aa, Homo sapiens; identical to SEQ ID NO: 27129

SEQ ID NO: 27132 - DNA, 1557 bp, Homo sapiens
aggtggtgagtctgcagaagaggaagagaacttcgtgtgagcctgcaggacaggcctgggcctggtgcccgaggccccccatcatcccctgttatttattgccacagcagagtctaatttatatgccacggacactccttagagcccggattcggaccacttggggatcccagaacctccctgacgatatcctggaaggactgaggaagggaggcctgggggccggctggtgggtgggatagacctgcgttccggacactgagcgcctgatttagggcccttctctaggatgccccagcccctaccctaagacctattgccggggaggattccacacttccgctcctttggggataaacctattaattattgctactatcaagagggctgggcattctctgctggtaattcctgaagaggcatgactgcttttctcagccccaagcctctagtctgggtgtgtacggagggtctagcctgggtgtgtacggagggtctagcctgggtgagtacggagggtctagcctgggtgagtacggagggtctagcctgggtgagtacggagggtctagcctgggtgtgtatggaggatctagcctgggtgagtatggagggtctagcctgggtgagtatggagggtctagcctgggtgtgtatggagggtctagcctgggtgagtatggagggtctagcctgggtgtgtatggagggtctagcctgggtgagtatggagggtctagcctgggtgtgtacggagggtctagtctgagtgcgtgtggggacctcagaacactgtgaccttagcccagcaagccaggcccttcatgaaggccaagaaggctgccaccattccctgccagcccaagaactccagcttccccactgcctctgtgtgcccctttgcgtcctgtgaaggccattgagaaatgcccagtgtgccccctgggaaagggcacggcctgtgctccacgggccactgctcacccactggccccgaggggggtgtagacgccaagactcacgcatgtgtgacatccggagtcctggagccgggtgtcccagtggcaccactaggtgcctgctgcctccacagtggggttcacacccagggctccttggtcccccacaacctgccccggccaggcctgcagacccagactccagccagacctgcctcacccaccaatgcagccggggctggcgacaccagccaggtgctggtcttgggccagttctcccacgacggctcaccctcccctccatctgcgttgatgctcagaatcgcctacctgtgcctgcgtgtaaaccacagcctcagaccagctatggggagaggacaacacggaggatatccagcttccccggtctggggtgaggaatgtggggagcttgggcatcctcctccagcctcctccagcccccaggcagtgccttacctgtggtgcccagaaaagtgcccctaggttggtgggtctacaggagcctcagccaggcagcccaccccaccctggggccctgcctcaccaaggaaataaagactcaagccattttggggtg

SEQ ID NO: 27133 - protein, 178 aa, Homo sapiens
MPSVPPGKGHGLCSTGHCSPTGPEGGVDAKTHACVTSGVLEPGVPVAPLGACCLHSGVHTQGSLVPHNLPRPGLQTQTPARPASPTNAAGAGDTSQVLVLGQFSHDGSPSPPSALMLRIAYLCLRVNHSLRPAMGRGQHGGYPASPVWGEECGELGHPPPASSSPQAVPYLWCPEKCP

SEQ ID NO: 27134 - DNA, 979 bp, Homo sapiens
ggtctagcctggggtctagtctgagtgcgtgtggggacctcagaacactgtgaccttagcccagcaagccaggcccttcatgaaggccaagaaggctgccaccattccctgccagcccaagaactccagcttccccactgcctctgtgtgcccctttgcgtcctgtgaaggccattgagaaatgcccagtgtgccccctgggaaagggcacggcctgtgctcctgacacgggctgtgcttggccacagaaccacccagcgtctcccctgctgctgtccacgtcagttcatgaggcaacgtcgcgtggtctcagacgtggagcagccagcggcagctcagagcagggcactgtgtccggcggagccaagtccactctgggggagctctggcggggaccacgggccactgctcacccactggccccgaggggggtgtagacgccaagactcacgcatgtgtgacatccggagtcctggagccgggtgtcccagtggcaccactaggtgcctgctgcctccacagtggggttcacacccagggctccttggtcccccacaacctgccccggccaggcctgcagacccagactccagccagacctgcctcacccaccaatgcagccggggctggcgacaccagccaggtgctggtcttgggccagttctcccacgacggctcaccctcccctccatctgcgttgatgctcagaatcgcctacctgtgcctgcgtgtaaaccacagcctcagaccagctatggggagaggacaacacggaggatatccagcttccccggtctggggtgaggaatgtggggagcttgggcatcctcctccagcctcctccagcccccaggcagtgccttacctgtggtgcccagaaaagtgcccctaggttggtgggtctacaggagcctcagccaggcagcccaccccaccctggggccctgcctcaccaaggaaataaagactcaagccattt

SEQ ID NO: 27135 - protein, 171 aa, Homo sapiens
MRQRRVVSDVEQPAAAQSRALCPAEPSPLWGSSGGDHGPLLTHWPRGGCRRQDSRMCDIRSPGAGCPSGTTRCLLPPQWGSHPGLLGPPQPAPARPADPDSSQTCLTHQCSRGWRHQPGAGLGPVLPRRLTLPSICVDAQNRLPVPACKPQPQTSYGERTTRRISSFPGLG

SEQ ID NO: 27136 - DNA, 1071 bp, Homo sapiens
ggtctagcctggggtctagtctgagtgcgtgtggggacctcagaacactgtgaccttagcccagcaagccaggcccttcatgaaggccaagaaggctgccaccattccctgccagcccaagaactccagcttccccactgcctctgtgtgcccctttgcgtcctgtgaaggccattgagaaatgcccagtgtgccccctgggaaagggcacggcctgtgctcctgacacgggctgtgcttggccacagaaccacccagcgtctcccctgctgctgtccacgtcagttcatgaggcaacgtcgcgtggtctcagacgtggagcagccagcggcagctcagagcagggcactgtgtccggcggagccaagtccactctgggggagctctggcggggaccacgggccactgctcacccactggccccgaggggggtgtagacgccaagactcacgcatgtgtgacatccggagtcctggagccgggtgtcccagtggcaccactaggtgcctgctgcctccacagtggggttcacacccagggctccttggtcccccacaacctgccccggccaggcctgcagacccagactccagccagacctgcctcacccaccaatgcagccggggctggcgacaccagccaggtgctggtcttgggccagttctcccacgacggctcaccctcccctccatctgcgttgatgctcagaatcgcctacctgtgcctgcgtgtaaaccacagcctcagaccagctatggggagaggacaacacggaggatatccagcttccccggtctggggtgaggaatgtggggagcttgggcatcctcctccagcctcctccagcccccaggcagtgccttacctgtggtgcccagaaaagtgcccctaggttggtgggtctacaggagcctcagccaggcagcccaccccaccctggggccctgcctcaccaaggaaataaagactcaagccattttggggtgtccaggcctcagtttgtctcctctctcaaggcttcaggccgcccccacggctgtgggatgggcagcctggggcctggggtgccgc

SEQ ID NO: 27137 - protein, 171 aa, Homo sapiens; identical to SEQ ID NO: 27135

SEQ ID NO: 27138 - DNA, 1078 bp, Homo sapiens
ccacggcccgaagacctctgcggggagacgccagcctgcgtctgccatggggctcgggttgaggggctggggacgtcctctgctgactgtggccaccgccctgatgctgcccgtgaagccccccgcaggctcctggggggcccagatcatcgggggccacgaggtgaccccccactccaggccctacatggcatccgtgcgcttcgggggccaacatcactgcggaggcttcctgctgcgagcccgctgggtggtctcggccgcccactgcttcagccacagagacctccgcactggcctggtggtgctgggcgcccacgtcctgagtactgcggagcccacccagcaggtgtttggcatcgatgctctcaccacacaccccgactaccaccccatgacccacgccaacgacatctgcctgctgcggctgaacggctctgctgtcctgggccctgcagtggggctgctgaggccgccagggagaagggccaggccccccacagcggggacacggtgccgggtggctggctggggcttcgtgtctgactttgaggagctgccgcctggactgatggaggccaaggtccgagtgctggacccggacgtctgcaacagctcctggaagggccacctgacacttaccatgctctgcacccgcagtggggacagccacagacggggcttctgctcggccgactccggagggcccctggtgtgcaggaaccgggctcacggcctcgtttccttctcgggcctctggtgcggcgaccccaagacccccgacgtgtacacgcaggtgtccgcctttgtggcctggatctgggacgtggttcggcggagcagtccccagcccggccccctgcctgggaccaccaggcccccaggagaagccgcctgagccacaaccttgcggcatgcaaatgagatggccgctccaggcctggaatgttccgtggctgggccccacgggaagcctgatgttcagggttggggtgggacgggcagcggtggggcacacccattccacatgcaaagggcagaagcaaacccagtaaaatgttaactgacttccagcctc

SEQ ID NO: 27139 - protein, 283 aa, Homo sapiens
MGLGLRGWGRPLLTVATALMLPVKPPAGSWGAQIIGGHEVTPHSRPYMASVRFGGQHHCGGFLLRARWVVSAAHCFSHRDLRTGLVVLGAHVLSTAEPTQQVFGIDALTTHPDYHPMTHANDICLLRLNGSAVLGPAVGLLRPPGRRARPPTAGTRCRVAGWGFVSDFEELPPGLMEAKVRVLDPDVCNSSWKGHLTLTMLCTRSGDSHRRGFCSADSGGPLVCRNRAHGLVSFSGLWCGDPKTPDVYTQVSAFVAWIWDVVRRSSPQPGPLPGTTRPPGEAA

SEQ ID NO: 27140 - DNA, 2756 bp, Homo sapiens
ccgccgccgcccggacaataaacagcagctttgcgcggggcgatgcccgagccggtgccgccgcccccgcgccgcgcagccccggccgccaggccttagcccgccccggcccccgccaggccgcgtccccctcccctcccctcccccgcgcgccacccgcgcccgcccccgcccggcaccgcggacccacccggacctcggcggggagatggaggtcctggcggcagagaccacgtcccagcaggagcggctgcaggccatcgcagagaagcggaagcggcaggcggagatcgagaacaagcgccggcagctggaggacgagcggaggcagctgcagcacctgaagtccaaggcactgcgggagcgctggctgctggaggggacgccgtcctcggcctcagagggggatgaggacctgaggaggcagatgcaggacgacgagcagaagacacggctgctggaggactcggtgtccaggttggagaaggaaattgaggtgctggagcgtggagactccgccccagccactgccaaggagaacgcggcggccccgagcccagtccgggccccagccccgagtccagccaaggaggagcgcaagacagaggtggtgatgaattcacagcagacgccggtgggcacgcccaaagacaagcgagtctccaacacgcccctgaggacggttgacggctcccccatgatgaaggcagtggtccatgctgtggacggcaccgccgagaacgggatccaccccctgagctcctccgaggtggacgaactcatccacaaagcggacgaggtcacgctgagcgaggcagggtccacggccggggcggcagagacccggggggctgtggagggggcagcccggaccacgccctcccggcgggagatcaccggtgtgcaggcacagccaggcgaggccacgtccggcccgccggggatccagcccggccaggagcccccggtcacaatgatcttcatgggttaccagaacgtggaggatgaggccgagaccaagaaggtgctgggccttcaagataccatcacggcggagctggtggtcatcgaagacgcggctgagcccaaggagcctgcaccacccaacggcagtgctgccgagcctcccacggaggccgcctccagggaagagaatcaggcggggcccgaggccaccaccagcgacccccaggacctcgacatgaagaagcaccgttgtaaatgctgctccatcatgtgagccggcccccgagaccccggcccccaccccacaccacagacacccaccagcccggcccctcccggcgcctgcccaccctccacccacagcctcacgggtccaggacttggcgtgttgttacatgttccttccgagttttctttcgctggaaagagggacaggggcccccacccgtcaccacgccccaacactccccccgaaccagagccgtgcacttgtgcctggtaggagagagacaggacagacccgcttttcccgagacaaggaccccccatgtcacggcagcttcacagacgcggctcgcgcccaccggggtcctggcgggtgggacccgcagcctccacgcggcccaggccagcctgccaccctctgggcctcctacctgtgcctttctctgaggggacaccccgccagagagggccccgggagccgggggtgggtactgaggcctgctcaggccctggaagtgaggctctatggggttccctggccaaggcgctggccccccaatctcaggcagttggggtgaggccgtgcctctttgggggctaaaggtcttgggtggaggacaggcccctctgctgtgcccctatgccctgtgtgggcccaaccagtggacaatggagtctgggggagggggaaccccggggacatgcccccacccgggaggggccggtaacccctgggctatcttctagacggggcgaaccaggggtcattgacctgccccctgcacagggcagggaccgagtgagccactccttgtcccgagctcccgcccccactgggccctccttcctcctggtgctaatttggggaccccaggggccgcccccggcctcttctccatcctgcttggaccagggtcctgggtcttcccaaccataccccgagatcaggccccacctgccagctctactgggcttggagcacgtccgggcagtggagggagggacacagcctgggacaggaagcctcttgggttggagcaggagaccctcatttgccacccagaccaatgtgagcctgcccccagccccctctcattggaagtggcaaggggcttccctcctgggggcagctacactcgtccccagaggcacattcgtgcacattctcacagacaccgtctcacacgttggctttggacaaccaggccccaacttggtccctgccctagggacctccagcctggtgcccagtgctcaggccacctcctggtccagtcaccacctgcagcctcggcagggcaggtacaggggccacctcagatgggagcctgggtccctgcctccgctctgcccctgggtggctgggaggagaggccctctcgggggtgacctgggcgtcagccgtggaaccccctcctcctccctggagtctgcctgagtccctcgagccgcgagccttcgctgaagtgcccttgctataaccccctctgcttctggtgtgtgacgaggcccccgatgttcttgattttcccagagaagcaaataaacagcgtgaacagccccag

SEQ ID NO: 27141 - protein, 343 aa, Homo sapiens; identical to SEQ ID NO: 3657

SEQ ID NO: 27142 - DNA, 2888 bp, Homo sapiens
ccgccgccgcccggacaataaacagcagctttgcgcggggcgatgcccgagccggtgccgccgcccccgcgccgcgcagccccggccgccaggccttagcccgccccggcccccgccaggccgcgtccccctcccctcccctcccccgcgcgccacccgcgcccgcccccgcccggcaccgcggacccacccggacctcggcggggagatggaggtcctggcggcagagaccacgtcccagcaggagcggctgcaggccatcgcagagaagcggaagcggcaggcggagatcgagaacaagcgccggcagctggaggacgagcggaggcagctgcagcacctgaagtccaaggcactgcgggagcgctggctgctggaggggacgccgtcctcggcctcagagggggatgaggacctgaggaggcagatgcaggacgacgagcagaagacacggctgctggaggactcggtgtccaggttggagaaggaaattgaggtgctggagcgtggagactccgccccagccactgccaaggagaacgcggcggccccgagcccagtccgggccccagccccgagtccagccaaggaggagcgcaagacagaggtggtgatgaattcacagcagacgccggtgggcacgcccaaagacaagcgagtctccaacacgcccctgaggacggttgacggctcccccatgatgaaggcagccatgtactcggttgagatcactgtggagaaggacaaggtgacaggggagaccagggtgctgtccagcaccacgctgctccctcggcagccgctccctctgggcatcaaagtctacgaggacgagaccaaagtggtccatgctgtggacggcaccgccgagaacgggatccaccccctgagctcctccgaggtggacgaactcatccacaaagcggacgaggtcacgctgagcgaggcagggtccacggccggggcggcagagacccggggggctgtggagggggcagcccggaccacgccctcccggcgggagatcaccggtgtgcaggcacagccaggcgaggccacgtccggcccgccggggatccagcccggccaggagcccccggtcacaatgatcttcatgggttaccagaacgtggaggatgaggccgagaccaagaaggtgctgggccttcaagataccatcacggcggagctggtggtcatcgaagacgcggctgagcccaaggagcctgcaccacccaacggcagtgctgccgagcctcccacggaggccgcctccagggaagagaatcaggcggggcccgaggccaccaccagcgacccccaggacctcgacatgaagaagcaccgttgtaaatgctgctccatcatgtgagccggcccccgagaccccggcccccaccccacaccacagacacccaccagcccggcccctcccggcgcctgcccaccctccacccacagcctcacgggtccaggacttggcgtgttgttacatgttccttccgagttttctttcgctggaaagagggacaggggcccccacccgtcaccacgccccaacactccccccgaaccagagccgtgcacttgtgcctggtaggagagagacaggacagacccgcttttcccgagacaaggaccccccatgtcacggcagcttcacagacgcggctcgcgcccaccggggtcctggcgggtgggacccgcagcctccacgcggcccaggccagcctgccaccctctgggcctcctacctgtgcctttctctgaggggacaccccgccagagagggccccgggagccgggggtgggtactgaggcctgctcaggccctggaagtgaggctctatggggttccctggccaaggcgctggccccccaatctcaggcagttggggtgaggccgtgcctctttgggggctaaaggtcttgggtggaggacaggcccctctgctgtgcccctatgccctgtgtgggcccaaccagtggacaatggagtctgggggagggggaaccccggggacatgcccccacccgggaggggccggtaacccctgggctatcttctagacggggcgaaccaggggtcattgacctgccccctgcacagggcagggaccgagtgagccactccttgtcccgagctcccgcccccactgggccctccttcctcctggtgctaatttggggaccccaggggccgcccccggcctcttctccatcctgcttggaccagggtcctgggtcttcccaaccataccccgagatcaggccccacctgccagctctactgggcttggagcacgtccgggcagtggagggagggacacagcctgggacaggaagcctcttgggttggagcaggagaccctcatttgccacccagaccaatgtgagcctgcccccagccccctctcattggaagtggcaaggggcttccctcctgggggcagctacactcgtccccagaggcacattcgtgcacattctcacagacaccgtctcacacgttggctttggacaaccaggccccaacttggtccctgccctagggacctccagcctggtgcccagtgctcaggccacctcctggtccagtcaccacctgcagcctcggcagggcaggtacaggggccacctcagatgggagcctgggtccctgcctccgctctgcccctgggtggctgggaggagaggccctctcgggggtgacctgggcgtcagccgtggaaccccctcctcctccctggagtctgcctgagtccctcgagccgcgagccttcgctgaagtgcccttgctataaccccctctgcttctggtgtgtgacgaggcccccgatgttcttgattttcccagagaagcaaataaacagcgtgaacagccccag

SEQ ID NO: 27143 - protein, 387 aa, Homo sapiens; identical to SEQ ID NO: 3659

SEQ ID NO: 27144 - DNA, 3018 bp, Homo sapiens
ccgccgccgcccggacaataaacagcagctttgcgcggggcgatgcccgagccggtgccgccgcccccgcgccgcgcagccccggccgccaggccttagcccgccccggcccccgccaggccgcgtccccctcccctcccctcccccgcgcgccacccgcgcccgcccccgcccggcaccgcggacccacccggacctcggcggggagatggaggtcctggcggcagagaccacgtcccagcaggagcggctgcaggccatcgcagagaagcggaagcggcaggcggagatcgagaacaagcgccggcagctggaggacgagcggaggcagctgcagcacctgaagtccaaggcactgcgggagcgctggctgctggaggggacgccgtcctcggcctcagagggggatgaggacctgaggaggcagatgcaggacgacgagcagaagacacggctgctggaggactcggtgtccaggttggagaaggaaattgaggtgctggagcgtggagactccgccccagccactgccaaggagaacgcggcggccccgagcccagtccgggccccagccccgagtccagccaaggaggagcgcaagacagaggtggtgatgaattcacagcagacgccggtgggcacgcccaaagacaagcgagtctccaacacgcccctgaggacggttgacggctcccccatgatgaaggcagtggtccatgctgtggacggcaccgccgagaacgggatccaccccctgagctcctccgaggtggacgaactcatccacaaagcggacgaggtcacgctgagcgaggcagggtccacggccggggcggcagagacccggggggctgtggagggggcagcccggaccacgccctcccggcgggagatcaccggtgtgcaggcacagccaggcgaggccacgtccggcccgccggggatccagcccggccaggagcccccggtcacaatgatcttcatgggttaccagaacgtggaggatgaggccgagaccaagaaggtgctgggccttcaagataccatcacggcggagctggtggtcatcgaagacgcggctgagcccaaggagcctgcaccacccaacggcagtgctgccgagcctcccacggaggccgcctccagggaagagaatcaggcggggcccgaggccaccaccagcgacccccaggacctcgacatgaagaagcaccgttgtaaatgctgctccatcatgtgagccggcccccgagaccccggcccccaccccacaccacagacacccaccagcccggcccctcccggcgcctgcccaccctccacccacagcctcacgggtccaggacttggcgtgttgttacatgttccttccgagttttctttcgctggaaagagggacaggggcccccacccgtcaccacgccccaacactccccccgaaccagagccgtgcacttgtgcctggtaggagagagacaggacagacccgcttttcccgagacaaggaccccccatgtcacggcagcttcacagacgcggctcgcgcccaccggggtcctggcgggtgggacccgcagcctccacgcggcccaggccagcctgccaccctctgggcctcctacctgtgcctttctctgaggggacaccccgccagagagggccccgggagccgggggtgggtactgaggcctgctcaggccctggaagtgaggctctatggggttccctggccaaggcgctggccccccaatctcaggcagttggggtgaggccgtgcctctttgggggctaaaggtcttgggtggaggacaggcccctctgctgtgcccctatgccctgtgtgggcccaaccagtggacaatggagtctgggggagggggaaccccggggacatgcccccacccgggaggggccggtaacccctgggctatcttctagacggggcgaaccaggggtcattgacctgccccctgcacagggcagggaccgagtgagccactccttgtcccgagctcccgcccccactgggccctccttcctcctggtgctaatttggggaccccaggggccgcccccggcctcttctccatcctgcttggaccagggtcctgggtcttcccaaccataccccgagatcaggccccacctgccagctctactgggcttggagcacgtccgggcagtggagggagggacacagcctgggacaggaagcctcttgggttggagcaggagaccctcatttgccacccagaccaatgtgagcctgcccccagccccctctcattggaagtggcaaggggcttccctcctgggggcagctacactcgtccccagaggcacattcgtgcacattctcacagacaccgtctcacacgttggctttggacaaccaggccccaacttggtccctgccctagggacctccagcctggtgcccagtgctcaggccacctcctggtccagtcaccacctgcagcctcggcagggcaggtacaggggccacctcagatgggagcctgggtccctgcctccgctctgcccctgggtggctgggaggagaggccctctcgggggtgacctgggcgtcagccgtggaaccccctcctcctccctggagtctgcctgagtccctcgagccgcgagccttcgctgaagtgcccttgctataaccccctctgcttctggtgtgtgacgaggcccccgatgttcttgattttcccagagaagcaaataaacagcgtgaacagccccagttcctggagttcttgcctttcaacctggcgaggaaggcgtggccaggccagggggtggggcctgccggcctttgagccattaaagggaggctgagcagggttgcggtgtgctggcttcacctgcctgcacccgctcaccctgagcgccttggggtggtgggaggcgctggaatccccactgtgcaggtaaggcctggctgtaaggggctgctgtgggggggcaggactggcttcccggggggccctcgggttctgcggccgc

SEQ ID NO: 27145 - protein, 343 aa, Homo sapiens; identical to SEQ ID NO: 3657

SEQ ID NO: 27146 - DNA, 3150 bp, Homo sapiens
ccgccgccgcccggacaataaacagcagctttgcgcggggcgatgcccgagccggtgccgccgcccccgcgccgcgcagccccggccgccaggccttagcccgccccggcccccgccaggccgcgtccccctcccctcccctcccccgcgcgccacccgcgcccgcccccgcccggcaccgcggacccacccggacctcggcggggagatggaggtcctggcggcagagaccacgtcccagcaggagcggctgcaggccatcgcagagaagcggaagcggcaggcggagatcgagaacaagcgccggcagctggaggacgagcggaggcagctgcagcacctgaagtccaaggcactgcgggagcgctggctgctggaggggacgccgtcctcggcctcagagggggatgaggacctgaggaggcagatgcaggacgacgagcagaagacacggctgctggaggactcggtgtccaggttggagaaggaaattgaggtgctggagcgtggagactccgccccagccactgccaaggagaacgcggcggccccgagcccagtccgggccccagccccgagtccagccaaggaggagcgcaagacagaggtggtgatgaattcacagcagacgccggtgggcacgcccaaagacaagcgagtctccaacacgcccctgaggacggttgacggctcccccatgatgaaggcagccatgtactcggttgagatcactgtggagaaggacaaggtgacaggggagaccagggtgctgtccagcaccacgctgctccctcggcagccgctccctctgggcatcaaagtctacgaggacgagaccaaagtggtccatgctgtggacggcaccgccgagaacgggatccaccccctgagctcctccgaggtggacgaactcatccacaaagcggacgaggtcacgctgagcgaggcagggtccacggccggggcggcagagacccggggggctgtggagggggcagcccggaccacgccctcccggcgggagatcaccggtgtgcaggcacagccaggcgaggccacgtccggcccgccggggatccagcccggccaggagcccccggtcacaatgatcttcatgggttaccagaacgtggaggatgaggccgagaccaagaaggtgctgggccttcaagataccatcacggcggagctggtggtcatcgaagacgcggctgagcccaaggagcctgcaccacccaacggcagtgctgccgagcctcccacggaggccgcctccagggaagagaatcaggcggggcccgaggccaccaccagcgacccccaggacctcgacatgaagaagcaccgttgtaaatgctgctccatcatgtgagccggcccccgagaccccggcccccaccccacaccacagacacccaccagcccggcccctcccggcgcctgcccaccctccacccacagcctcacgggtccaggacttggcgtgttgttacatgttccttccgagttttctttcgctggaaagagggacaggggcccccacccgtcaccacgccccaacactccccccgaaccagagccgtgcacttgtgcctggtaggagagagacaggacagacccgcttttcccgagacaaggaccccccatgtcacggcagcttcacagacgcggctcgcgcccaccggggtcctggcgggtgggacccgcagcctccacgcggcccaggccagcctgccaccctctgggcctcctacctgtgcctttctctgaggggacaccccgccagagagggccccgggagccgggggtgggtactgaggcctgctcaggccctggaagtgaggctctatggggttccctggccaaggcgctggccccccaatctcaggcagttggggtgaggccgtgcctctttgggggctaaaggtcttgggtggaggacaggcccctctgctgtgcccctatgccctgtgtgggcccaaccagtggacaatggagtctgggggagggggaaccccggggacatgcccccacccgggaggggccggtaacccctgggctatcttctagacggggcgaaccaggggtcattgacctgccccctgcacagggcagggaccgagtgagccactccttgtcccgagctcccgcccccactgggccctccttcctcctggtgctaatttggggaccccaggggccgcccccggcctcttctccatcctgcttggaccagggtcctgggtcttcccaaccataccccgagatcaggccccacctgccagctctactgggcttggagcacgtccgggcagtggagggagggacacagcctgggacaggaagcctcttgggttggagcaggagaccctcatttgccacccagaccaatgtgagcctgcccccagccccctctcattggaagtggcaaggggcttccctcctgggggcagctacactcgtccccagaggcacattcgtgcacattctcacagacaccgtctcacacgttggctttggacaaccaggccccaacttggtccctgccctagggacctccagcctggtgcccagtgctcaggccacctcctggtccagtcaccacctgcagcctcggcagggcaggtacaggggccacctcagatgggagcctgggtccctgcctccgctctgcccctgggtggctgggaggagaggccctctcgggggtgacctgggcgtcagccgtggaaccccctcctcctccctggagtctgcctgagtccctcgagccgcgagccttcgctgaagtgcccttgctataaccccctctgcttctggtgtgtgacgaggcccccgatgttcttgattttcccagagaagcaaataaacagcgtgaacagccccagttcctggagttcttgcctttcaacctggcgaggaaggcgtggccaggccagggggtggggcctgccggcctttgagccattaaagggaggctgagcagggttgcggtgtgctggcttcacctgcctgcacccgctcaccctgagcgccttggggtggtgggaggcgctggaatccccactgtgcaggtaaggcctggctgtaaggggctgctgtgggggggcaggactggcttcccggggggccctcgggttctgcggccgc

SEQ ID NO: 27147 - protein, 387 aa, Homo sapiens; identical to SEQ ID NO: 3659

SEQ ID NO: 27148 - DNA, 2599 bp, Homo sapiens
gtgcacagcccaggagtgttgagcaatttcggtttcctctgaggttgaaggacccaggcgtgtcagccctgctccagacaccttgggcatggaggagagtgtcgtacggccctcagtgtttgtggtggatggacagaccgacatcccattcacgaggctgggacgaagccaccggagacagtcgtgcagtgtggcccgggtgggtctgggtctcttgctgttgctgatgggggccgggctggccgtccaaggctggttcctcctgcagctgcactggcgtctaggagagatggtcacccgcctgcctgacggacctgcaggctcctgggagcagctgatacaagagcgaaggtctcacgaggtcaacccagcagcgcatctcacaggggccaactccagcttgaccggcagcggggggccgctgttatgggagactcagctgggcctggccttcctgaggggcctcagctaccacgatggggcccttgtggtcaccaaagctggctactactacatctactccaaggtgcagctgggcggtgtgggctgcccgctgggcctggccagcaccatcacccacggcctctacaagcgcacaccccgctaccccgaggagctggagctgttggtcagccagcagtcaccctgcggacgggccaccagcagctcccgggtctggtgggacagcagcttcctgggtggtgtggtacacctggaggctggggagaaggtggtcgtccgtgtgctggatgaacgcctggttcgactgcgtgatggtacccggtcttacttcggggctttcatggtgtgaaggaaggagcgtggtgcattggacatgggtctgacacgtggagaactcagagggtgcctcaggggaaagaaaactcacgaagcagaggctgggcgtggtggctctcgcctgtaatcccagcactttgggaggccaaggcaggcggatcacctgaggtcaggagttcgagaccagcctggctaacatggcaaaaccccatctctactaaaaatacaaaaattagccggacgtggtggtgcctgcctgtaatccagctactcaggaggctgaggcaggataattttgcttaaacccgggaggcggaggttgcagtgagccgagatcacaccactgcactccaacctgggaaacgcagtgagactgtgcctcaaaaaaaagaaaggaagaaaaaagaaaactcaggaaacagatcttgggggacactccagggaacccaaaactcaaaggcggagagctcagtgggcaccaccaaggcgagatgaagccccagcaggcaccttcagaagacccacgtagactgcagaccctgccacggacaatactaaggacaaaaacccagagacttggggtctgtgggcccccaaacatggggtaaagttgatttgcctgatattcaggaagaaggggtgaggggtgggtatttatgcttttgattcagaagaaagtggggcttgggattccagggacttggctgggggtgggaaacttcatccacttccctactctcatcatgagtacggacagggtgggcgggagactgatcatcgggactcatcatgaagagcccagccccaccccacatactcagatcccacccacagactggtggccacacctcagcctggtcacaaagagttacactcagatacatgagcacggcagcgtgctcataactgtttaacaaccagctgtcctgggagggggacagctttgtaatgtttgccaatttccatggtgtaaatgctaccaccatggctgatttcatcactgccaagcatagacatccctaataggacaccacggatctgtccccggcatccggcccagggcctggcacaaagcatgctctagggaaatgcttgctgattgaaaggaaggaagaatgactctacagtcacacctatggcatcccacaaaatctgtcacatggctgcataatctcagccactctttcacaactatagactcatacacgcgaagtgccagattcatgcacaaccacacaatcacatggaagtcacagacggcatcacagacagtcacagcactgtgtgtatgttataacacaagcacacaaaactcagacagcatcccagctacacagccactcccagaggtgtcaccgtcacacttggtaattaatactcattacattagacacagacagaccaagttatagtcagacctggttacacacatacacacacacaatatcaccatgacaaatacacattacacacacacaacatcacaatgacaaacacacattacacacacaacatcacgatgacaaacacacattacacacacaacatcacgatgacaaacacacattacacacacatcacaatgacaaacacaacattacacacacacaacatcacaatgacacacacatcacacacacatcacaatgacaaacacacaacattacacacatatacacacagcctgagggccctccccagcccagactaacacatctcggggtgaggaccagaccttgttcataaccctgggcctcttaaccactgatctttgaaataaatggcaaatagttgtacctgg

SEQ ID NO: 27149 - protein, 240 aa, Homo sapiens; identical to SEQ ID NO: 3661

SEQ ID NO: 27150 - DNA, 2785 bp, Homo sapiens
cgagactccatctcaaaaacaaaacaaataaacgaacaaaaaaacccacaacgtattattttcttgtttacgaggtttcttgtctctctggctccaccagaagaggagcagggacccttcttgctgttgttcattgctgcatcccccacaccgagagcagagcctggcatgggcagaaagtcctcagtcgatatttggtggccccaagcgaatgaagcatccaagaagggaaagctgggggctccccactgcacttgccacctgagtcacattttcagaagcctctggaaagtcgtgcacagcccaggagtgttgagcaatttcggtttcctctgaggttgaaggacccaggcgtgtcagccctgctccagacaccttgggcatggaggagagtgtcgtacggccctcagtgtttgtggtggatggacagaccgacatcccattcacgaggctgggacgaagccaccggagacagtcgtgcagtgtggcccgggacggacctgcaggctcctgggagcagctgatacaagagcgaaggtctcacgaggtcaacccagcagcgcatctcacaggggccaactccagcttgaccggcagcggggggccgctgttatgggagactcagctgggcctggccttcctgaggggcctcagctaccacgatggggcccttgtggtcaccaaagctggctactactacatctactccaaggtgcagctgggcggtgtgggctgcccgctgggcctggccagcaccatcacccacggcctctacaagcgcacaccccgctaccccgaggagctggagctgttggtcagccagcagtcaccctgcggacgggccaccagcagctcccgggtctggtgggacagcagcttcctgggtggtgtggtacacctggaggctggggagaaggtggtcgtccgtgtgctggatgaacgcctggttcgactgcgtgatggtacccggtcttacttcggggctttcatggtgtgaaggaaggagcgtggtgcattggacatgggtctgacacgtggagaactcagagggtgcctcaggggaaagaaaactcacgaagcagaggctgggcgtggtggctctcgcctgtaatcccagcactttgggaggccaaggcaggcggatcacctgaggtcaggagttcgagaccagcctggctaacatggcaaaaccccatctctactaaaaatacaaaaattagccggacgtggtggtgcctgcctgtaatccagctactcaggaggctgaggcaggataattttgcttaaacccgggaggcggaggttgcagtgagccgagatcacaccactgcactccaacctgggaaacgcagtgagactgtgcctcaaaaaaaagaaaggaagaaaaaagaaaactcaggaaacagatcttgggggacactccagggaacccaaaactcaaaggcggagagctcagtgggcaccaccaaggcgagatgaagccccagcaggcaccttcagaagacccacgtagactgcagaccctgccacggacaatactaaggacaaaaacccagagacttggggtctgtgggcccccaaacatggggtaaagttgatttgcctgatattcaggaagaaggggtgaggggtgggtatttatgcttttgattcagaagaaagtggggcttgggattccagggacttggctgggggtgggaaacttcatccacttccctactctcatcatgagtacggacagggtgggcgggagactgatcatcgggactcatcatgaagagcccagccccaccccacatactcagatcccacccacagactggtggccacacctcagcctggtcacaaagagttacactcagatacatgagcacggcagcgtgctcataactgtttaacaaccagctgtcctgggagggggacagctttgtaatgtttgccaatttccatggtgtaaatgctaccaccatggctgatttcatcactgccaagcatagacatccctaataggacaccacggatctgtccccggcatccggcccagggcctggcacaaagcatgctctagggaaatgcttgctgattgaaaggaaggaagaatgactctacagtcacacctatggcatcccacaaaatctgtcacatggctgcataatctcagccactctttcacaactatagactcatacacgcgaagtgccagattcatgcacaaccacacaatcacatggaagtcacagacggcatcacagacagtcacagcactgtgtgtatgttataacacaagcacacaaaactcagacagcatcccagctacacagccactcccagaggtgtcaccgtcacacttggtaattaatactcattacattagacacagacagaccaagttatagtcagacctggttacacacatacacacacacaatatcaccatgacaaatacacattacacacacacaacatcacaatgacaaacacacattacacacacaacatcacgatgacaaacacacattacacacacaacatcacgatgacaaacacacattacacacacatcacaatgacaaacacaacattacacacacacaacatcacaatgacacacacatcacacacacatcacaatgacaaacacacaacattacacacatatacacacagcctgagggccctccccagcccagactaacacatctcggggtgaggaccagaccttgttcataaccctgggcctcttaaccactgatctttgaaataaatggcaaatagttgtacctgg

SEQ ID NO: 27151 - protein, 204 aa, Homo sapiens
MEESVVRPSVFVVDGQTDIPFTRLGRSHRRQSCSVARDGPAGSWEQLIQERRSHEVNPAAHLTGANSSLTGSGGPLLWETQLGLAFLRGLSYHDGALVVTKAGYYYIYSKVQLGGVGCPLGLASTITHGLYKRTPRYPEELELLVSQQSPCGRATSSSRVWWDSSFLGGVVHLEAGEKVVVRVLDERLVRLRDGTRSYFGAFMV

SEQ ID NO: 27152 - DNA, 1474 bp, Homo sapiens
cgagactccatctcaaaaacaaaacaaataaacgaacaaaaaaacccacaacgtattattttcttgtttacgaggtttcttgtctctctggctccaccagaagaggagcagggacccttcttgctgttgttcattgctgcatcccccacaccgagagcagagcctggcatgggcagaaagtcctcagtcgatatttggtggccccaagcgaatgaagcatccaagaagggaaagctgggggctccccactgcacttgccacctgagtcacattttcagaagcctctggaaagtcgtgcacagcccaggagtgttgagcaatttcggtttcctctgaggttgaaggacccaggcgtgtcagccctgctccagacaccttgggcatggaggagagtgtcgtacggccctcagtgtttgtggtggatggacagaccgacatcccattcacgaggctgggacgaagccaccggagacagtcgtgcagtgtggcccgggtgggtctgggtctcttgctgttgctgatgggggccgggctggccgtccaaggctggttcctcctgcagctgcactggcgtctaggagagatggtcacccgcctgcctgacggacctgcaggctcctgggagcagctgatacaagagcgaaggtctcacgaggtcaacccagcagcgcatctcacaggggccaactccagcttgaccggcagcggggggccgctgttatgggagactcagctgggcctggccttcctgaggggcctcagctaccacgatggggcccttgtggtcaccaaagctggctactactacatctactccaaggtgcagctgggcggtgtgggctgcccgctgggcctggccagcaccatcacccacggcctctacaagcgcacaccccgctaccccgaggagctggagctgttggtcagccagcagtcaccctgcggacgggccaccagcagctcccgggtctggtgggacagcagcttcctgggtggtgtggtacacctggaggctggggagaaggtggtcgtccgtgtgctggatgaacgcctggttcgactgcgtgatggtacccggtcttacttcggggctttcatggtgtgaaggaaggagcgtggtgcattggacatgggtctgacacgtggagaactcagagggtgcctcaggggaaagaaaactcacgaagcagaggctgggcgtggtggctctcgcctgtaatcccagcactttgggaggccaaggcaggcggatcacctgaggtcaggagttcgagaccagcctggctaacatggcaaaaccccatctctactaaaaatacaaaaattagccggacgtggtggtgcctgcctgtaatccagctactcaggaggctgaggcaggataattttgcttaaacccgggaggcggaggttgcagtgagccgagatcacaccactgcactccaacctgggaaacgcagtgagactgtgcctc

SEQ ID NO: 27153 - protein, 240 aa, Homo sapiens; identical to SEQ ID NO: 3661

SEQ ID NO: 27154 - DNA, 555 bp, Homo sapiens
caggggtatgggcgaaatagattcacagtctaccctactccatccagctcctaaatgacaaagcctcctgtcaaatgccttgcaactcactggctatcccggctgatatctgccaagaccaccactctacttcacatccttcttctcatttcttttttcttttcttattcattcctcctttcttttctttctcttttttttttttctgtcccccaggcggagggttgcagtgagctgagatcgggccactgcactacagcctggacaacaaagcgagactccatcccccacaccggctcccccaaaaagaagacagtgtggaatggattttggatggtgaggatgtccaaaaagaaaagttcacccatgcagtgggtccagcggttaagaagatcacttagattgagtggcatgagggctaacttatgtgataacaaagctaggctatatgaagtcatttggtaaaacactagtctaaatgttgctagaaaggtattttagccgggcacagtggctcacgcctgtaatcccagcactttgggaggctgaggtggg

SEQ ID NO: 27155 - protein, 136 aa, Homo sapiens
MTKPPVKCLATHWLSRLISAKTTTLLHILLLISFFFSYSFLLSFLSLFFFSVPQAEGCSELRSGHCTTAWTTKRDSIPHTGSPKKKTVWNGFWMVRMSKKKSSPMQWVQRLRRSLRLSGMRANLCDNKARLYEVIW

SEQ ID NO: 27156 - DNA, 765 bp, Homo sapiens
agccaacctagggcctggggtctgatggttccaggggcctgagagtcccagaggaaagctgtacccggttctaccatccggaaaaggaggatggaaagctgaacaagctctgccgtgatgaactgtgccgctgtgctgaggagaattgcttcatacaaaagtcggatgacaaggtcaccctggaagaacggctggacaaggcctgtgagccaggagtggactatgtgtacaagacccgactggtcaaggttcagctgtccaatgactttgacgagtacatcatggccattgagcagaccatcaagtcaggctcggatgaggtgcaggttggacagcagcgcacgttcatcagccccatcaagtgcagagaagccctgaagctggaggagaagaaacactacctcatgtggggtctctcctccgatttctggggagagaagcccaacctcagctacatcatcgggaaggacacttgggtggagcactggcccgaggaggacgaatgccaagacgaagagaaccagaaacaatgccaggacctcggcgccttcaccgagagcatggttgtctttgggtgccccaactgaccacacccccattcccccactccagataaagcttcagttatatctcacgtgtctggagttctttgccaagagggagaggctgaaatccccagccgcctcacctgcagctcagctccatcctacttgaaacctcacctgttcccaccgcattttctcctggcgttcgcctgctagtgtg

SEQ ID NO: 27157 - protein, 101 aa, Homo sapiens
MAIEQTIKSGSDEVQVGQQRTFISPIKCREALKLEEKKHYLMWGLSSDFWGEKPNLSYIIGKDTWVEHWPEEDECQDEENQKQCQDLGAFTESMVVFGCPN

SEQ ID NO: 27158 - DNA, 2129 bp, Homo sapiens
attgagatgcaaggtgtatttgttgttttttttttcctttgtatgacacttacggagagtactttagttcaaaaaaatgcttgccttcttctctttgtataatttacaacatggagtaaacatcttttctatgccttagtaccttgtcttgctcctttctaagtttggatcagcttccaatattttatcctttgagctttccatgacacaaaattcctccaagagttcctttaaagtgactttgtattctataatgtcccttcctctgggacatcttcatcctttttgtccccatgaccttccttatttatgctaatacatttgccttccctgagttcctctacactacctatctctcaaatggcagcagggtcaacatcaccatagtctgctattctttgataactccatttatgctgtctttgaagttcacttctggcattatcacttttcatttctttgctgcatttttatctttgttggccagttccctcttttcgtgatacattgttgtaaaatctcatgggagttagccacctggagacagggaggcaacagaactacacactttgctgtctgtgcataaattgaagagcagaagctcagtgaccaatcactgatggactttgaaaggagtgacagtaattggccctcaattatgatgcttatcttttatttatgtcgtgatttctagactgaagagttagcaacaaagtttataccatatgcaactactcgtgatcaatataccaaggtactgaaaaagaaccatgtcactgggctactagtgttatttaactgaatcatgcagagtgagggctgcctgtattcttgccttgttttctagaactgaagcatggagggtcaaataatgcatccaatgttatttagagctggaatttgaatccatgcagttgggtgcagagtctgagctcttaatcaccttgaccattacattaccttgctttttatttcctttggggaaatgtttcctaaaaaatgtaacgcccctctgtgctgctatgtgggaatcagaagtctcagtgcctgatcagacctccttgtccaggaacagacccttggggctgacccctccttgggacccaatgcccttctttctgcactatccaggtaccggggagaccaggatgccactatgtctatattggacatatccatgatgactggctttgctccagacacagatgacctgaagcagctggccaatggtgttgacagatacatctccaagtatgagctggacaaagccttctccgataggaacaccctcatcatctacctggacaaggtctcacactctgaggatgactgtctagctttcaaagttcaccaatactttaatgtagagcttatccagcctggagcagtcaaggtctacgcctattacaacctggaggaaagctgtacccggttctaccatccggaaaaggaggatggaaagctgaacaagctctgccgtgatgaactgtgccgctgtgctgaggagaattgcttcatacaaaagtcggatgacaaggtcaccctggaagaacggctggacaaggcctgtgagccaggagtggactatgtgtacaagacccgactggtcaaggttcagctgtccaatgactttgacgagtacatcatggccattgagcagaccatcaagtcaggctcggatgaggtgcaggttggacagcagcgcacgttcatcagccccatcaagtgcagagaagccctgaagctggaggagaagaaacactacctcatgtggggtctctcctccgatttctggggagagaagcccaacctcagctacatcatcgggaaggacacttgggtggagcactggcccgaggaggacgaatgccaagacgaagagaaccagaaacaatgccaggacctcggcgccttcaccgagagcatggttgtctttgggtgccccaactgaccacacccccattcccccactccagataaagcttcagttatatctcacgtgtctggagttctttgccaagagggagaggctgaaatccccagccgcctcacctgcagctcagctccatcctacttgaaacctcacctgttcccaccgcattttctcctggcgttcgcctgctagtgtg

SEQ ID NO: 27159 - protein, 264 aa, Homo sapiens [sequence omitted]

SEQ ID NO: 27160 - DNA, 5231 bp, Homo sapiens
actcctccccatcctctccctctgtccctctgtccctctgaccctgcactgtcccagcaccatgggacccacctcaggtcccagcctgctgctcctgctactaacccacctccccctggctctggggagtcccatgtactctatcatcacccccaacatcttgcggctggagagcgaggagaccatggtgctggaggcccacgacgcgcaaggggatgttccagtcactgttactgtccacgacttcccaggcaaaaaactagtgctgtccagtgagaagactgtgctgacccctgccaccaaccacatgggcaacgtcaccttcacgatcccagccaacagggagttcaagtcagaaaaggggcgcaacaagttcgtgaccgtgcaggccaccttcgggacccaagtggtggagaaggtggtgctggtcagcctgcagagcgggtacctcttcatccagacagacaagaccatctacacccctggctccacagttctctatcggatcttcaccgtcaaccacaagctgctacccgtgggccggacggtcatggtcaacattgagaacccggaaggcatcccggtcaagcaggactccttgtcttctcagaaccagcttggcgtcttgcccttgtcttgggacattccggaactcgtcaacatgggccagtggaagatccgagcctactatgaaaactcaccacagcaggtcttctccactgagtttgaggtgaaggagtacgtgctgcccagtttcgaggtcatagtggagcctacagagaaattctactacatctataacgagaagggcctggaggtcaccatcaccgccaggttcctctacgggaagaaagtggagggaactgcctttgtcatcttcgggatccaggatggcgaacagaggatttccctgcctgaatccctcaagcgcattccgattgaggatggctcgggggaggttgtgctgagccggaaggtactgctggacggggtgcagaacccccgagcagaagacctggtggggaagtctttgtacgtgtctgccaccgtcatcttgcactcaggcagtgacatggtgcaggcagagcgcagcgggatccccatcgtgacctctccctaccagatccacttcaccaagacacccaagtacttcaaaccaggaatgccctttgacctcatggtgttcgtgacgaaccctgatggctctccagcctaccgagtccccgtggcagtccagggcgaggacactgtgcagtctctaacccagggagatggcgtggccaaactcagcatcaacacacaccccagccagaagcccttgagcatcacggtgcgcacgaagaagcaggagctctcggaggcagagcaggctaccaggaccatgcaggctctgccctacagcaccgtgggcaactccaacaattacctgcatctctcagtgctacgtacagagctcagacccggggagaccctcaacgtcaacttcctcctgcgaatggaccgcgcccacgaggccaagatccgctactacacctacctgatcatgaacaagggcaggctgttgaaggcgggacgccaggtgcgagagcccggccaggacctggtggtgctgcccctgtccatcaccaccgacttcatcccttccttccgcctggtggcgtactacacgctgatcggtgccagcggccagagggaggtggtggccgactccgtgtgggtggacgtcaaggactcctgcgtgggctcgctggtggtaaaaagcggccagtcagaagaccggcagcctgtacctgggcagcagatgaccctgaagatagagggtgaccacggggcccgggtggtactggtggccgtggacaagggcgtgttcgtgctgaataagaagaacaaactgacgcagagtaagatctgggacgtggtggagaaggcagacatcggctgcaccccgggcagtgggaaggattacgccggtgtcttctccgacgcagggctgaccttcacgagcagcagtggccagcagaccgcccagagggcagaacttcagtgcccgcagccagccgcccgccgacgccgttccgtgcagctcacggagaagcgaatggacaaagtcggcaagtaccccaaggagctgcgcaagtgctgcgaggacggcatgcgggagaaccccatgaggttctcgtgccagcgccggacccgtttcatctccctgggcgaggcgtgcaagaaggtcttcctggactgctgcaactacatcacagagctgcggcggcagcacgcgcgggccagccacctgggcctggccaggagtaacctggatgaggacatcattgcagaagagaacatcgtttcccgaagtgagttcccagagagctggctgtggaacgttgaggacttgaaagagccaccgaaaaatggaatctctacgaagctcatgaatatatttttgaaagactccatcaccacgtgggagattctggctgtgagcatgtcggacaagaaagggatctgtgtggcagaccccttcgaggtcacagtaatgcaggacttcttcatcgacctgcggctaccctactctgttgttcgaaacgagcaggtggaaatccgagccgttctctacaattaccggcagaaccaagagctcaaggtgagggtggaactactccacaatccagccttctgcagcctggccaccaccaagaggcgtcaccagcagaccgtaaccatcccccccaagtcctcgttgtccgttccatatgtcatcgtgccgctaaagaccggcctgcaggaagtggaagtcaaggctgctgtctaccatcatttcatcagtgacggtgtcaggaagtccctgaaggtcgtgccggaaggaatcagaatgaacaaaactgtggctgttcgcaccctggatccagaacgcctgggccgtgaaggagtgcagaaagaggacatcccacctgcagacctcagtgaccaagtcccggacaccgagtctgagaccagaattctcctgcaagggaccccagtggcccagatgacagaggatgccgtcgacgcggaacggctgaagcacctcattgtgaccccctcgggctgcggggaacagaacatgatcggcatgacgcccacggtcatcgctgtgcattacctggatgaaacggagcagtgggagaagttcggcctagagaagcggcagggggccttggagctcatcaagaaggggtacacccagcagctggccttcagacaacccagctctgcctttgcggccttcgtgaaacgggcacccagcacctggctgaccgcctacgtggtcaaggtcttctctctggctgtcaacctcatcgccatcgactcccaagtcctctgcggggctgttaaatggctgatcctggagaagcagaagcccgacggggtcttccaggaggatgcgcccgtgatacaccaagaaatgattggtggattacggaacaacaacgagaaagacatggccctcacggcctttgttctcatctcgctgcaggaggctaaagatatttgcgaggagcaggtcaacagcctgccaggcagcatcactaaagcaggagacttccttgaagccaactacatgaacctacagagatcctacactgtggccattgctggctatgctctggcccagatgggcaggctgaaggggcctcttcttaacaaatttctgaccacagccaaagataagaaccgctgggaggaccctggtaagcagctctacaacgtggaggccacatcctatgccctcttggccctactgcagctaaaagactttgactttgtgcctcccgtcgtgcgttggctcaatgaacagagatactacggtggtggctatggctctacccaggccaccttcatggtgttccaagccttggctcaataccaaaaggacgcccctgaccaccaggaactgaaccttgatgtgtccctccaactgcccagccgcagctccaagatcacccaccgtatccactgggaatctgccagcctcctgcgatcagaagagaccaaggaaaatgagggtttcacagtcacagctgaaggaaaaggccaaggcaccttgtcggtggtgacaatgtaccatgctaaggccaaagatcaactcacctgtaataaattcgacctcaaggtcaccataaaaccagcaccggaaacagaaaagaggcctcaggatgccaagaacactatgatccttgagatctgtaccaggtaccggggagaccaggatgccactatgtctatattggacatatccatgatgactggctttgctccagacacagatgacctgaagcagctggccaatggtgttgacagatacatctccaagtatgagctggacaaagccttctccgataggaacaccctcatcatctacctggacaaggtctcacactctgaggatgactgtctagctttcaaagttcaccaatactttaatgtagagcttatccagcctggagcagtcaaggtctacgcctattacaacctggaggaaagctgtacccggttctaccatccggaaaaggaggatggaaagctgaacaagctctgccgtgatgaactgtgccgctgtgctgaggagaattgcttcatacaaaagtcggatgacaaggtcaccctggaagaacggctggacaaggcctgtgagccaggagtggactatgtgtacaagacccgactggtcaaggttcagctgtccaatgactttgacgagtacatcatggccattgagcagaccatcaagtcaggctcggatgaggtgcaggttggacagcagcgcacgttcatcagccccatcaagtgcagagaagccctgaagctggaggagaagaaacactacctcatgtggggtctctcctccgatttctggggagagaagcccaacctcagctacatcatcgggaaggacacttgggtggagcactggcccgaggaggacgaatgccaagacgaagagaaccagaaacaatgccaggacctcggcgccttcaccgagagcatggttgtctttgggtgccccaactgaccacacccccattcccccactccagataaagcttcagttatatctcacgtgtctggagttctttgccaagagggagaggctgaaatccccagccgcctcacctgcagctcagctccatcctacttgaaacctcacctgttcccaccgcattttctcctggcgttcgcctgctagtgtg

SEQ ID NO: 27161 - protein, 1663 aa, Homo sapiens
MGPTSGPSLLLLLLTHLPLALGSPMYSIITPNILRLESEETMVLEAHDAQGDVPVTVTVHDFPGKKLVLSSEKTVLTPATNHMGNVTFTIPANREFKSEKGRNKFVTVQATFGTQVVEKVVLVSLQSGYLFIQTDKTIYTPGSTVLYRIFTVNHKLLPVGRTVMVNIENPEGIPVKQDSLSSQNQLGVLPLSWDIPELVNMGQWKIRAYYENSPQQVFSTEFEVKEYVLPSFEVIVEPTEKFYYIYNEKGLEVTITARFLYGKKVEGTAFVIFGIQDGEQRISLPESLKRIPIEDGSGEVVLSRKVLLDGVQNPRAEDLVGKSLYVSATVILHSGSDMVQAERSGIPIVTSPYQIHFTKTPKYFKPGMPFDLMVFVTNPDGSPAYRVPVAVQGEDTVQSLTQGDGVAKLSINTHPSQKPLSITVRTKKQELSEAEQATRTMQALPYSTVGNSNNYLHLSVLRTELRPGETLNVNFLLRMDRAHEAKIRYYTYLIMNKGRLLKAGRQVREPGQDLVVLPLSITTDFIPSFRLVAYYTLIGASGQREVVADSVWVDVKDSCVGSLVVKSGQSEDRQPVPGQQMTLKIEGDHGARVVLVAVDKGVFVLNKKNKLTQSKIWDVVEKADIGCTPGSGKDYAGVFSDAGLTFTSSSGQQTAQRAELQCPQPAARRRRSVQLTEKRMDKVGKYPKELRKCCEDGMRENPMRFSCQRRTRFISLGEACKKVFLDCCNYITELRRQHARASHLGLARSNLDEDIIAEENIVSRSEFPESWLWNVEDLKEPPKNGISTKLMNIFLKDSITTWEILAVSMSDKKGICVADPFEVTVMQDFFIDLRLPYSVVRNEQVEIRAVLYNYRQNQELKVRVELLHNPAFCSLATTKRRHQQTVTIPPKSSLSVPYVIVPLKTGLQEVEVKAAVYHHFISDGVRKSLKVVPEGIRMNKTVAVRTLDPERLGREGVQKEDIPPADLSDQVPDTESETRILLQGTPVAQMTEDAVDAERLKHLIVTPSGCGEQNMIGMTPTVIAVHYLDETEQWEKFGLEKRQGALELIKKGYTQQLAFRQPSSAFAAFVKRAPSTWLTAYVVKVFSLAVNLIAIDSQVLCGAVKWLILEKQKPDGVFQEDAPVIHQEMIGGLRNNNEKDMALTAFVLISLQEAKDICEEQVNSLPGSITKAGDFLEANYMNLQRSYTVAIAGYALAQMGRLKGPLLNKFLTTAKDKNRWEDPGKQLYNVEATSYALLALLQLKDFDFVPPVVRWLNEQRYYGGGYGSTQATFMVFQALAQYQKDAPDHQELNLDVSLQLPSRSSKITHRIHWESASLLRSEETKENEGFTVTAEGKGQGTLSVVTMYHAKAKDQLTCNKFDLKVTIKPAPETEKRPQDAKNTMILEICTRYRGDQDATMSILDISMMTGFAPDTDDLKQLANGVDRYISKYELDKAFSDRNTLIIYLDKVSHSEDDCLAFKVHQYFNVELIQPGAVKVYAYYNLEESCTRFYHPEKEDGKLNKLCRDELCRCAEENCFIQKSDDKVTLEERLDKACEPGVDYVYKTRLVKVQLSNDFDEYIMAIEQTIKSGSDEVQVGQQRTFISPIKCREALKLEEKKHYLMWGLSSDFWGEKPNLSYIIGKDTWVEHWPEEDECQDEENQKQCQDLGAFTESMVVFGCPN

SEQ ID NO: 27162 - DNA, 368 bp, Homo sapiens
tcctccccacgactcagcttcttccctctcccctccactccaggctcggatgaggtgcaggttggacagcagcgcacgttcatcagccccatcaagtgcagagaagccctgaagctggaggagaagaaacactacctcatgtggggtctctcctccgatttctggggagagaagcccaacctcagctacatcatcgggaaggacacttgggtggagcactggcccgaggaggacgaatgccaagacgaagagaaccagaaacaatgccaggacctcggcgccttcaccgagagcatggttgtctttgggtgccccaactgaccacacccccattcccccactccagataaagcttcagttatatctca

SEQ ID NO: 27163 - protein, 60 aa, Homo sapiens
MWGLSSDFWGEKPNLSYIIGKDTWVEHWPEEDECQDEENQKQCQDLGAFTESMVVFGCPN

SEQ ID NO: 27164 - DNA, 633 bp, Homo sapiens
agccaacctagggcctggggtctgatggttccaggggcctgagagtcccagaggaaagctgtacccggttctaccatccggaaaaggaggatggaaagctgaacaagctctgccgtgatgaactgtgccgctgtgctgaggagaattgcttcatacaaaagtcggatgacaaggtcaccctggaagaacggctggacaaggcctgtgagccaggagtggactatgtgtacaagacccgactggtcaaggttcagctgtccaatgactttgacgagtacatcatggccattgagcagaccatcaagtcaggctcggatgaggtgcaggttggacagcagcgcacgttcatcagccccatcaagtgcagagaagccctgaagctggaggagaagaaacactacctcatgtggggtctctcctccgatttctggggagagaagcccaacctcagctacatcatcgggaaggacacttgggtggagcactggcccgaggaggacgaatgccaagacgaagagaaccagaaacaatgccaggacctcggcgccttcaccgagagcatggttgtctttgggtgccccaactgaccacacccccattcccccactccagataaagcttcagttatatctc

SEQ ID NO: 27165 - protein, 101 aa, Homo sapiens; identical to SEQ ID NO: 27157

SEQ ID NO: 27166 - DNA, 1997 bp, Homo sapiens
attgagatgcaaggtgtatttgttgttttttttttcctttgtatgacacttacggagagtactttagttcaaaaaaatgcttgccttcttctctttgtataatttacaacatggagtaaacatcttttctatgccttagtaccttgtcttgctcctttctaagtttggatcagcttccaatattttatcctttgagctttccatgacacaaaattcctccaagagttcctttaaagtgactttgtattctataatgtcccttcctctgggacatcttcatcctttttgtccccatgaccttccttatttatgctaatacatttgccttccctgagttcctctacactacctatctctcaaatggcagcagggtcaacatcaccatagtctgctattctttgataactccatttatgctgtctttgaagttcacttctggcattatcacttttcatttctttgctgcatttttatctttgttggccagttccctcttttcgtgatacattgttgtaaaatctcatgggagttagccacctggagacagggaggcaacagaactacacactttgctgtctgtgcataaattgaagagcagaagctcagtgaccaatcactgatggactttgaaaggagtgacagtaattggccctcaattatgatgcttatcttttatttatgtcgtgatttctagactgaagagttagcaacaaagtttataccatatgcaactactcgtgatcaatataccaaggtactgaaaaagaaccatgtcactgggctactagtgttatttaactgaatcatgcagagtgagggctgcctgtattcttgccttgttttctagaactgaagcatggagggtcaaataatgcatccaatgttatttagagctggaatttgaatccatgcagttgggtgcagagtctgagctcttaatcaccttgaccattacattaccttgctttttatttcctttggggaaatgtttcctaaaaaatgtaacgcccctctgtgctgctatgtgggaatcagaagtctcagtgcctgatcagacctccttgtccaggaacagacccttggggctgacccctccttgggacccaatgcccttctttctgcactatccaggtaccggggagaccaggatgccactatgtctatattggacatatccatgatgactggctttgctccagacacagatgacctgaagcagctggccaatggtgttgacagatacatctccaagtatgagctggacaaagccttctccgataggaacaccctcatcatctacctggacaaggtctcacactctgaggatgactgtctagctttcaaagttcaccaatactttaatgtagagcttatccagcctggagcagtcaaggtctacgcctattacaacctggaggaaagctgtacccggttctaccatccggaaaaggaggatggaaagctgaacaagctctgccgtgatgaactgtgccgctgtgctgaggagaattgcttcatacaaaagtcggatgacaaggtcaccctggaagaacggctggacaaggcctgtgagccaggagtggactatgtgtacaagacccgactggtcaaggttcagctgtccaatgactttgacgagtacatcatggccattgagcagaccatcaagtcaggctcggatgaggtgcaggttggacagcagcgcacgttcatcagccccatcaagtgcagagaagccctgaagctggaggagaagaaacactacctcatgtggggtctctcctccgatttctggggagagaagcccaacctcagctacatcatcgggaaggacacttgggtggagcactggcccgaggaggacgaatgccaagacgaagagaaccagaaacaatgccaggacctcggcgccttcaccgagagcatggttgtctttgggtgccccaactgaccacacccccattcccccactccagataaagcttcagttatatctc

SEQ ID NO: 27167 - protein, 264 aa, Homo sapiens [sequence omitted]

SEQ ID NO: 27168 - DNA, 5099 bp, Homo sapiens
actcctccccatcctctccctctgtccctctgtccctctgaccctgcactgtcccagcaccatgggacccacctcaggtcccagcctgctgctcctgctactaacccacctccccctggctctggggagtcccatgtactctatcatcacccccaacatcttgcggctggagagcgaggagaccatggtgctggaggcccacgacgcgcaaggggatgttccagtcactgttactgtccacgacttcccaggcaaaaaactagtgctgtccagtgagaagactgtgctgacccctgccaccaaccacatgggcaacgtcaccttcacgatcccagccaacagggagttcaagtcagaaaaggggcgcaacaagttcgtgaccgtgcaggccaccttcgggacccaagtggtggagaaggtggtgctggtcagcctgcagagcgggtacctcttcatccagacagacaagaccatctacacccctggctccacagttctctatcggatcttcaccgtcaaccacaagctgctacccgtgggccggacggtcatggtcaacattgagaacccggaaggcatcccggtcaagcaggactccttgtcttctcagaaccagcttggcgtcttgcccttgtcttgggacattccggaactcgtcaacatgggccagtggaagatccgagcctactatgaaaactcaccacagcaggtcttctccactgagtttgaggtgaaggagtacgtgctgcccagtttcgaggtcatagtggagcctacagagaaattctactacatctataacgagaagggcctggaggtcaccatcaccgccaggttcctctacgggaagaaagtggagggaactgcctttgtcatcttcgggatccaggatggcgaacagaggatttccctgcctgaatccctcaagcgcattccgattgaggatggctcgggggaggttgtgctgagccggaaggtactgctggacggggtgcagaacccccgagcagaagacctggtggggaagtctttgtacgtgtctgccaccgtcatcttgcactcaggcagtgacatggtgcaggcagagcgcagcgggatccccatcgtgacctctccctaccagatccacttcaccaagacacccaagtacttcaaaccaggaatgccctttgacctcatggtgttcgtgacgaaccctgatggctctccagcctaccgagtccccgtggcagtccagggcgaggacactgtgcagtctctaacccagggagatggcgtggccaaactcagcatcaacacacaccccagccagaagcccttgagcatcacggtgcgcacgaagaagcaggagctctcggaggcagagcaggctaccaggaccatgcaggctctgccctacagcaccgtgggcaactccaacaattacctgcatctctcagtgctacgtacagagctcagacccggggagaccctcaacgtcaacttcctcctgcgaatggaccgcgcccacgaggccaagatccgctactacacctacctgatcatgaacaagggcaggctgttgaaggcgggacgccaggtgcgagagcccggccaggacctggtggtgctgcccctgtccatcaccaccgacttcatcccttccttccgcctggtggcgtactacacgctgatcggtgccagcggccagagggaggtggtggccgactccgtgtgggtggacgtcaaggactcctgcgtgggctcgctggtggtaaaaagcggccagtcagaagaccggcagcctgtacctgggcagcagatgaccctgaagatagagggtgaccacggggcccgggtggtactggtggccgtggacaagggcgtgttcgtgctgaataagaagaacaaactgacgcagagtaagatctgggacgtggtggagaaggcagacatcggctgcaccccgggcagtgggaaggattacgccggtgtcttctccgacgcagggctgaccttcacgagcagcagtggccagcagaccgcccagagggcagaacttcagtgcccgcagccagccgcccgccgacgccgttccgtgcagctcacggagaagcgaatggacaaagtcggcaagtaccccaaggagctgcgcaagtgctgcgaggacggcatgcgggagaaccccatgaggttctcgtgccagcgccggacccgtttcatctccctgggcgaggcgtgcaagaaggtcttcctggactgctgcaactacatcacagagctgcggcggcagcacgcgcgggccagccacctgggcctggccaggagtaacctggatgaggacatcattgcagaagagaacatcgtttcccgaagtgagttcccagagagctggctgtggaacgttgaggacttgaaagagccaccgaaaaatggaatctctacgaagctcatgaatatatttttgaaagactccatcaccacgtgggagattctggctgtgagcatgtcggacaagaaagggatctgtgtggcagaccccttcgaggtcacagtaatgcaggacttcttcatcgacctgcggctaccctactctgttgttcgaaacgagcaggtggaaatccgagccgttctctacaattaccggcagaaccaagagctcaaggtgagggtggaactactccacaatccagccttctgcagcctggccaccaccaagaggcgtcaccagcagaccgtaaccatcccccccaagtcctcgttgtccgttccatatgtcatcgtgccgctaaagaccggcctgcaggaagtggaagtcaaggctgctgtctaccatcatttcatcagtgacggtgtcaggaagtccctgaaggtcgtgccggaaggaatcagaatgaacaaaactgtggctgttcgcaccctggatccagaacgcctgggccgtgaaggagtgcagaaagaggacatcccacctgcagacctcagtgaccaagtcccggacaccgagtctgagaccagaattctcctgcaagggaccccagtggcccagatgacagaggatgccgtcgacgcggaacggctgaagcacctcattgtgaccccctcgggctgcggggaacagaacatgatcggcatgacgcccacggtcatcgctgtgcattacctggatgaaacggagcagtgggagaagttcggcctagagaagcggcagggggccttggagctcatcaagaaggggtacacccagcagctggccttcagacaacccagctctgcctttgcggccttcgtgaaacgggcacccagcacctggctgaccgcctacgtggtcaaggtcttctctctggctgtcaacctcatcgccatcgactcccaagtcctctgcggggctgttaaatggctgatcctggagaagcagaagcccgacggggtcttccaggaggatgcgcccgtgatacaccaagaaatgattggtggattacggaacaacaacgagaaagacatggccctcacggcctttgttctcatctcgctgcaggaggctaaagatatttgcgaggagcaggtcaacagcctgccaggcagcatcactaaagcaggagacttccttgaagccaactacatgaacctacagagatcctacactgtggccattgctggctatgctctggcccagatgggcaggctgaaggggcctcttcttaacaaatttctgaccacagccaaagataagaaccgctgggaggaccctggtaagcagctctacaacgtggaggccacatcctatgccctcttggccctactgcagctaaaagactttgactttgtgcctcccgtcgtgcgttggctcaatgaacagagatactacggtggtggctatggctctacccaggccaccttcatggtgttccaagccttggctcaataccaaaaggacgcccctgaccaccaggaactgaaccttgatgtgtccctccaactgcccagccgcagctccaagatcacccaccgtatccactgggaatctgccagcctcctgcgatcagaagagaccaaggaaaatgagggtttcacagtcacagctgaaggaaaaggccaaggcaccttgtcggtggtgacaatgtaccatgctaaggccaaagatcaactcacctgtaataaattcgacctcaaggtcaccataaaaccagcaccggaaacagaaaagaggcctcaggatgccaagaacactatgatccttgagatctgtaccaggtaccggggagaccaggatgccactatgtctatattggacatatccatgatgactggctttgctccagacacagatgacctgaagcagctggccaatggtgttgacagatacatctccaagtatgagctggacaaagccttctccgataggaacaccctcatcatctacctggacaaggtctcacactctgaggatgactgtctagctttcaaagttcaccaatactttaatgtagagcttatccagcctggagcagtcaaggtctacgcctattacaacctggaggaaagctgtacccggttctaccatccggaaaaggaggatggaaagctgaacaagctctgccgtgatgaactgtgccgctgtgctgaggagaattgcttcatacaaaagtcggatgacaaggtcaccctggaagaacggctggacaaggcctgtgagccaggagtggactatgtgtacaagacccgactggtcaaggttcagctgtccaatgactttgacgagtacatcatggccattgagcagaccatcaagtcaggctcggatgaggtgcaggttggacagcagcgcacgttcatcagccccatcaagtgcagagaagccctgaagctggaggagaagaaacactacctcatgtggggtctctcctccgatttctggggagagaagcccaacctcagctacatcatcgggaaggacacttgggtggagcactggcccgaggaggacgaatgccaagacgaagagaaccagaaacaatgccaggacctcggcgccttcaccgagagcatggttgtctttgggtgccccaactgaccacacccccattcccccactccagataaagcttcagttatatctc

SEQ ID NO: 27169 - protein, 1663 aa, Homo sapiens; identical to SEQ ID NO: 27161

SEQ ID NO: 27170 - DNA, 353 bp, Homo sapiens
ataactgaagctttatctggagtgggggaatgggggtaggagaatgggaagaaataagagaagggagaggagaaagcccaaatcatggtagagatgaaagagtcagagaatgccagatggagagaaaataacagaagaggtggcaggtgtggtggctcatgcttggaatcccagccctttgggaggctgaggcaggaagatcgcttgaggccagtagtttgagaccaacttgagcaacatatcaagacccccatctctacaaaaaataaaacaatcagctgggtacttacacagaatatttatgaagaaacaagaacaaaaattcagctggggccaggcaccaggggcttatg

SEQ ID NO: 27171 - protein, 33 aa, Homo sapiens [sequence omitted]

SEQ ID NO: 27172 - DNA, 913 bp, Homo sapiens
gatcaatataccaaggtactgaaaaagaaccatgtcactgggctactagtgttatttaactgaatcatgcagagtgagggctgcctgtattcttgccttgttttctagaactgaagcatggagggtcaaataatgcatccaatgttatttagagctggaatttgaatccatgcagttgggtgcagagtctgagctcttaatcaccttgaccattacattaccttgctttttatttcctttggggaaatgtttcctaaaaaatgtaacgcccctctgtgctgctatgtgggaatcagaagtctcagtgcctgatcagacctccttgtccaggaacagacccttggggctgacccctccttgggacccaatgcccttctttctgcactatccaggtaccggggagaccaggatgccactatgtctatattggacatatccatgatgactggctttgctccagacacagatgacctgaagcagctggccaatggtgttgacagatacatctccaagtatgagctggacaaagccttctccgataggaacaccctcatcatctacctggacaaggtctcacactctgaggatgactgtctagctttcaaagttcaccaatactttaatgtagagcttatccagcctggagcagtcaaggtctacgcctattacaacctggaggaaagctgtacccggttctaccatccggaaaagagaattgcttcatacaaaagtcggatgacaaggtcaccctggaagaacggctggacaaggcctgtgagccaggagtggactatgtgtacaagacccgactggtcaaggttcagctgtccaatgactttgacgagtacatcatggccattgagcagaccatcaagtcaggctcggatgaggtgcaggttggacagcagcgcac

SEQ ID NO: 27173 - protein, 164 aa, Homo sapiens
MSILDISMMTGFAPDTDDLKQLANGVDRYISKYELDKAFSDRNTLIIYLDKVSHSEDDCLAFKVHQYFNVELIQPGAVKVYAYYNLEESCTRFYHPEKRIASYKSRMTRSPWKNGWTRPVSQEWTMCTRPDWSRFSCPMTLTSTSWPLSRPSSQARMRCRLDSS

SEQ ID NO: 27174 - DNA, 804 bp, Homo sapiens
gatcaatataccaaggtactgaaaaagaaccatgtcactgggctactagtgttatttaactgaatcatgcagagtgagggctgcctgtattcttgccttgttttctagaactgaagcatggagggtcaaataatgcatccaatgttatttagagctggaatttgaatccatgcagttgggtgcagagtctgagctcttaatcaccttgaccattacattaccttgctttttatttcctttggggaaatgtttcctaaaaaatgtaacgcccctctgtgctgctatgtgggaatcagaagtctcagtgcctgatcagacctccttgtccaggaacagacccttggggctgacccctccttgggacccaatgcccttctttctgcactatccaggtaccggggagaccaggatgccactatgtctatattggacatatccatgatgactggctttgctccagacacagatgacctgaagcagctggccaatggtgttgacagatacatctccaagtatgagctggacaaagccttctccgataggaacaccctcatcatctacctggacaaggtctcacactctgaggatgactgtctagctttcaaagttcaccaatactttaatgtagagcttatccagcctggagcagtcaaggtctacgcctattacaacctggaggaaagctgtacccggttctaccatccggaaaaggaggatggaaagctgaacaagctctgccgtgatgaactgtgccgctgtgctgaggagaattgcttcatacaaaagtcggatgacaaggtcacc

SEQ ID NO: 27175 - protein, 128 aa, Homo sapiens
MSILDISMMTGFAPDTDDLKQLANGVDRYISKYELDKAFSDRNTLIIYLDKVSHSEDDCLAFKVHQYFNVELIQPGAVKVYAYYNLEESCTRFYHPEKEDGKLNKLCRDELCRCAEENCFIQKSDDKV

SEQ ID NO: 27176 - DNA, 2077 bp, Homo sapiens
cgggcttgggcgccagaggcggagtcggggaggaggtggctccagagatggcagtgagcgagaggagggggctcggccgcgggagccccgcggagtgggggcagcggctacttctggtgctgctgctgggtggctgctccgggcgcatccaccagctggcgctgacgggggagaagcgagcggacatccagctgaacagcttcggtttctacaccaatggctctctggaggtggagttgagcgtcctgcggctgggcctccgggaggcagaagagaagtccctgctggtggggttcagtctcagccgggttcggtctggcagagttcgctcctattcaacccgggatttccaggactgccctctccagaaaaacagtagcagtttcctggtcctgttcctcatcaacaccaaggatctgcaggtccaggtgcggaagtatggagagcagaagacgttgtttatctttcccgggctcctcccggaagcaccctccaaaccagggctcccgaagccacaggccacagtcccccgcaaggtggatggcggagggacctctgcagccagcaagcccaagtcaacacccgcagtgattcagggtcctagtgggaaggacaaggacctggtgttgggcctgagccacctcaacaactcctacaacttcagtttccacgtggtgatcggctctcaggcggaagaaggccagtacagcctgaacttccacaactgcaacaattcagtgccaggaaaggagcatccattcgacatcacggtgatgatccgggagaagaaccccgatggcttcctgtcggcagcggagatgccccttttcaagctctacatggtcatgtccgcctgcttcctggccgctggcatcttctgggtgtccatcctctgcaggaacacgtacagcgtcttcaagatccactggctcatggcggccttggccttcaccaagagcatctctctcctcttccacagcatcaactactacttcatcaacagccagggccaccccatcgaaggccttgccgtcatgtactacatcgcacacctgctgaagggcgccctcctcttcatcaccatcgccctgattggctcaggctgggccttcatcaagtacgtcctgtcggataaggagaagaaggtctttgggatcgtgatccccatgcaggtcctggccaacgtggcctacatcatcatcgagtcccgcgaggaaggcgccagcgactacgtgctgtggaaggagattttgttcctggtggacctcatctgctgtggtgccatcctgttccccgtagtctggtccatccggcatctccaggatgcgtctggcacagacgggaaggtggcagtgaacctggccaagctgaagctgttccggcattactatgtcatggtcatctgctacgtctacttcacccgcatcatcgccatcctgctgcaggtggctgtgccctttcagtggcagtggctgtaccagctcttggtggagggctccaccctggccttcttcgtgctcacgggctacaagttccagcccacaggaaacaacccgtacctgcagctgccccaggaggacgaggaggatgttcagatggagcaagtaatgacggactctgggttccgggaaggcctctccaaagtcaacaaaacagccagcgggcgggaactgttatgatcacctccacatctcagaccaaagggtcgtcctcccccagcatttctcactcctgcccttcttccacagcgtatgtggggaggtggagggggtccatgtggaccaggcgcccagctccccgggaccccggttcccggacaagcccatttggaagaagagtcccttcctccccccaaatattgggcagccctgtccttaccccgggaccacccctcccttccagctatgtgtacaataatgaccaatctgtttggctacgccgttgtcttgcctttttgggggttggggtctacacggaggttgtgtttacaatgtagaaacctgttttcgctgtgtgtggcgggggcgcgggcacagggtccgtgtctttgtatattcaataaatattcattcagtaa

SEQ ID NO: 27177 - protein, 543 aa, Homo sapiens; identical to SEQ ID NO: 3667

SEQ ID NO: 27178 - DNA, 1935 bp, Homo sapiens
cgggcttgggcgccagaggcggagtcggggaggaggtggctccagagatggcagtgagcgagaggagggggctcggccgcgggagccccgcggagtgggggcagcggctacttctggtgctgctgctgggtggctgctccgggcgcatccaccagctggcgctgacgggggagaagcgagcggacatccagctgaacagcttcggtttctacaccaatggctctctggaggtggagttgagcgtcctgcggctgggcctccgggaggcagaagagaagtccctgctggtggggttcagtctcagccgggttcggtctggcagagttcgctcctattcaacccgggatttccaggactgccctctccagaaaaacagtagcagtttcctggtcctgttcctcatcaacaccaaggatctgcaggtccaggtgcggaagtatggagagcagaagacgttgtttatctttcccgggctcctcccggaagcaccctccaaaccagggctcccgaagccacaggccacagtcccccgcaaggtggatggcggagggacctctgcagccagcaagcccaagtcaacacccgcagtgattcagggtcctagtgggaaggacaaggacctggtgttgggcctgagccacctcaacaactcctacaacttcagtttccacgtggtgatcggctctcaggcggaagaaggccagtacagcctgaacttccacaactgcaacaattcagtgccaggaaaggagcatccattcgacatcacggtgatgatccgggagaagaaccccgatggcttcctgtcggcagcggagatgccccttttcaagctctacatggtcatgtccgcctgcttcctggccgctggcatcttctgggtgtccatcctctgcaggaacacgtacagcgtcttcaagatccactggctcatggcggccttggccttcaccaagagcatctctctcctcttccacagcatcaactactacttcatcaacagccagggccaccccatcgaaggccttgccgtcatgtactacatcgcacacctgctgaagggcgccctcctcttcatcaccatcgccctgattggctcaggctgggccttcatcaagtacgtcctgtcggataaggagaagaaggtctttgggatcgtgatccccatgcaggtcctggccaacgtggcctacatcatcatcgagtcccgcgaggaaggcgccagcgactacgtgctgtggaaggagattttgttcctggtggacctcatctgctgtggtgccatcctgttccccgtagtctggtccatccggcatctccaggatgcgtctggcacagacgggaaggtggcagtgaacctggccaagctgaagctgttccggcattactatgtcatggtcatctgctacgtctacttcacccgcatcatcgccatcctgctgcaggtggctgtgccctttcagtggcagtggctgtaccagctcttggtggagggctccaccctggccttcttcgtgctcacgggctacaagttccagcccacaggaaacaacccgtacctgcagctgccccaggaggacgaggaggatgttcagatggagcaagtaatgacggactctgggttccgggaaggcctctccaaagtcaacaaaacagccagcgggcgggaactgttatgatcacctccacatctcagaccaaagggtcgtcctcccccagcatttctcactcctgcccttcttccacagcgtatgtggggaggtggagggggtccatgtggaccaggcgcccagctccccgggaccccggttcccggacaagcccatttggaagaagagtcccttcctccccccaaatattgggcagccctgtccttaccccgggaccacccctcccttccagctatgtgtacaataatgaccaatctgtttggct

SEQ ID NO: 27179 - protein, 543 aa, Homo sapiens; identical to SEQ ID NO: 3667

SEQ ID NO: 27180 - DNA, 935 bp, Homo sapiens
gtcggggaggaggtggctccagagatggcagtgagcgagaggagggggctcggccgcgggagccccgcggagtgggggcagcggctacttctggtgctgctgctgggtggctgctccgggcgcatccaccagctggcgctgacgggggagaagcgagcggacatccagctgaacagcttcggtttctacaccaatggctctctggaggtggagttgagcgtcctgcggctgggcctccgggaggcagaagagaagtccctgctggtggggttcagtctcagccgggttcggtctggcagagttcgctcctattcaacccgggatttccaggactgccctctccagaaaaacagtagcagtttcctggtcctgttcctcatcaacaccaaggatctgcaggtccaggtgcggaagtatggagagcagaagacgttgtttatctttcccgggctcctcccggaagcaccctccaaaccagggctcccgaagccacaggccacagtcccccgcaaggtggatggcggagggacctctgcagccagcaagcccaagtcaacacccgcagtgattcaggtttcggggaggcggggcaggagggaagatgcacaccccagggccctgcggggacccagaaccagctgatggaggggctctgtcccttcagggtcctagtgggaaggacaaggacctggtgttgggcctgagccacctcaacaactcctacaacttcagtttccacgtggtgatcggctctcaggcggaagaaggccagtacagcctgaacttccacaactgcaacaattcagtgccaggaaaggagcatccattcgacatcacggtgagcggagtggagggcagcagggccagggagcgccccctgcaggccactgcgggcccagagtgcctcaccccgcttagcttttcccagccctccc

SEQ ID NO: 27181 - protein, 205 aa, Homo sapiens
MAVSERRGLGRGSPAEWGQRLLLVLLLGGCSGRIHQLALTGEKRADIQLNSFGFYTNGSLEVELSVLRLGLREAEEKSLLVGFSLSRVRSGRVRSYSTRDFQDCPLQKNSSSFLVLFLINTKDLQVQVRKYGEQKTLFIFPGLLPEAPSKPGLPKPQATVPRKVDGGGTSAASKPKSTPAVIQVSGRRGRREDAHPRALRGPRTS

SEQ ID NO: 27182 - DNA, 813 bp, Homo sapiens
tcccgggatccccttcggtcctccggatggagttgccgggtccgcctcgctggggtcggccccctcccttcgggggcgaggctccatctcttggggactacaccccccttccccccaactgggtcttagtcctttaaattcttggaatcacttttggggcgctagagaccctggagccgcacagcggggtcctggggggctatagagtggggtcctctgggcacttaatgggatttggggggttctgttgaaatattgctgggagctcaactggaatgtaaaagttcttcgggaaggtgaaggtcaggcacgccgagggggagaagcgagcggacatccagctgaacagcttcggtttctacaccaatggctctctggaggtggagttgagcgtcctgcggctgggcctccgggaggcagaagagaagtccctgctggtggggttcagtctcagccgggttcggtctggcagagttcgctcctattcaacccgggatttccaggactgccctctccagaaaaacagtagcagtttcctggtcctgttcctcatcaacaccaaggatctgcaggtccaggtgcggaagtatggagagcagaagacgttgtttatctttcccgggctcctcccggaagcaccctccaaaccagggctcccgaagccacaggccacagtcccccgcaaggtggatggcggagggacctctgcagccagcaagcccaagtcaacacccgcagtgattcaggtttcggggaggcggggcaggagggaagatgcacaccccagggccctgcggggacccagaaccagct

SEQ ID NO: 27183 - protein, 50 aa, Homo sapiens
MESRRRCLSFPGSSRKHPPNQGSRSHRPQSPARWMAEGPLQPASPSQHPQ

SEQ ID NO: 27184 - DNA, 612 bp, Homo sapiens
ggagggggctcggccgcgggagccccgcggagtgggggcagcggctacttctggtgctgctgctgggtggctgctccgggcgcatccaccagctggcgctgacgggggagaagcgagcggacatccagctgaacagcttcggtttctacaccaatggctctctggaggtggagttgagcgtcctgcggctgggcctccgggaggcagaagagaagtccctgctggtggggttcagtctcagccgggttcggtctggcagagttcgctcctattcaacccgggatttccaggactgccctctccagaaaaacagtagcagtttcctggtcctgttcctcatcaacaccaaggatctgcagtgagttggggaccgggggctcgctcagatccttcgtctgcgtttccctggtgtgatgcccacacgcacctgggctgatcaggtgggatgagaagcagagagagaaagccacttactttttagttttgccttcaagtcttctgattgttggaaggaaggagagagggactccgcgggtgttggtgtctcagggcagaagacccggatacagagggttgttgtgagaatgaataacaattgttcgcacatgttga

SEQ ID NO: 27185 - protein, 119 aa, Homo sapiens
RGLGRGSPAEWGQRLLLVLLLGGCSGRIHQLALTGEKRADIQLNSFGFYTNGSLEVELSVLRLGLREAEEKSLLVGFSLSRVRSGRVRSYSTRDFQDCPLQKNSSSFLVLFLINTKDLQ

SEQ ID NO: 27186 - DNA, 2192 bp, Homo sapiens
gtctccccggggagggcggcgggcggcgggcggcggggaccgggtgcggtggtggctgcggcggcggcggcgggagcagcatggattggggcactgagctgtgggatcagttcgaggtgctcgagcgccacacgcagtgggggctggacctgttggacagatatgtaaagttcgtgaaagaacgcaccgaagtggaacaggcttacgccaaacaactgcggagcctggtgaaaaaatatctgcccaagagacctgccaaggatgatcctgagtccaaattcagccagcaacagtccttcgtacagattctccaggaggtgaatgactttgcaggccagcgggagctggtggctgagaacctcagtgtccgtgtatgtcttgagctgaccaagtactcacaagagatgaaacaggagaggaagatgcacttccaagaagggcggcgggcccagcagcagctggaaaatggctttaaacagctggagaatagtaagcgtaaatttgagcgggactgccgggaggcagagaaggcagcccagactgctgaacggctagaccaggatatcaacgccaccaaggctgatgtggagaaggccaagcagcaagcccaccttcggagtcacatggccgaagaaagcaaaaacgaatatgcggctcaactgcagcgcttcaaccgagaccaagcccacttctatttttcacagatgccccagatattcgataagctccaagacatggatgaacgcagggccacccgcctgggtgccgggtatgggctcctgtcggaggccgagctggaggtggtgcccataatagccaagtgcttggagggcatgaaggtggctgcaaatgctgtggatcccaagaacgactcccacgtccttatagagctgcacaagtcaggttttgcccgcccgggcgacgtggaattcgaggacttcagccagcccatgaaccgtgcaccctccgacagcagtctgggcaccccctcggatggacggcctgaactccgaggcccgggtcgcagccgcaccaagcgctggccttttggcaagaagaacaagcctcgccccccacccctctcccccctggggggccccgtaccctcggcattgcctaacggacccccgtccccccgctccggccgtgaccccttggccatactgagcgagatcagtaagtcggtcaaaccgaggctagcatccttccgcagccttcgaggcagccgtgggacagtggtgaccgaggattttagccacttgcccccagagcagcagcgaaaacggcttcaacagcagttggaagaacgcagtcgtgaacttcagaaggaggttgaccagagggaagccctaaagaaaatgaaggatgtctatgagaagacacctcagatgggggaccccgccagcttggagccccagatcgctgaaaccctgagcaacattgaacggctgaaattggaagtgcagaagtatgaggcgtggctggcagaagctgaaagtcgagtccttagcaaccggggagacagcctgagccggcacgcccggcctcccgacccccccgctagcgccccgccagacagcagcagcaacagcgcatcacaggacaccaaggagagctctgaagagcctccctcagaagagagccaggacacccccatttacacggagtttgatgaggatttcgaggaggaacccacatcccccataggtcactgtgtggccatctaccactttgaagggtccagcgagggcactatctctatggccgagggtgaagacctcagtcttatggaagaagacaaaggggacggctggacccgggtcaggcggaaagagggaggcgagggctacgtgcccacctcctacctccgagtcacgctcaattgaaccctgccagagacgggaagaggggggctgtcggctgctgcttctgggccacggggagccccaggacctatgcactttatttctgaccccgtggcttcggctgagacctgtgtaacctgctgccccctccacccccaacccagtcctacctgtcacaccggacggacccgctgtgccttctaccatcgttccaccattgatgtacatactcatgttttacatcttttctttctgccgctcggctccggccattttgttttatacaaaaatgggaaaaaaaaaaaagaaattatataaagttcctag

SEQ ID NO: 27187 - protein, 601 aa, Homo sapiens
MDWGTELWDQFEVLERHTQWGLDLLDRYVKFVKERTEVEQAYAKQLRSLVKKYLPKRPAKDDPESKFSQQQSFVQILQEVNDFAGQRELVAENLSVRVCLELTKYSQEMKQERKMHFQEGRRAQQQLENGFKQLENSKRKFERDCREAEKAAQTAERLDQDINATKADVEKAKQQAHLRSHMAEESKNEYAAQLQRFNRDQAHFYFSQMPQIFDKLQDMDERRATRLGAGYGLLSEAELEVVPIIAKCLEGMKVAANAVDPKNDSHVLIELHKSGFARPGDVEFEDFSQPMNRAPSDSSLGTPSDGRPELRGPGRSRTKRWPFGKKNKPRPPPLSPLGGPVPSALPNGPPSPRSGRDPLAILSEISKSVKPRLASFRSLRGSRGTVVTEDFSHLPPEQQRKRLQQQLEERSRELQKEVDQREALKKMKDVYEKTPQMGDPASLEPQIAETLSNIERLKLEVQKYEAWLAEAESRVLSNRGDSLSRHARPPDPPASAPPDSSSNSASQDTKESSEEPPSEESQDTPIYTEFDEDFEEEPTSPIGHCVAIYHFEGSSEGTISMAEGEDLSLMEEDKGDGWTRVRRKEGGEGYVPTSYLRVTLN

SEQ ID NO: 27188 - DNA, 2024 bp, Homo sapiens
gtctccccggggagggcggcgggcggcgggcggcggggaccgggtgcggtggtggctgcggcggcggcggcgggagcagcatggattggggcactgagctgtgggatcagttcgaggtgctcgagcgccacacgcagtgggggctggacctgttggacagatatgtaaagttcgtgaaagaacgcaccgaagtggaacaggcttacgccaaacaactgcggagcctggtgaaaaaatatctgcccaagagacctgccaaggatgatcctgagtccaaattcagccagcaacagtccttcgtacagattctccaggaggtgaatgactttgcaggccagcgggagctggtggctgagaacctcagtgtccgtgtatgtcttgagctgaccaagtactcacaagagatgaaacaggagaggaagatgcacttccaagaagggcggcgggcccagcagcagctggaaaatggctttaaacagctggagaatagtaagcgtaaatttgagcgggactgccgggaggcagagaaggcagcccagactgctgaacggctagaccaggatatcaacgccaccaaggctgatgtggagaaggccaagcagcaagcccaccttcggagtcacatggccgaagaaagcaaaaacgaatatgcggctcaactgcagcgcttcaaccgagaccaagcccacttctatttttcacagatgccccagatattcgataagctccaagacatggatgaacgcagggccacccgcctgggtgccgggtatgggctcctgtcggaggccgagctggaggtggtgcccataatagccaagtgcttggagggcatgaaggtggctgcaaatgctgtggatcccaagaacgactcccacgtccttatagagctgcacaagtcaggttttgcccgcccgggcgacgtggaattcgaggacttcagccagcccatgaaccgtgcaccctccgacagcagtctgggcaccccctcggatggacggcctgaactccgaggcccgggtcgcagccgcaccaagcgctggccttttggcaagaagaacaagacagtggtgaccgaggattttagccacttgcccccagagcagcagcgaaaacggcttcaacagcagttggaagaacgcagtcgtgaacttcagaaggaggttgaccagagggaagccctaaagaaaatgaaggatgtctatgagaagacacctcagatgggggaccccgccagcttggagccccagatcgctgaaaccctgagcaacattgaacggctgaaattggaagtgcagaagtatgaggcgtggctggcagaagctgaaagtcgagtccttagcaaccggggagacagcctgagccggcacgcccggcctcccgacccccccgctagcgccccgccagacagcagcagcaacagcgcatcacaggacaccaaggagagctctgaagagcctccctcagaagagagccaggacacccccatttacacggagtttgatgaggatttcgaggaggaacccacatcccccataggtcactgtgtggccatctaccactttgaagggtccagcgagggcactatctctatggccgagggtgaagacctcagtcttatggaagaagacaaaggggacggctggacccgggtcaggcggaaagagggaggcgagggctacgtgcccacctcctacctccgagtcacgctcaattgaaccctgccagagacgggaagaggggggctgtcggctgctgcttctgggccacggggagccccaggacctatgcactttatttctgaccccgtggcttcggctgagacctgtgtaacctgctgccccctccacccccaacccagtcctacctgtcacaccggacggacccgctgtgccttctaccatcgttccaccattgatgtacatactcatgttttacatcttttctttctgccgctcggctccggccattttgttttatacaaaaatgggaaaaaaaaaaaagaaattatataaagttcctag

SEQ ID NO: 27189 - protein, 545 aa, Homo sapiens; identical to SEQ ID NO: 3685

SEQ ID NO: 27190 - DNA, 2043 bp, Homo sapiens
gtctccccggggagggcggcgggcggcgggcggcggggaccgggtgcggtggtggctgcggcggcggcggcgggagcagcatggattggggcactgagctgtgggatcagttcgaggtgctcgagcgccacacgcagtgggggctggacctgttggacagatatgtaaagttcgtgaaagaacgcaccgaagtggaacaggcttacgccaaacaactgcggagcctggtgaaaaaatatctgcccaagagacctgccaaggatgatcctgagtccaaattcagccagcaacagtccttcgtacagattctccaggaggtgaatgactttgcaggccagcgggagctggtggctgagaacctcagtgtccgtgtatgtcttgagctgaccaagtactcacaagagatgaaacaggagaggaagatgcacttccaagaagggcggcgggcccagcagcagctggaaaatggctttaaacagctggagaatagtaagcgtaaatttgagcgggactgccgggaggcagagaaggcagcccagactgctgaacggctagaccaggatatcaacgccaccaaggctgatgtggagaaggccaagcagcaagcccaccttcggagtcacatggccgaagaaagcaaaaacgaatatgcggctcaactgcagcgcttcaaccgagaccaagcccacttctatttttcacagatgccccagatattcgataagctccaagacatggatgaacgcagggccacccgcctgggtgccgggtatgggctcctgtcggaggccgagctggaggtggtgcccataatagccaagtgcttggagggcatgaaggtggctgcaaatgctgtggatcccaagaacgactcccacgtccttatagagctgcacaagtcaggttttgcccgcccgggcgacgtggaattcgaggacttcagccagcccatgaaccgtgcaccctccgacagcagtctgggcaccccctcggatggacggcctgaactccgaggcccgggtcgcagccgcaccaagcgctggccttttggcaagaagaacaagccttcgaggcagccgtgggacagtggtgaccgaggattttagccacttgcccccagagcagcagcgaaaacggcttcaacagcagttggaagaacgcagtcgtgaacttcagaaggaggttgaccagagggaagccctaaagaaaatgaaggatgtctatgagaagacacctcagatgggggaccccgccagcttggagccccagatcgctgaaaccctgagcaacattgaacggctgaaattggaagtgcagaagtatgaggcgtggctggcagaagctgaaagtcgagtccttagcaaccggggagacagcctgagccggcacgcccggcctcccgacccccccgctagcgccccgccagacagcagcagcaacagcgcatcacaggacaccaaggagagctctgaagagcctccctcagaagagagccaggacacccccatttacacggagtttgatgaggatttcgaggaggaacccacatcccccataggtcactgtgtggccatctaccactttgaagggtccagcgagggcactatctctatggccgagggtgaagacctcagtcttatggaagaagacaaaggggacggctggacccgggtcaggcggaaagagggaggcgagggctacgtgcccacctcctacctccgagtcacgctcaattgaaccctgccagagacgggaagaggggggctgtcggctgctgcttctgggccacggggagccccaggacctatgcactttatttctgaccccgtggcttcggctgagacctgtgtaacctgctgccccctccacccccaacccagtcctacctgtcacaccggacggacccgctgtgccttctaccatcgttccaccattgatgtacatactcatgttttacatcttttctttctgccgctcggctccggccattttgttttatacaaaaatgggaaaaaaaaaaaagaaattatataaagttcctag

SEQ ID NO: 27191 - protein, 341 aa, Homo sapiens
MDWGTELWDQFEVLERHTQWGLDLLDRYVKFVKERTEVEQAYAKQLRSLVKKYLPKRPAKDDPESKFSQQQSFVQILQEVNDFAGQRELVAENLSVRVCLELTKYSQEMKQERKMHFQEGRRAQQQLENGFKQLENSKRKFERDCREAEKAAQTAERLDQDINATKADVEKAKQQAHLRSHMAEESKNEYAAQLQRFNRDQAHFYFSQMPQIFDKLQDMDERRATRLGAGYGLLSEAELEVVPIIAKCLEGMKVAANAVDPKNDSHVLIELHKSGFARPGDVEFEDFSQPMNRAPSDSSLGTPSDGRPELRGPGRSRTKRWPFGKKNKPSRQPWDSGDRGF

SEQ ID NO: 27192 - DNA, 1958 bp, Homo sapiens
gtctccccggggagggcggcgggcggcgggcggcggggaccgggtgcggtggtggctgcggcggcggcggcgggagcagcatggattggggcactgagctgtgggatcagttcgaggtgctcgagcgccacacgcagtgggggctggacctgttggacagatatgtaaagttcgtgaaagaacgcaccgaagtggaacaggcttacgccaaacaactgcggagcctggtgaaaaaatatctgcccaagagacctgccaaggatgatcctgagtccaaattcagccagcaacagtccttcgtacagattctccaggaggtgaatgactttgcaggccagcgggagctggtggctgagaacctcagtgtccgtgtatgtcttgagctgaccaagtactcacaagagatgaaacaggagaggaagatgcacttccaagaagggcggcgggcccagcagcagctggaaaatggctttaaacagctggagaatagtaagcgtaaatttgagcgggactgccgggaggcagagaaggcagcccagactgctgaacggctagaccaggatatcaacgccaccaaggctgatgtggagaaggccaagcagcaagcccaccttcggagtcacatggccgaagaaagcaaaaacgaatatgcggctcaactgcagcgcttcaaccgagaccaagcccacttctatttttcacagatgccccagatattcgataagctccaagacatggatgaacgcagggccacccgcctgggtgccgggtatgggctcctgtctgctgtggatcccaagaacgactcccacgtccttatagagctgcacaagtcaggttttgcccgcccgggcgacgtggaattcgaggacttcagccagcccatgaaccgtgcaccctccgacagcagtctgggcaccccctcggatggacggcctgaactccgaggcccgggtcgcagccgcaccaagcgctggccttttggcaagaagaacaagacagtggtgaccgaggattttagccacttgcccccagagcagcagcgaaaacggcttcaacagcagttggaagaacgcagtcgtgaacttcagaaggaggttgaccagagggaagccctaaagaaaatgaaggatgtctatgagaagacacctcagatgggggaccccgccagcttggagccccagatcgctgaaaccctgagcaacattgaacggctgaaattggaagtgcagaagtatgaggcgtggctggcagaagctgaaagtcgagtccttagcaaccggggagacagcctgagccggcacgcccggcctcccgacccccccgctagcgccccgccagacagcagcagcaacagcgcatcacaggacaccaaggagagctctgaagagcctccctcagaagagagccaggacacccccatttacacggagtttgatgaggatttcgaggaggaacccacatcccccataggtcactgtgtggccatctaccactttgaagggtccagcgagggcactatctctatggccgagggtgaagacctcagtcttatggaagaagacaaaggggacggctggacccgggtcaggcggaaagagggaggcgagggctacgtgcccacctcctacctccgagtcacgctcaattgaaccctgccagagacgggaagaggggggctgtcggctgctgcttctgggccacggggagccccaggacctatgcactttatttctgaccccgtggcttcggctgagacctgtgtaacctgctgccccctccacccccaacccagtcctacctgtcacaccggacggacccgctgtgccttctaccatcgttccaccattgatgtacatactcatgttttacatcttttctttctgccgctcggctccggccattttgttttatacaaaaatgggaaaaaaaaaaaagaaattatataaagttcctag

SEQ ID NO: 27193 - protein, 523 aa, Homo sapiens
MDWGTELWDQFEVLERHTQWGLDLLDRYVKFVKERTEVEQAYAKQLRSLVKKYLPKRPAKDDPESKFSQQQSFVQILQEVNDFAGQRELVAENLSVRVCLELTKYSQEMKQERKMHFQEGRRAQQQLENGFKQLENSKRKFERDCREAEKAAQTAERLDQDINATKADVEKAKQQAHLRSHMAEESKNEYAAQLQRFNRDQAHFYFSQMPQIFDKLQDMDERRATRLGAGYGLLSAVDPKNDSHVLIELHKSGFARPGDVEFEDFSQPMNRAPSDSSLGTPSDGRPELRGPGRSRTKRWPFGKKNKTVVTEDFSHLPPEQQRKRLQQQLEERSRELQKEVDQREALKKMKDVYEKTPQMGDPASLEPQIAETLSNIERLKLEVQKYEAWLAEAESRVLSNRGDSLSRHARPPDPPASAPPDSSSNSASQDTKESSEEPPSEESQDTPIYTEFDEDFEEEPTSPIGHCVAIYHFEGSSEGTISMAEGEDLSLMEEDKGDGWTRVRRKEGGEGYVPTSYLRVTLN

SEQ ID NO: 27194 - DNA, 2487 bp, Homo sapiens
gtctccccggggagggcggcgggcggcgggcggcggggaccgggtgcggtggtggctgcggcggcggcggcgggagcagcatggattggggcactgagctgtgggatcagttcgaggtgctcgagcgccacacgcagtgggggctggacctgttggacagatatgtaaagttcgtgaaagaacgcaccgaagtggaacaggcttacgccaaacaactgcggagcctggtgaaaaaatatctgcccaagagacctgccaaggatgatcctgagtccaaattcagccagcaacagtccttcgtacagattctccaggaggtgaatgactttgcaggccagcgggagctggtggctgagaacctcagtgtccgtgtatgtcttgagctgaccaagtactcacaagagatgaaacaggagaggaagatgcacttccaagaagggcggcgggcccagcagcagctggaaaatggctttaaacagctggagaatagtaagcgtaaatttgagcgggactgccgggaggcagagaaggcagcccagactgctgaacggctagaccaggatatcaacgccaccaaggctgatgtggagaaggccaagcagcaagcccaccttcggagtcacatggccgaagaaagcaaaaacgaatatgcggctcaactgcagcgcttcaaccgagaccaagcccacttctatttttcacagatgccccagatattcgataagctccaagacatggatgaacgcagggccacccgcctgggtgccgggtatgggctcctgtcggaggccgagctggaggtggtgcccataatagccaagtgcttggagggcatgaaggtggctgcaaatgctgtggatcccaagaacgactcccacgtccttatagagctgcacaagtcaggttttgcccgcccgggcgacgtggaattcgaggacttcagccagcccatgaaccgtgcaccctccgacagcagtctgggcaccccctcggatggacggcctgaactccgaggcccgggtcgcagccgcaccaagcgctggccttttggcaagaagaacaagcctcgccccccacccctctcccccctggggggccccgtaccctcggcattgcctaacggacccccgtccccccgctccggccgtgaccccttggccatactgagcgagatcagtaagtcggtcaaaccgaggctagcatccttccgcagccttcgaggcagccgtgggacagtggtgaccgaggattttagccacttgcccccagagcagcagcgaaaacggcttcaacagcagttggaagaacgcagtcgtgaacttcagaaggaggttgaccagagggaagccctaaagaaaatgaaggatgtctatgagaagacacctcagatgggggaccccgccagcttggagccccagatcgctgaaaccctgagcaacattgaacggctgaaattggaagtgcagaagtatgaggcgtggctggcagaagctgaaagtcgagtccttagcaaccggggagacagcctgagccggcacgcccggcctcccgacccccccgctagcgccccgccagacagcagcagcaacagcgcatcacaggacaccaaggagagctctgaagagcctccctcagaagagagccaggacacccccatttacacggagtttgatgaggatttcgaggaggaacccacatcccccataggtcactgtgtggccatctaccactttgaagggtccagcgagggcactatctctatggccgagggtgaagacctcagtcttatggaagaagacaaaggggacggctggacccgggtcaggcggaaagagggaggcgagggctacgtgcccacctcctacctccgagtcacgctcaattgaaccctgccagagacgggaagaggggggctgtcggctgctgcttctgggccacggggagccccaggacctatgcactttatttctgaccccgtggcttcggctgagacctgtgtaacctgctgccccctccacccccaacccagtcctacctgtcacaccggacggacccgctgtgccttctaccatcgttccaccattgatgtacatactcatgttttacatcttttctttctgccgctcggctccggccattttgttttatacaaaaatgggaaaaaaaaaaaagaaattatataaagttcctagagtcggtgtcttattagaggatttaaatactgggactggaagtatctaacaccacgtttcttacaggccacacagggaatgaggaaggggaggtgatcttgggcacaccttgggtcaaccctgcccctttctggaagttggcctatgtcattgtcagtgggtgtctgcttgtgactcaggtagggagaaggataccaagtttcttttttttttctttttgagacagtctcacccagttgcccaggctggagtgcagtggcgtacgtgatctcagctcactgcagactccatctcc

SEQ ID NO: 27195 - protein, 601 aa, Homo sapiens; identical to SEQ ID NO: 27187

SEQ ID NO: 27196 - DNA, 2319 bp, Homo sapiens
gtctccccggggagggcggcgggcggcgggcggcggggaccgggtgcggtggtggctgcggcggcggcggcgggagcagcatggattggggcactgagctgtgggatcagttcgaggtgctcgagcgccacacgcagtgggggctggacctgttggacagatatgtaaagttcgtgaaagaacgcaccgaagtggaacaggcttacgccaaacaactgcggagcctggtgaaaaaatatctgcccaagagacctgccaaggatgatcctgagtccaaattcagccagcaacagtccttcgtacagattctccaggaggtgaatgactttgcaggccagcgggagctggtggctgagaacctcagtgtccgtgtatgtcttgagctgaccaagtactcacaagagatgaaacaggagaggaagatgcacttccaagaagggcggcgggcccagcagcagctggaaaatggctttaaacagctggagaatagtaagcgtaaatttgagcgggactgccgggaggcagagaaggcagcccagactgctgaacggctagaccaggatatcaacgccaccaaggctgatgtggagaaggccaagcagcaagcccaccttcggagtcacatggccgaagaaagcaaaaacgaatatgcggctcaactgcagcgcttcaaccgagaccaagcccacttctatttttcacagatgccccagatattcgataagctccaagacatggatgaacgcagggccacccgcctgggtgccgggtatgggctcctgtcggaggccgagctggaggtggtgcccataatagccaagtgcttggagggcatgaaggtggctgcaaatgctgtggatcccaagaacgactcccacgtccttatagagctgcacaagtcaggttttgcccgcccgggcgacgtggaattcgaggacttcagccagcccatgaaccgtgcaccctccgacagcagtctgggcaccccctcggatggacggcctgaactccgaggcccgggtcgcagccgcaccaagcgctggccttttggcaagaagaacaagacagtggtgaccgaggattttagccacttgcccccagagcagcagcgaaaacggcttcaacagcagttggaagaacgcagtcgtgaacttcagaaggaggttgaccagagggaagccctaaagaaaatgaaggatgtctatgagaagacacctcagatgggggaccccgccagcttggagccccagatcgctgaaaccctgagcaacattgaacggctgaaattggaagtgcagaagtatgaggcgtggctggcagaagctgaaagtcgagtccttagcaaccggggagacagcctgagccggcacgcccggcctcccgacccccccgctagcgccccgccagacagcagcagcaacagcgcatcacaggacaccaaggagagctctgaagagcctccctcagaagagagccaggacacccccatttacacggagtttgatgaggatttcgaggaggaacccacatcccccataggtcactgtgtggccatctaccactttgaagggtccagcgagggcactatctctatggccgagggtgaagacctcagtcttatggaagaagacaaaggggacggctggacccgggtcaggcggaaagagggaggcgagggctacgtgcccacctcctacctccgagtcacgctcaattgaaccctgccagagacgggaagaggggggctgtcggctgctgcttctgggccacggggagccccaggacctatgcactttatttctgaccccgtggcttcggctgagacctgtgtaacctgctgccccctccacccccaacccagtcctacctgtcacaccggacggacccgctgtgccttctaccatcgttccaccattgatgtacatactcatgttttacatcttttctttctgccgctcggctccggccattttgttttatacaaaaatgggaaaaaaaaaaaagaaattatataaagttcctagagtcggtgtcttattagaggatttaaatactgggactggaagtatctaacaccacgtttcttacaggccacacagggaatgaggaaggggaggtgatcttgggcacaccttgggtcaaccctgcccctttctggaagttggcctatgtcattgtcagtgggtgtctgcttgtgactcaggtagggagaaggataccaagtttcttttttttttctttttgagacagtctcacccagttgcccaggctggagtgcagtggcgtacgtgatctcagctcactgcagactccatctcc

SEQ ID NO: 27197 - protein, 545 aa, Homo sapiens; identical to SEQ ID NO: 3685

SEQ ID NO: 27198 - DNA, 2399 bp, Homo sapiens
gtctccccggggagggcggcgggcggcgggcggcggggaccgggtgcggtggtggctgcggcggcggcggcgggagcagcatggattggggcactgagctgtgggatcagttcgaggtgctcgagcgccacacgcagtgggggctggacctgttggacagatatgtaaagttcgtgaaagaacgcaccgaagtggaacaggcttacgccaaacaactgcggagcctggtgaaaaaatatctgcccaagagacctgccaaggatgatcctgagtccaaattcagccagcaacagtccttcgtacagattctccaggaggtgaatgactttgcaggccagcgggagctggtggctgagaacctcagtgtccgtgtatgtcttgagctgaccaagtactcacaagagatgaaacaggagaggaagatgcacttccaagaagggcggcgggcccagcagcagctggaaaatggctttaaacagctggagaatagtaagcgtaaatttgagcgggactgccgggaggcagagaaggcagcccagactgctgaacggctagaccaggatatcaacgccaccaaggctgatgtggagaaggccaagcagcaagcccaccttcggagtcacatggccgaagaaagcaaaaacgaatatgcggctcaactgcagcgcttcaaccgagaccaagcccacttctatttttcacagatgccccagatattcgataagctccaagacatggatgaacgcagggccacccgcctgggtgccgggtatgggctcctgtcggaggccgagctggaggtggtgcccataatagccaagtgcttggagggcatgaaggtggctgcaaatgctgtggatcccaagaacgactcccacgtccttatagagctgcacaagtcaggttttgcccgcccgggcgacgtggaattcgaggacttcagccagcccatgaaccgtgcaccctccgacagcagtctgggcaccccctcggatggacggcctgaactccgaggcccgggtcgcagccgcaccaagcgctggccttttggcaagaagaacaagacagtggtgaccgaggattttagccacttgcccccagagcagcagcgaaaacggcttcaacagcagttggaagaacgcagtcgtgaacttcagaaggaggttgaccagagggaagccctaaagaaaatgaaggatgtctatgagaagacacctcagatgggggaccccgccagcttggagccccagatcgctgaaaccctgagcaacattgaacggctgaaattggaagtgcagaagtatgaggcgtggctggcagaagctgaaagtcgagtccttagcaaccggggagacagcctgagccggcacgcccggcctcccgacccccccgctagcgccccgccagacagcagcagcaacagcgcatcacaggacaccaaggagaggtgaggggtgacgtcagagtgggtctgttcccagggtcccaggagggcctgtctttatctgccgaattatccccaaacagctctgaagagcctccctcagaagagagccaggacacccccatttacacggagtttgatgaggatttcgaggaggaacccacatcccccataggtcactgtgtggccatctaccactttgaagggtccagcgagggcactatctctatggccgagggtgaagacctcagtcttatggaagaagacaaaggggacggctggacccgggtcaggcggaaagagggaggcgagggctacgtgcccacctcctacctccgagtcacgctcaattgaaccctgccagagacgggaagaggggggctgtcggctgctgcttctgggccacggggagccccaggacctatgcactttatttctgaccccgtggcttcggctgagacctgtgtaacctgctgccccctccacccccaacccagtcctacctgtcacaccggacggacccgctgtgccttctaccatcgttccaccattgatgtacatactcatgttttacatcttttctttctgccgctcggctccggccattttgttttatacaaaaatgggaaaaaaaaaaaagaaattatataaagttcctagagtcggtgtcttattagaggatttaaatactgggactggaagtatctaacaccacgtttcttacaggccacacagggaatgaggaaggggaggtgatcttgggcacaccttgggtcaaccctgcccctttctggaagttggcctatgtcattgtcagtgggtgtctgcttgtgactcaggtagggagaaggataccaagtttcttttttttttctttttgagacagtctcacccagttgcccaggctggagtgcagtggcgtacgtgatctcagctcactgcagactccatctcc

SEQ ID NO: 27199 - protein, 456 aa, Homo sapiens
MDWGTELWDQFEVLERHTQWGLDLLDRYVKFVKERTEVEQAYAKQLRSLVKKYLPKRPAKDDPESKFSQQQSFVQILQEVNDFAGQRELVAENLSVRVCLELTKYSQEMKQERKMHFQEGRRAQQQLENGFKQLENSKRKFERDCREAEKAAQTAERLDQDINATKADVEKAKQQAHLRSHMAEESKNEYAAQLQRFNRDQAHFYFSQMPQIFDKLQDMDERRATRLGAGYGLLSEAELEVVPIIAKCLEGMKVAANAVDPKNDSHVLIELHKSGFARPGDVEFEDFSQPMNRAPSDSSLGTPSDGRPELRGPGRSRTKRWPFGKKNKTVVTEDFSHLPPEQQRKRLQQQLEERSRELQKEVDQREALKKMKDVYEKTPQMGDPASLEPQIAETLSNIERLKLEVQKYEAWLAEAESRVLSNRGDSLSRHARPPDPPASAPPDSSSNSASQDTKER

SEQ ID NO: 27200 - DNA, 498 bp, Homo sapiens
ggcggggaccgggtgcggtggtggctgcggcggcggcggcgggagcagcatggattggggcactgagctgtgggatcagttcgaggtgctcgagcgccacacgcagtgggggctggacctgttggacagatatgtaaagttcgtgaaagaacgcaccgaagtggaacaggcttacgccaaacaactgcggagcctggtgaaaaaatatctgcccaagagacctgccaaggatgatcctgagtccaaattcagccagcaacagtccttcgtacagattctccaggaggtgaatgactttgcaggccagcgggagctggtggctgagaacctcagtgtccgtgtatgtcttgagctgaccaagtactcacaagagctgtgccttctaccatcgttccaccattgatgtacatactcatgttttacatcttttctttctgccgctcggctccggccattttgttttatacaaaaatgggaaaaaaaaaaaagaaattatat

SEQ ID NO: 27201 - protein, 117 aa, Homo sapiens
MDWGTELWDQFEVLERHTQWGLDLLDRYVKFVKERTEVEQAYAKQLRSLVKKYLPKRPAKDDPESKFSQQQSFVQILQEVNDFAGQRELVAENLSVRVCLELTKYSQELCLLPSFHH

SEQ ID NO: 27202 - DNA, 2186 bp, Homo sapiens
cccggccggggtggctggggcctgggcgctgttctccggcccttcccgggaaggggagggggttcccgccagtttcctgcctccccccgcgccacgccggggcggcgccgggaagccactccttctaggagcgcagagccttggccctccctgggagtctggtcggcgggctgtggggtcccaaaatcgtgaccccggcccctctcccctcctcccccaccatgtcccatgtcaggatcagttcgaggtgctcgagcgccacacgcagtgggggctggacctgttggacagatatgtaaagttcgtgaaagaacgcaccgaagtggaacaggcttacgccaaacaactgcggagcctggtgaaaaaatatctgcccaagagacctgccaaggatgatcctgagtccaaattcagccagcaacagtccttcgtacagattctccaggaggtgaatgactttgcaggccagcgggagctggtggctgagaacctcagtgtccgtgtatgtcttgagctgaccaagtactcacaagagatgaaacaggagaggaagatgcacttccaagaagggcggcgggcccagcagcagctggaaaatggctttaaacagctggagaatagtaagcgtaaatttgagcgggactgccgggaggcagagaaggcagcccagactgctgaacggctagaccaggatatcaacgccaccaaggctgatgtggagaaggccaagcagcaagcccaccttcggagtcacatggccgaagaaagcaaaaacgaatatgcggctcaactgcagcgcttcaaccgagaccaagcccacttctatttttcacagatgccccagatattcgataagctccaagacatggatgaacgcagggccacccgcctgggtgccgggtatgggctcctgtcggaggccgagctggaggtggtgcccataatagccaagtgcttggagggcatgaaggtggctgcaaatgctgtggatcccaagaacgactcccacgtccttatagagctgcacaagtcaggttttgcccgcccgggcgacgtggaattcgaggacttcagccagcccatgaaccgtgcaccctccgacagcagtctgggcaccccctcggatggacggcctgaactccgaggcccgggtcgcagccgcaccaagcgctggccttttggcaagaagaacaaggtgggggccgggacccttgggatggtgggggagaaggacagtgaagtggggacagtggggcccctattgagtcagccccagccgcctgaacgccgagtctcgggcaggaattttcctcttggctgccagcccggactggagggaaggaaggcggccgattggcctgggagtcccccgaggcgaaggcgggggcagggtggggaggtggggaggtccgtggcgtttgtctgctgcttctcgggatgctgggagaaaacctgctggtggaattcagggctggcctgagggctggtgacaccatccctggggactccccgagtttctctctccatcctgctgatgggactctgggagccgccctgcatgtcttgctttcttgggtttttggattttaatataccttagcacccttggtttatacctttgatttatactttgggtccctcttcacttacactctcatacctctccttgacttaacacctgtgatccccgagcttaaacttctgatgcccctaacccctctcattttcctgccttccactccctctcggcttgtggttttatttttgtttatttatttttgtcctctgtggcctcttacctgtctgagaccttgattcctgcatgcgtcttctagactgtcagcccagaaagctaagtggacagagagacatgggcctccctgcctcctggacccatgcttgctcccggacataacattccagagacctaggagataccgggggagtgagagttctggctttcgggcttacagttcaacatcctccccgccaccttccagatttttttgtgtcgctcctgcatgcgttttctctgtgtggttgtgcatcttgagttgtggttttcttaccgttttttttctttctccattttgtttttcctttttcctttttttgcgtccatccgtccatccgtgcgtccatccctccgtccattcgtcctcactctctacatcctcctatgcccc

SEQ ID NO: 27203 - protein, 314 aa, Homo sapiens
MKQERKMHFQEGRRAQQQLENGFKQLENSKRKFERDCREAEKAAQTAERLDQDINATKADVEKAKQQAHLRSHMAEESKNEYAAQLQRFNRDQAHFYFSQMPQIFDKLQDMDERRATRLGAGYGLLSEAELEVVPIIAKCLEGMKVAANAVDPKNDSHVLIELHKSGFARPGDVEFEDFSQPMNRAPSDSSLGTPSDGRPELRGPGRSRTKRWPFGKKNKVGAGTLGMVGEKDSEVGTVGPLLSQPQPPERRVSGRNFPLGCQPGLEGRKAADWPGSPPRRRRGQGGEVGRSVAFVCCFSGCWEKTCWWNSGLA

SEQ ID NO: 27204 - DNA, 781 bp, Homo sapiens
cgggctgtggggtcccaaaatcgtgaccccggcccctctcccctcctcccccaccatgtcccatgtcaggatcagttcgaggtgctcgagcgccacacgcagtgggggctggacctgttggacagatatgtaaagttcgtgaaagaacgcaccgaagtggaacaggcttacgccaaacaactgcggagcctggtgaaaaaatatctgcccaagagacctgccaaggatgatcctgagtccaaattcagccagcaacagtccttcgtacagattctccaggaggtgaatgactttgcaggccagcgggagctggtggctgagaacctcagtgtccgtgtatgtcttgagctgaccaagtactcacaagagatgaaacaggagaggaagatggtgaggagccccccgattcaggttttacaaagggcttctgctggaaccctggcgagccttatcactcttctttctgtagcacttccaagaagggcggcgggcccagcagcagctggaaaatggctttaaacagctggagaatgtgagtttgcagaggtagcagtgactgtggcccggaggcatgggggcagggttgcggatccggagtcagggagctgccctctttgtcagacctggaccttccctcccccataggcttccagtactcccttgacccctacttactggatgacatcccaataatccctgaaaccttggtttcccaccctgctgtctttgggatggtggctccctcactccggttctgtcccctacacagagtaagcgtaaa

SEQ ID NO: 27205 - protein, 55 aa, Homo sapiens [sequence omitted]

SEQ ID NO: 27206 - DNA, 633 bp, Homo sapiens
ggatcagttcgaggtgctcgagcgccacacgcagtgggggctggacctgttggacagatatgtaaagttcgtgaaagaacgcaccgaagtggaacaggcttacgccaaacaactgcggagcctggtgaaaaaatatctgcccaagagacctgccaaggatgatcctgagtccaaattcagccagcaacagtccttcgtacagattctccaggaggtgaatgactttgcaggccagcgggagctggtggctgagaacctcagtgtccgtgtatgtcttgagctgaccaagtactcacaagagatgaaacaggagaggaagatgcacttccaagaagggcggcgggcccagcagcagctggaaaatggctttaaacagctggagaatgtgagtttgcagaggtagcagtgactgtggcccggaggcatgggggcagggttgcggatccggagtcagggagctgccctctttgtcagacctggaccttccctcccccataggcttccagtactcccttgacccctacttactggatgacatcccaataatccctgaaaccttggtttcccaccctgctgtctttgggatggtggctccctcactccggttctgtcccctacacagagtaagcgtaa

SEQ ID NO: 27207 - protein, 33 aa, Homo sapiens
MKQERKMHFQEGRRAQQQLENGFKQLENVSLQR

SEQ ID NO: 27208 - DNA, 1266 bp, Homo sapiens
ggatcagttcgaggtgctcgagcgccacacgcagtgggggctggacctgttggacagatatgtaaagttcgtgaaagaacgcaccgaagtggaacaggcttacgccaaacaactgcggagcctggtgaaaaaatatctgcccaagagacctgccaaggatgatcctgagtccaaattcagccagcaacagtccttcgtacagattctccaggaggtgaatgactttgcaggccagcgggagctggtggctgagaacctcagtgtccgtgtatgtcttgagctgaccaagtactcacaagagatgaaacaggagaggaagatgcacttccaagaagggcggcgggcccagcagcagctggaaaatggctttaaacagctggagaatgcttccagtactcccttgacccctacttactggatgacatcccaaaaatgaaggatgtctatgagaagacacctcagatgggggaccccgccagcttggagccccagatcgctgaaaccctgagcaacattgaacggctgaaattggaagtgcagaagtatgaggcgtggctggcagaagctgaaagtcgagtccttagcaaccggggagacagcctgagccggcacgcccggcctcccgacccccccgctagcgccccgccagacagcagcagcaacagcgcatcacaggacaccaaggagagctctgaagagcctccctcagaagagagccaggacacccccatttacacggagtttgatgaggatttcgaggaggaacccacatcccccataggtcactgtgtggccatctaccactttgaagggtccagcgagggcactatctctatggccgagggtgaagacctcagtcttatggaagaagacaaaggggacggctggacccgggtcaggcggaaagagggaggcgagggctacgtgcccacctcctacctccgagtcacgctcaattgaaccctgccagagacgggaagaggggggctgtcggctgctgcttctgggccacggggagccccaggacctatgcactttatttctgaccccgtggcttcggctgagacctgtgtaacctgctgccccctccacccccaacccagtcctacctgtcacaccggacggacccgctgtgccttctaccatcgttccaccattgatgtacatactcatgttttacatcttttctttctgccgctcggctccggccattttgttttatacaaaaatgggaaaaaaaaaaaagaaattatataaagttcctag

SEQ ID NO: 27209 - protein, 175 aa, Homo sapiens [sequence omitted]

SEQ ID NO: 27210 - DNA, 1561 bp, Homo sapiens
ggatcagttcgaggtgctcgagcgccacacgcagtgggggctggacctgttggacagatatgtaaagttcgtgaaagaacgcaccgaagtggaacaggcttacgccaaacaactgcggagcctggtgaaaaaatatctgcccaagagacctgccaaggatgatcctgagtccaaattcagccagcaacagtccttcgtacagattctccaggaggtgaatgactttgcaggccagcgggagctggtggctgagaacctcagtgtccgtgtatgtcttgagctgaccaagtactcacaagagatgaaacaggagaggaagatgcacttccaagaagggcggcgggcccagcagcagctggaaaatggctttaaacagctggagaatgcttccagtactcccttgacccctacttactggatgacatcccaaaaatgaaggatgtctatgagaagacacctcagatgggggaccccgccagcttggagccccagatcgctgaaaccctgagcaacattgaacggctgaaattggaagtgcagaagtatgaggcgtggctggcagaagctgaaagtcgagtccttagcaaccggggagacagcctgagccggcacgcccggcctcccgacccccccgctagcgccccgccagacagcagcagcaacagcgcatcacaggacaccaaggagagctctgaagagcctccctcagaagagagccaggacacccccatttacacggagtttgatgaggatttcgaggaggaacccacatcccccataggtcactgtgtggccatctaccactttgaagggtccagcgagggcactatctctatggccgagggtgaagacctcagtcttatggaagaagacaaaggggacggctggacccgggtcaggcggaaagagggaggcgagggctacgtgcccacctcctacctccgagtcacgctcaattgaaccctgccagagacgggaagaggggggctgtcggctgctgcttctgggccacggggagccccaggacctatgcactttatttctgaccccgtggcttcggctgagacctgtgtaacctgctgccccctccacccccaacccagtcctacctgtcacaccggacggacccgctgtgccttctaccatcgttccaccattgatgtacatactcatgttttacatcttttctttctgccgctcggctccggccattttgttttatacaaaaatgggaaaaaaaaaaaagaaattatataaagttcctagagtcggtgtcttattagaggatttaaatactgggactggaagtatctaacaccacgtttcttacaggccacacagggaatgaggaaggggaggtgatcttgggcacaccttgggtcaaccctgcccctttctggaagttggcctatgtcattgtcagtgggtgtctgcttgtgactcaggtagggagaaggataccaagtttcttttttttttctttttgagacagtctcacccagttgcccaggctggagtgcagtggcgtacgtgatctcagctcactgcagactccatctcc

SEQ ID NO: 27211 - protein, 175 aa, Homo sapiens [sequence omitted]

SEQ ID NO: 27212 - DNA, 710 bp, Homo sapiens
ccagcaacagtccttcgtacagattctccaggaggtgaatgactttgcaggccagcgggagctggtggctgagaacctcagtgtccgtgtatgtcttgagctgaccaagtactcacaagagatgaaacaggagctctgaagagcctccctcagaagagagccaggacacccccatttacacggagtttgatgaggatttcgaggaggaacccacatcccccataggtcactgtgtggccatctaccactttgaagggtccagcgagggcactatctctatggccgagggtgaagacctcagtcttatggaagaagacaaaggggacggctggacccgggtcaggcggaaagagggaggcgagggctacgtgcccacctcctacctccgagtcacgctcaattgaaccctgccagagacgggaagaggggggctgtcggctgctgcttctgggccacggggagccccaggacctatgcactttatttctgaccccgtggcttcggctgagacctgtgtaacctgctgccccctccacccccaacccagtcctacctgtcacaccggacggacccgctgtgccttctaccatcgttccaccattgatgtacatactcatgttttacatcttttctttctgccgctcggctccggccattttgttttatacaaaaatgggaaaaaaaaaaaagaaattatataaagttcctag

SEQ ID NO: 27213 - protein, 75 aa, Homo sapiens
MHFISDPVASAETCVTCCPLHPQPSPTCHTGRTRCAFYHRSTIDVHTHVLHLFFLPLGSGHFVLYKNGKKKKEII

SEQ ID NO: 27214 - DNA, 1005 bp, Homo sapiens
ccagcaacagtccttcgtacagattctccaggaggtgaatgactttgcaggccagcgggagctggtggctgagaacctcagtgtccgtgtatgtcttgagctgaccaagtactcacaagagatgaaacaggagctctgaagagcctccctcagaagagagccaggacacccccatttacacggagtttgatgaggatttcgaggaggaacccacatcccccataggtcactgtgtggccatctaccactttgaagggtccagcgagggcactatctctatggccgagggtgaagacctcagtcttatggaagaagacaaaggggacggctggacccgggtcaggcggaaagagggaggcgagggctacgtgcccacctcctacctccgagtcacgctcaattgaaccctgccagagacgggaagaggggggctgtcggctgctgcttctgggccacggggagccccaggacctatgcactttatttctgaccccgtggcttcggctgagacctgtgtaacctgctgccccctccacccccaacccagtcctacctgtcacaccggacggacccgctgtgccttctaccatcgttccaccattgatgtacatactcatgttttacatcttttctttctgccgctcggctccggccattttgttttatacaaaaatgggaaaaaaaaaaaagaaattatataaagttcctagagtcggtgtcttattagaggatttaaatactgggactggaagtatctaacaccacgtttcttacaggccacacagggaatgaggaaggggaggtgatcttgggcacaccttgggtcaaccctgcccctttctggaagttggcctatgtcattgtcagtgggtgtctgcttgtgactcaggtagggagaaggataccaagtttcttttttttttctttttgagacagtctcacccagttgcccaggctggagtgcagtggcgtacgtgatctcagctcactgcagactccatctcc

SEQ ID NO: 27215 - protein, 75 aa, Homo sapiens; identical to SEQ ID NO: 27213

SEQ ID NO: 27216 - DNA, 727 bp, Homo sapiens
agctggtggctgagaacctcagtgtccgtgtatgtcttgagctgaccaagtactcacaagagatgaaacaggagaggaagatggtgaggagccccccgattcaggttttacaaagggcttctgctggaaccctggcgagccttatcactcttctttctgtagcacttccaagaagggcggcgggcccagcagcagctggaaaatggctttaaacagctggagaatgtgagtttgcagaggtagcagtgactgtggcccggaggcatgggggcagggttgcggatccggagtcagggagctgccctctttgtcagacctggaccttccctcccccataggcttccagtactcccttgacccctacttactggatgacatcccaataatccctgaaaccttggtttcccaccctgctgtctttgggatggtggctccctcactccggttctgtcccctacacagagtaagcgtaaatttgagcgggactgccgggaggcagagaaggcagcccagactgctgaacggctagaccaggatatcaacgccaccaaggctgatgtggagaaggccaagcagcaagcccaccttcggagtcacatggccgaagaaagcaaaaacgaatatgcggctcaactgcagcgcttcaaccgagaccaagcccacttctatttttcacagatgccccagatattcgatgtgagtgctcccagttctcagacctaccttc

SEQ ID NO: 27217 - protein, 47 aa, Homo sapiens
MWRRPSSKPTFGVTWPKKAKTNMRLNCSASTETKPTSIFHRCPRYSM

SEQ ID NO: 27218 - DNA, 847 bp, Homo sapiens
caaaatggccggagccgagcggcagaaagaaaagatgtaaaacatgagtatgtacatcaatggtggaacgatggtagaaggcacagcgggtccgtccggtgtgacaggtagtcacgactataatggacctttggaaaagaccagatctgagctcaacttccttccagttattttttatctttttttgagacacagtctcactctgtcgcccaggctggaatgcagtggcgcaatctcggctcacagcaacctgtgcctcccgggatcaagtgattctcgtgcctcagcctctggagtagctgggactacaggcacacgccaccacgcctggctaatttttatatttttagtagagacaggatttccatatgttggccaagctggtctcaaactcggtctcaagccatctgcctgcctcggcctcccaaagtgcttggattacaggcataaaccactgcaccctgccaacttcattccagttctaatacctgatccactttacagatgaagaaactgaggaattaaaaggtaaaacaggctgcccaagtcctgagatgaagctggaaatcaagtccagtttgtcgtgactctagaacatgcacccttaacccctccaccgtagaaactcaggaactagagagttctgaatggaactttacaccaataaaagccattctgtccaagaggttacatgcaaatggcaaaatataatttggctgcctgtttgcaagtggcaaacatcattcctattatgtaacagaactgggaagaggattttgttgcctggaaagagtgagtaaagattttttttttaatctgccagatttttttattgtcaatattttaa

SEQ ID NO: 27219 - protein, 154 aa, Homo sapiens
MSMYINGGTMVEGTAGPSGVTGSHDYNGPLEKTRSELNFLPVIFYLFLRHSLTLSPRLECSGAISAHSNLCLPGSSDSRASASGVAGTTGTRHHAWLIFIFLVETGFPYVGQAGLKLGLKPSACLGLPKCLDYRHKPLHPANFIPVLIPDPLYR

SEQ ID NO: 27220 - DNA, 579 bp, Homo sapiens
acagctctgaagagcctccctcagaagagagccaggacacccccatttacacggagtttgatgaggatttcgaggaggaacccacatcccccataggtcactgtgtggccatctaccactttgaagggtccagcgagggcactatctctatggccgagggtgaagacctcagtcttatggaagaagacaaaggggacggctggacccgggtcaggcggaaagagggaggcgagggctacgtgcccacctcctacctccgagtcacgctcaattgaaccctgccagagacgggaagaggggggctgtcggctgctgcttctgggccacggggagccccaggacctatgcactttatttctgaccccgtggcttcggctgagacctgtgtaacctgctgccccctccacccccaacccagtcctacctgtcacaccggacggacccgctgtgccttctaccatcgttccaccattgatgtacatactcatgttttacatcttttctttctgccgctcggctccggccattttgttttatacaaaaatgggaaaaaaaaaaaagaaattatataaagttcct

SEQ ID NO: 27221 - protein, 75 aa, Homo sapiens; identical to SEQ ID NO: 27213

SEQ ID NO: 27222 - DNA, 2338 bp, Homo sapiens
cgggggtgacagcagcccggagccgcggagcctcagcttccgcctggacccagcctcgtgggagccccgcgggtcctgcccagatgtggaagactgaggcctgttgaaagtgcagagctcagccctggcaccctctgttcccaagagctccatgcaggtgccacaggatggagaagaccttgctggccaaccttggtaccacggcctcctgtcccgccagaaggctgaagctcttcttcagcaaaatggcgacttcctggttcgcgcctctgggtcccgtgggggcaaccccgtgatctcctgccgctggcggggctcagccctccattttgaggtgttccgtgtggccctgcgtccccggccaggccgacccacagccctctttcaactggaggatgagcaattccccagcataccggctctggttcacagttatatgacaggcaggcgcccactgtcccaggccacaggggctgtggtctccaggcctgtgacttggcaggggcctctgcgacgcagctttagcgaggacaccctgatggatggcccagctcggatagagcctctcagggcaaggaagtggagcaacagtcagcctgcagatttggcacatatggggcggtcaagagaagaccccgctgggatggaagcctccaccatgcccatatctgccttgccccgaacgagcagtgacccggtgttgctgaaggcccctgctcccctgggaactgttgccgacagtctcagggcctccgatgggcagcttcaagccaaggcaccaacgaagcccccccggacaccctccttcgaactgcctgatgcctctgaacgtcccccgacgtactgcgagctggtgccccgagtgcccagtgtccagggaacatccccgagccaaagctgcccagagccagaggccccatggtgggaggccgaggaggatgaggaggaagagaatagatgttttacaagaccacaggctgagatctctttctgcccccatgatgccccctcctgcctgctgggcccccagaatcggcccctggaaccccaagtcctgcataccctccgtggcctgttcctggagcaccatcctgggagcaccgcccttcacctgctattggtagactgccaggccacaggcctcctgggagtgaccagagatcagcggggcaacatgggagtctcatctggcctggagctgctcactcttccccatggacaccacttgaggttggaactgctggagagacccttgccctccacctctgcaggcatcagacactggcgctggccggggcgctggcggtgctgggctgctcggggccgctggaggagcgcgcagccgcactgaggggactggtagagctggcgctggcgctgcggccaggggcggcgggggacctgcccgggctggctgcagtcatgggcgccctgctcatgccccaggtgtcccggttggagcacacgtggcgccagctccgaaggagccacacggaggctgcgctggcctttgagcaggagctgaagccgctgatgcgggctctggatgagggcgctggaccctgcgaccccggcgaggtggcgctgccgcacgtggcacccatggttcgcctactggagggcgaggaagtcgcggggccgctggacgagagctgtgagcggctgttgcgcaccctgcacggggcgcgtcacatggtccgggacgcacccaaattccgcaaggtggcagcccagcgcctgcgaggattccggcctaacccggagctgagggaggccctgaccaccggcttcgtgcggaggctgctctggggtagccggggcgcgggagctccgcgcgctgaacgctttgagaagttccagcgcgtcctcggcgtcctgtcgcagcgcctggagcctgaccgctgagagcgcagacacccttcttcacacccgggacccccaggtttttgcgaaccccagaagagaccaaaggagtcgtcccaggctcctcgcgcctcaggtggaatcctgccctgtgcctcacagaagaggtggggaccgcagtcagggtcacctggaccatggtgaacatgtgacctgcagatctggcatcagaggccagagttcaaatgtgactccacctcttaaaagccgtgatttctagcagttgacttcacctctgtgtcggcctttaacaaaatcatagccatacagcagctcaggcctgtaatctcagcactttgggaggccgaggcggaaggaaggcttgaggccaggagttcaagaccagccagggcaacatggtgagacctcatctctacaaaaactgaaaaataaaaaacttttaaaaaatgtaaaa

SEQ ID NO: 27223 - protein, 399 aa, Homo sapiens
MQVPQDGEDLAGQPWYHGLLSRQKAEALLQQNGDFLVRASGSRGGNPVISCRWRGSALHFEVFRVALRPRPGRPTALFQLEDEQFPSIPALVHSYMTGRRPLSQATGAVVSRPVTWQGPLRRSFSEDTLMDGPARIEPLRARKWSNSQPADLAHMGRSREDPAGMEASTMPISALPRTSSDPVLLKAPAPLGTVADSLRASDGQLQAKAPTKPPRTPSFELPDASERPPTYCELVPRVPSVQGTSPSQSCPEPEAPWWEAEEDEEEENRCFTRPQAEISFCPHDAPSCLLGPQNRPLEPQVLHTLRGLFLEHHPGSTALHLLLVDCQATGLLGVTRDQRGNMGVSSGLELLTLPHGHHLRLELLERPLPSTSAGIRHWRWPGRWRCWAARGRWRSAQPH

SEQ ID NO: 27224 - DNA, 3592 bp, Homo sapiens
aaggacagagatttccatctgttttgttcaatgctatgtctctagggcctagaacagagcctgggaccccataaggtgctgaataaataggggttcagtgaattcattaattacatttctgcaagatggggtggcatgttgtcatcttcagccattttttttttcttcgattgcattatatttggaacaggcacgatggtgacatctgtaatcccaactacttgggaggctgaggctagaggattccttgagcccaggaattcaaggctaaagtgtgctatgatcacacctgtgaatagcactgcactccagcctgggcaacacataagacctctctctttaaatgtaaaaaaaaaagtctgcgtgcagtggcttatgcctgtaatcccagcactttgggaggctgaggcaggtggatcacctgaggtcaggagttcaagaccagcctggcgaacacagtgaaaccctgtctctactacaaatataaaaaaagaaaaaacattagctgggtgtggtggtgcatgcctgtaatcccagctacttgggaggctgaggcaggagaatcgcttgaatctgggaggcagaggttgcagtgagccaagatcgcaccattgcactccagcctgggtgatagaatgagactctgtctcaaaaaaaaaaaaaaaaaaaaaaaaagatttgatggagctgtctccaaaattaagaagaggatgaaaggagctgacccagacactcaagcagggctaattattccccttttacagatgtggaagactgaggcctgttgaaagtgcagagctcagccctggcaccctctgttcccaagagctccatgcaggtgccacaggatggagaagaccttgctggccaaccttggtaccacggcctcctgtcccgccagaaggctgaagctcttcttcagcaaaatggcgacttcctggttcgcgcctctgggtcccgtgggggcaaccccgtgatctcctgccgctggcggggctcagccctccattttgaggtgttccgtgtggccctgcgtccccggccaggccgacccacagccctctttcaactggaggatgagcaattccccagcataccggctctggttcacagttatatgacaggcaggcgcccactgtcccaggccacaggggctgtggtctccaggcctgtgacttggcaggggcctctgcgacgcagctttagcgaggacaccctgatggatggcccagctcggatagagcctctcagggcaaggaagtggagcaacagtcagcctgcagatttggcacatatggggcggtcaagagaagaccccgctgggatgggtaagtgtctgctagaatggcctgtggctcagggattggctctgccactcaccacctaagagatcttggtcaggtgcaggcacctcttcgagcctcaatttcttgctttagaaaatgatgacaatcacgatgacttaaaacatgcagggactttgtgggtgcttaaaatgtgtgtttacaaggctgagcgcggtggctcatgcctgtaatcccagcactttgggaggccgaggccggtggatcacttgaggtcaggaattcgagaccagccttgccaacatggtgaaaccccatctccactaaaaacacaaaattagccgagcgtggtggcacgcacctgtaatcccagctactctggaggctgcggcaggagaatcgcttgaacctgggaggtggaggttgcagtgagccgagatggcgctaccgcactccagactgggtgacagaacaaaactccatctcaaaaaaaaaaaaaagtgtttacaattattccaaggagctgtacctgttctgaccacagcttaccttgctaacaacttctgctacgtaccctcctcatgctggtcacacagccctccttgcagttgttcgaaccctcaggcttttattcccgcctcggggcctttgcattttacatttccaccagtgacgggaacattctcattcccctaattttttcctgagtggctcctctccatccagggtaagttcctcaaagcagttgagtctgacggtcttacctaaaggaggactcacctgaatgccccctcatgccccttttttcccatccttctcccaaccccattcaacatgagccgtccctgcatcccaggccctgcacggagtgctaggatacatcaacaaaccagaaagagacaaagatccctgcccgatgggagccaacagtccacgagaggacaacaaaccatgaaccacaaaaataaggcaattttgtttgcttcaagatgaaaattaaaacacaggaagggaaggccaggcacagtggctcaggcctgtaatcccagcactttggaaggccaaggcgggcggatcacctaaagtcaggagttcgagaccagcctggccaacatggcgaaaccccgtctctactaaaactacaaaaattagccgggcgtggtggtacacacctgtaatcccagctactcgggagactcgggaggctgaggcacgagaattgcttgaacccgggaggcagaggttgccgtgagccaagattgcaccactgcactccagcctggacaacagagtgagactctgtctcaaaaaacaaacaaacaaacaaaaaacagtaagggaagggtgaggtggctcaggtctgtaatcctagcactttgggaggccaaggtgggcggatcacttgaggtcaggagttcgagaccagcctggccaacatggtgaaaacccatctctactaaaaaaaaataaaataaaataaaatacaaaaattagccaggtgtagtggcatatgcctgtaatccaagctacttgggacagagtgagactgtctcaaaaaaaccgaaaaaacaaaaacaaaacaaaacaaaaaaaacagagtaagggagatagagactataaagatggagatgtatattgcaattttattttatttctatttatttatttatttttgagatagagttttgctcttgttgcccaggatggagtgcaatggcgtgataccggctcactgcaacctccacctcctgggttcaagtgattctcctgcctcagcctcccgagtagctgggattacaggcatgtgcaccacgccctgctaattttgtatttttagtggagatggggtttccccatgttggtcaggctggtctcgaactcctgacctcaggtgatccacccacctcaacctcccaaagtgctgggattacaggcgtgagccattgtacccaagcaagcaattttaagtggtagtcaggaaaggccccattgcagaaaaaaataaaattgaaggaaatgagggagggaacaggtggataactgggggataagcaggcaggaggaagaggcagtgcaaaggctcttgggtcagaacaagaatttaagctgttcattcaaccaaaaaatgagtgggtagctgggtgtggtgttgcacgcctgtggtcctagccacttgggaggttgaagcaggaggactccttgaacccagaaagtcaaggctgcagtgagccgtgatcgcaccattgcactccagcctgggccacagagtgagaccctgactcaaattt

SEQ ID NO: 27225 - protein, 184 aa, Homo sapiens
MQVPQDGEDLAGQPWYHGLLSRQKAEALLQQNGDFLVRASGSRGGNPVISCRWRGSALHFEVFRVALRPRPGRPTALFQLEDEQFPSIPALVHSYMTGRRPLSQATGAVVSRPVTWQGPLRRSFSEDTLMDGPARIEPLRARKWSNSQPADLAHMGRSREDPAGMGKCLLEWPVAQGLALPLTT

SEQ ID NO: 27226 - DNA, 2893 bp, Homo sapiens
actagctgtcgctccacaggcgagcagggcaggcgtgcgggcgggtgggtggtggaggctgcgagggtgcacggccggccctgggcaggcggtagccatggagctgtggcgccaatgcacccactggctcatccagtgccgggtgctgccgcccagccaccgcgtgacctgggatggggctcaggtgtgtgaactggcccaggccctccgggatggtgtccttctgtgtcagctgcttaacaacctgctaccccatgccatcaacctgcgtgaggtcaacctgcgcccccagatgtcccagttcctgtgccttaagaacattagaaccttcctgtccacctgctgtgagaagttcggcctcaagcggagcgagctcttcgaagcctttgacctcttcgatgtgcaggattttggcaaggtcatctacaccctgtctgctctgtcctggaccccgatcgcccagaacagggggatcatgcccttccccaccgaggaggagagtgtaggtgatgaagacatctacagtggcctgtccgaccagatcgacgacacggtggaggaggatgaggacctgtatgactgcgtggagaatgaggaggcggaaggcgacgagatctatgaggacctcatgcgctcggagcccgtgtccatgccgcccaagatgacagagtatgacaagcgctgctgctgcctgcgggagatccagcagacggaggagaagtacactgacacgctgggctccatccagcagcatttcttgaagcccctgcaacggttcctgaaacctcaagacattgagatcatctttatcaacattgaggacctgcttcgtgttcatactcacttcctaaaggagatgaaggaagccctgggcacccctggcgcagccaatctctaccaggtcttcatcaaatacaaggagaggttcctcgtctatggccgctactgcagccaggtggagtcagccagcaaacacctggaccgtgtggccgcagcccgggaggacgtgcagatgaagctggaggaatgttctcagagagccaacaacgggaggttcaccctgcgggacctgctgatggtgcctatgcagcgagttctcaaatatcacctccttctccaggagctggtgaaacacacgcaggaggcgatggagaaggagaacctgcggctggccctggatgccatgagggacctggctcagtgcgtgaacgaggtcaagcgagacaacgagacactgcgacagatcaccaatttccagctgtccattgagaacctggaccagtctctggctcactatggccggcccaagatcgacggggaactcaagatcacctcggtggaacggcgctccaagatggacaggtatgccttcctgctcgacaaagctctactcatctgtaagcgcaggggagactcctatgacctcaaggactttgtaaacctgcacagcttccaggttcgggatgactcttcaggagaccgagacaacaagaagtggagccacatgttcctcctgatcgaggaccaaggtgcccagggctatgagctgttcttcaagacaagagaattgaagaagaagtggatggagcagtttgagatggccatctccaacatctatccggagaatgccaccgccaacgggcatgacttccagatgttctcctttgaggagaccacatcctgcaaggcctgtcagatgctgcttagaggtaccttctatcagggctaccgctgccatcggtgccgggcatctgcacacaaggagtgtctggggagggtccctccatgtggccgacatgggcaagatttcccaggaactatgaagaaggacaaactacatcgcagggctcaggacaaaaagaggaatgagctgggtctgcccaagatggaggtgtttcaggaatactacgggcttcctccaccccctggagccattggaccctttctacggctcaaccctggagacattgtggagctcacgaaggctgaggctgaacagaactggtgggagggcagaaatacatctactaatgaaattggctggtttccttgtaacagggtgaagccctatgtccatggccctcctcaggacctgtctgttcatctctggtacgcaggccccatggagcgggcaggggcagagagcatcctggccaaccgctcggacgggactttcttggtgcggcagagggtgaaggatgcagcagaatttgccatcagcattaaatataacgtcgaggtcaagcacattaaaatcatgacagcagaaggactgtaccggatcacagagaaaaaggctttccgggggcttacggagctggtggagttttaccagcagaactctctaaaggattgcttcaagtctctggacaccaccttgcagttccccttcaaggagcctgaaaagagaaccatcagcaggccagcagtgggaagcacaaagtattttggcacagccaaagcccgctatgacttctgcgcccgagaccgatcagagctgtcgctcaaggagggtgacatcatcaagatccttaacaagaagggacagcaaggctggtggcgaggggagatctatggccgggttggctggttccctgccaactacgtggaggaagattattctgaatactgctgagccctggtgccttggcagagagacgagaaactccaggctctgagcccggcgtgggcaggcagcggagccaggggctgtgacagctcccggcgggtggagactttgggatggactggaggaggccagcgtccagctggcggtgctcccgggatgtgccctgacatggttaatttataacaccccgatttcctcttgggtcccctcaagcagacggggctcaagggggttacatttaataaaaggatgaagatggataga

SEQ ID NO: 27227 - protein, 845 aa, Homo sapiens; identical to SEQ ID NO: 3689

SEQ ID NO: 27228 - DNA, 2716 bp, Homo sapiens
gtggtgcacgcctatagtctcagctactcaggaagttgaggcaggaggatcgcttgagcccaggagtttgatgctgcagtgagctatgattgtgctaccactgtactccagactggacaaaagattcctgtgccttaagaacattagaaccttcctgtccacctgctgtgagaagttcggcctcaagcggagcgagctcttcgaagcctttgacctcttcgatgtgcaggattttggcaaggtcatctacaccctgtctgctctgtcctggaccccgatcgcccagaacagggggatcatgcccttccccaccgaggaggagagtgtaggtgatgaagacatctacagtggcctgtccgaccagatcgacgacacggtggaggaggatgaggacctgtatgactgcgtggagaatgaggaggcggaaggcgacgagatctatgaggacctcatgcgctcggagcccgtgtccatgccgcccaagatgacagagtatgacaagcgctgctgctgcctgcgggagatccagcagacggaggagaagtacactgacacgctgggctccatccagcagcatttcttgaagcccctgcaacggttcctgaaacctcaagacattgagatcatctttatcaacattgaggacctgcttcgtgttcatactcacttcctaaaggagatgaaggaagccctgggcacccctggcgcagccaatctctaccaggtcttcatcaaatacaaggagaggttcctcgtctatggccgctactgcagccaggtggagtcagccagcaaacacctggaccgtgtggccgcagcccgggaggacgtgcagatgaagctggaggaatgttctcagagagccaacaacgggaggttcaccctgcgggacctgctgatggtgcctatgcagcgagttctcaaatatcacctccttctccaggagctggtgaaacacacgcaggaggcgatggagaaggagaacctgcggctggccctggatgccatgagggacctggctcagtgcgtgaacgaggtcaagcgagacaacgagacactgcgacagatcaccaatttccagctgtccattgagaacctggaccagtctctggctcactatggccggcccaagatcgacggggaactcaagatcacctcggtggaacggcgctccaagatggacaggtatgccttcctgctcgacaaagctctactcatctgtaagcgcaggggagactcctatgacctcaaggactttgtaaacctgcacagcttccaggttcgggatgactcttcaggagaccgagacaacaagaagtggagccacatgttcctcctgatcgaggaccaaggtgcccagggctatgagctgttcttcaagacaagagaattgaagaagaagtggatggagcagtttgagatggccatctccaacatctatccggagaatgccaccgccaacgggcatgacttccagatgttctcctttgaggagaccacatcctgcaaggcctgtcagatgctgcttagaggtaccttctatcagggctaccgctgccatcggtgccgggcatctgcacacaaggagtgtctggggagggtccctccatgtggccgacatgggcaagatttcccaggaactatgaagaaggacaaactacatcgcagggctcaggacaaaaagaggaatgagctgggtctgcccaagatggaggtgtttcaggaatactacgggcttcctccaccccctggagccattggaccctttctacggctcaaccctggagacattgtggagctcacgaaggctgaggctgaacagaactggtgggagggcagaaatacatctactaatgaaattggctggtttccttgtaacagggtgaagccctatgtccatggccctcctcaggacctgtctgttcatctctggtacgcaggccccatggagcgggcaggggcagagagcatcctggccaaccgctcggacgggactttcttggtgcggcagagggtgaaggatgcagcagaatttgccatcagcattaaatataacgtcgaggtcaagcacattaaaatcatgacagcagaaggactgtaccggatcacagagaaaaaggctttccgggggcttacggagctggtggagttttaccagcagaactctctaaaggattgcttcaagtctctggacaccaccttgcagttccccttcaaggagcctgaaaagagaaccatcagcaggccagcagtgggaagcacaaagtattttggcacagccaaagcccgctatgacttctgcgcccgagaccgatcagagctgtcgctcaaggagggtgacatcatcaagatccttaacaagaagggacagcaaggctggtggcgaggggagatctatggccgggttggctggttccctgccaactacgtggaggaagattattctgaatactgctgagccctggtgccttggcagagagacgagaaactccaggctctgagcccggcgtgggcaggcagcggagccaggggctgtgacagctcccggcgggtggagactttgggatggactggaggaggccagcgtccagctggcggtgctcccgggatgtgccctgacatggttaatttataacaccccgatttcctcttgggtcccctcaagcagacggggctcaagggggttacatttaataaaaggatgaagatggataga

SEQ ID NO: 27229 - protein, 790 aa, Homo sapiens
MIVLPLYSRLDKRFLCLKNIRTFLSTCCEKFGLKRSELFEAFDLFDVQDFGKVIYTLSALSWTPIAQNRGIMPFPTEEESVGDEDIYSGLSDQIDDTVEEDEDLYDCVENEEAEGDEIYEDLMRSEPVSMPPKMTEYDKRCCCLREIQQTEEKYTDTLGSIQQHFLKPLQRFLKPQDIEIIFINIEDLLRVHTHFLKEMKEALGTPGAANLYQVFIKYKERFLVYGRYCSQVESASKHLDRVAAAREDVQMKLEECSQRANNGRFTLRDLLMVPMQRVLKYHLLLQELVKHTQEAMEKENLRLALDAMRDLAQCVNEVKRDNETLRQITNFQLSIENLDQSLAHYGRPKIDGELKITSVERRSKMDRYAFLLDKALLICKRRGDSYDLKDFVNLHSFQVRDDSSGDRDNKKWSHMFLLIEDQGAQGYELFFKTRELKKKWMEQFEMAISNIYPENATANGHDFQMFSFEETTSCKACQMLLRGTFYQGYRCHRCRASAHKECLGRVPPCGRHGQDFPGTMKKDKLHRRAQDKKRNELGLPKMEVFQEYYGLPPPPGAIGPFLRLNPGDIVELTKAEAEQNWWEGRNTSTNEIGWFPCNRVKPYVHGPPQDLSVHLWYAGPMERAGAESILANRSDGTFLVRQRVKDAAEFAISIKYNVEVKHIKIMTAEGLYRITEKKAFRGLTELVEFYQQNSLKDCFKSLDTTLQFPFKEPEKRTISRPAVGSTKYFGTAKARYDFCARDRSELSLKEGDIIKILNKKGQQGWWRGEIYGRVGWFPANYVEEDYSEYC

SEQ ID NO: 27230 - DNA, 802 bp, Homo sapiens
agtttttggatattgtgtataaagctgcaacttttgaaggactttttttttgttttttgtttttttgtttagttttgttttgagacagagtctcactccatcgcccaggctggagtgcagtggcatgatctcagctcactgaaacctctgcctcctgggagttcaagtgattctcctgcctcagcctcccaagtagctgggattacaggtgcccaccaccacacccagctaatttctgtagttttagtagagatggggtttcaccatgttggccagtctggtctcaaactcctgacctcaggtgatcttcctgcctcggcctcccaaagtgctgggattacagacatgagccaccgtgcccagccaggacacatgttttcatttctcttgggttgctgggttacagagtagatacaatgtttagcttcagtagatattgccaaatagttttacaaagagtatccccaccagcaatgagtgaaaattccagtttctccacgtccttgtcaacacttagtattgccagtctaaaaagaaaaattttagccattctcgtgggtggcaagattcagggttgaaagttgactgccaaccaccctgtactcctgtaccctgtcctccaggtctgcccaagatggaggtgtttcaggaatactacgggcttcctccaccccctggagccattggaccctttctacggctcaaccctggagacattgtggagctcacgaaggctgaggctgaacagaactggtgggagggcagaaatacatctactaatgaaattggctggtttccttgt

SEQ ID NO: 27231 - protein, 55 aa, Homo sapiens
MEVFQEYYGLPPPPGAIGPFLRLNPGDIVELTKAEAEQNWWEGRNTSTNEIGWFP

SEQ ID NO: 27232 - DNA, 7326 bp, Homo sapiens
tcccgccgcccgcccgccacccgccagcccaggtgcccgcccgccagtcagctagtccgtcggtccgcgcgtccctctgtcccggagcccgcagatcgcgacccagagcgcgcggggccgagagccgagagacagtcccgggcgcagcgcggagctccgggccccgagatcctgggacggggcccgggccgcagcggccggggggtcggggccaccaccgcaagggcctccgctcagtatttgtagctggcgaagccgcgcgcgcccttcccggggctgcctctgggccctccccggcaggggggctgcggcccgcgggtcgcgggcgtggaagagaaggacgcgcggcccccagcgcctcttgggtggccgcctcggagcatgacccccgcgggccagcgccgcgcgctctgatccgaggagaccccgcgctcccgcagccatggccaccgggggccggcggggggcggcggccgcgccgctgctggtggcggtggccgcgctgctactgggcgccgcgggccacctgtaccccggagaggtgtgtcccggcatggatatccggaacaacctcactaggttgcatgagctggagaattgctctgtcatcgaaggacacttgcagatactcttgatgttcaaaacgaggcccgaagatttccgagacctcagtttccccaaactcatcatgatcactgattacttgctgctcttccgggtctatgggctcgagagcctgaaggacctgttccccaacctcacggtcatccggggatcacgactgttctttaactacgcgctggtcatcttcgagatggttcacctcaaggaactcggcctctacaacctgatgaacatcacccggggttctgtccgcatcgagaagaacaatgagctctgttacttggccactatcgactggtcccgtatcctggattccgtggaggataattacatcgtgttgaacaaagatgacaacgaggagtgtggagacatctgtccgggtaccgcgaagggcaagaccaactgccccgccaccgtcatcaacgggcagtttgtcgaacgatgttggactcatagtcactgccagaaagtttgcccgaccatctgtaagtcacacggctgcaccgccgaaggcctctgttgccacagcgagtgcctgggcaactgttctcagcccgacgaccccaccaagtgcgtggcctgccgcaacttctacctggacggcaggtgtgtggagacctgcccgcccccgtactaccacttccaggactggcgctgtgtgaacttcagcttctgccaggacctgcaccacaaatgcaagaactcgcggaggcagggctgccaccagtacgtcattcacaacaacaagtgcatccctgagtgtccctccgggtacacgatgaattccagcaacttgctgtgcaccccatgcctgggtccctgtcccaaggtgtgccacctcctagaaggcgagaagaccatcgactcggtgacgtctgcccaggagctccgaggatgcaccgtcatcaacgggagtctgatcatcaacattcgaggaggcaacaatctggcagctgagctagaagccaacctcggcctcattgaagaaatttcagggtatctaaaaatccgccgatcctacgctctggtgtcactttccttcttccggaagttacgtctgattcgaggagagaccttggaaattgggaactactccttctatgccttggacaaccagaacctaaggcagctctgggactggagcaaacacaacctcaccatcactcaggggaaactcttcttccactataaccccaaactctgcttgtcagaaatccacaagatggaagaagtttcaggaaccaaggggcgccaggagagaaacgacattgccctgaagaccaatggggaccaggcatcctgtgaaaatgagttacttaaattttcttacattcggacatcttttgacaagatcttgctgagatgggagccgtactggccccccgacttccgagacctcttggggttcatgctgttctacaaagaggccccttatcagaatgtgacggagttcgacgggcaggatgcgtgtggttccaacagttggacggtggtagacattgacccacccctgaggtccaacgaccccaaatcacagaaccacccagggtggctgatgcggggtctcaagccctggacccagtatgccatctttgtgaagaccctggtcaccttttcggatgaacgccggacctatggggccaagagtgacatcatttatgtccagacagatgccaccaacccctctgtgcccctggatccaatctcagtgtctaactcatcatcccagattattctgaagtggaaaccaccctccgaccccaatggcaacatcacccactacctggttttctgggagaggcaggcggaagacagtgagctgttcgagctggattattgcctcaaagggctgaagctgccctcgaggacctggtctccaccattcgagtctgaagattctcagaagcacaaccagagtgagtatgaggattcggccggcgaatgctgctcctgtccaaagacagactctcagatcctgaaggagctggaggagtcctcgtttaggaagacgtttgaggattacctgcacaacgtggttttcgtccccaggccatctcggaaacgcaggtcccttggcgatgttgggaatgtgacggtggccgtgcccacggtggcagctttccccaacacttcctcgaccagcgtgcccacgagtccggaggagcacaggccttttgagaaggtggtgaacaaggagtcgctggtcatctccggcttgcgacacttcacgggctatcgcatcgagctgcaggcttgcaaccaggacacccctgaggaacggtgcagtgtggcagcctacgtcagtgcgaggaccatgcctgaagccaaggctgatgacattgttggccctgtgacgcatgaaatctttgagaacaacgtcgtccacttgatgtggcaggagccgaaggagcccaatggtctgatcgtgctgtatgaagtgagttatcggcgatatggtgatgaggagctgcatctctgcgtctcccgcaagcacttcgctctggaacggggctgcaggctgcgtgggctgtcaccggggaactacagcgtgcgaatccgggccacctcccttgcgggcaacggctcttggacggaacccacctatttctacgtgacagactatttagacgtcccgtcaaatattgcaaaaattatcatcggccccctcatctttgtctttctcttcagtgttgtgattggaagtatttatctattcctgagaaagaggcagccagatgggccgctgggaccgctttacgcttcttcaaaccctgagtatctcagtgccagtgatgtgtttccatgctctgtgtacgtgccggacgagtgggaggtgtctcgagagaagatcaccctccttcgagagctggggcagggctccttcggcatggtgtatgagggcaatgccagggacatcatcaagggtgaggcagagacccgcgtggcggtgaagacggtcaacgagtcagccagtctccgagagcggattgagttcctcaatgaggcctcggtcatgaagggcttcacctgccatcacgtggtgcgcctcctgggagtggtgtccaagggccagcccacgctggtggtgatggagctgatggctcacggagacctgaagagctacctccgttctctgcggccagaggctgagaataatcctggccgccctccccctacccttcaagagatgattcagatggcggcagagattgctgacgggatggcctacctgaacgccaagaagtttgtgcatcgggacctggcagcgagaaactgcatggtcgcccatgattttactgtcaaaattggagactttggaatgaccagagacatctatgaaacggattactaccggaaagggggcaagggtctgctccctgtacggtggatggcaccggagtccctgaaggatggggtcttcaccacttcttctgacatgtggtcctttggcgtggtcctttgggaaatcaccagcttggcagaacagccttaccaaggcctgtctaatgaacaggtgttgaaatttgtcatggatggagggtatctggatcaacccgacaactgtccagagagagtcactgacctcatgcgcatgtgctggcaattcaaccccaagatgaggccaaccttcctggagattgtcaacctgctcaaggacgacctgcaccccagctttccagaggtgtcgttcttccacagcgaggagaacaaggctcccgagagtgaggagctggagatggagtttgaggacatggagaatgtgcccctggaccgttcctcgcactgtcagagggaggaggcggggggccgggatggagggtcctcgctgggtttcaagcggagctacgaggaacacatcccttacacacacatgaacggaggcaagaaaaacgggcggattctgaccttgcctcggtccaatccttcctaacagtgcctaccgtggcgggggcgggcaggggttcccattttcgctttcctctggtttgaaagcctctggaaaactcaggattctcacgactctaccatgtccaatggagttcagagatcgttcctatacatttctgttcatcttaaggtggactcgtttggttaccaatttaactagtcctgcagaggatttaactgtgaacctggagggcaaggggtttccacagttgctgctcctttggggcaacgacggtttcaaaccaggattttgtgttttttcgttccccccacccgcccccagcagatggaaagaaagcacctgtttttacaaattctttttttttttttttttttttgctggtgtctgagcttcagtataaaagacaaaacttcctgtttgtggaacaaaagttcgaaagaaaaaacaaaacaaaaacacccagccctgttccaggagaatttcaagttttacaggttgagcttcaagatggtttttttggttttttttttttctctcatccaggctgaaggattttttttttctttacaaaatgagttcctcaaattgaccaatagctgctgctttcatattttggataagggtctgtggtcccggcgtgtgctcacgtgtgtatgcacgtgtgtgtgtccattagacacggctgatgtgtgtgcaaagtatccatgcggagttgatgctttgggaattggctcatgaaggttcttctcaagggtgcgagctcatccccctctctccttccttcttattgactgggagactgtgctctcgacagattcttcttgtgtcagaagtctagcctcaggtttctaccctcccttcacattggtggccaagggaggagcatttcatttggagtgattatgaatcttttcaagaccaaaccaagctaggacattaaaaaaaaaaaaagaaaaagaaagaaaaaacaaaatggaaaaaggaaaaaaaaaaagaactgagatgacagagttttgagaatatatttgtaccatatttaatttttaaagtctctggtattagcctcataagttattgactattccccggggttggcggggagtggggacatgagttggtctgcctgttgtggggccgggaaggggagggagtcaggcacaagtggcctctttgtttggtcttaaaggcatccatttctgggaatgaagccatgttcgctgctaacacttttggatgttgtgaggccacgtggagtgtgtgagagactaggttttatggatggtctggttcaggtaccaggtctgctggaaggttcctgttcggataagctggtagctacctagctctgagcctgccttcaagaacacctgtgttcatcctctgattctctgtgtgtacctcttgtggcgtttcctctcccgggtgtgaacatcctaaccgttattgtgcaaacccaagaacgtcagatcccaaagcacaacaacctggatggactttgggaacatctaagcaatgtaagagagaggtgcactgagagtacgtcttggtcccctccaccctgagagcatctgacggtcctcagtactgaactcccggaagctgctctgagcccggtgacctcatctgggccaggtgtggtgcctgagctgaatgctcaggtgcttacagtgttgcaatccctaagagagtagagtctggaggagaaaccgtgaaaaagaccttacacaccaccaagaacttccgaatgggcgtgaatccaccgtttcttctctttgcaaaaagaaccaccacagctgctcaaagaacacagtgaactcatcactttggttcatcaaaaaatcatcgcccatgcgttattcctgagtgcattttcttacaactttttgactgcttccttttcttcttctcttaagagttgtgggcttaagaatgggatagagtcataatggcaacctccaagccctctcaattcttgattaagaacacaggtagacatgaatcccaattgtctattgctatcttatttatatgattcgggaaaatacagcatgtaaaaatattgctgaggagcctcagtgattgggtacaagaagcaagagtacagaaattatttttgccaaatttattttgtaaatatgagggtctgtacctaaatttaaaaaaaaaacacgtagaactaggtattttgttctcttcttagtaaatttgtagtggttgtatactacactagctgcaattttcacatttttctaattcagaaaggtttttcttatattaggggaaaaagtatttattttaatatataaaatcactctgaaaatcactctcataaaaaatggagcgcatgtaaatttttatcaaagaaaaataaacaggtgaatgggggatagtgattttcttttttcagcacagtctacctcagtgtattgttaagatgtgattcaatcatggacatctttgagatttcagaattctacctggaaccggtctgaatcagggaacgtgtgtatcagctgattcgaatgccagggaccagtaagaattttgagggagggagttgggatggagaaggtatggcctttatgcgagcatagatccttttcttcctggctggtaatattcttctctgaatttaatcttcctttaaaaaaaaatcctccatctattgtcactatgttccccaaacataaactaagttccaggctgtcatgatgtatctgatatatggggtaacccagcaaggtgtaccttcctttggtgagagatggctgccggggcaaagacgggctttg

SEQ ID NO: 27233 - protein, 1370 aa, Homo sapiens
MATGGRRGAAAAPLLVAVAALLLGAAGHLYPGEVCPGMDIRNNLTRLHELENCSVIEGHLQILLMFKTRPEDFRDLSFPKLIMITDYLLLFRVYGLESLKDLFPNLTVIRGSRLFFNYALVIFEMVHLKELGLYNLMNITRGSVRIEKNNELCYLATIDWSRILDSVEDNYIVLNKDDNEECGDICPGTAKGKTNCPATVINGQFVERCWTHSHCQKVCPTICKSHGCTAEGLCCHSECLGNCSQPDDPTKCVACRNFYLDGRCVETCPPPYYHFQDWRCVNFSFCQDLHHKCKNSRRQGCHQYVIHNNKCIPECPSGYTMNSSNLLCTPCLGPCPKVCHLLEGEKTIDSVTSAQELRGCTVINGSLIINIRGGNNLAAELEANLGLIEEISGYLKIRRSYALVSLSFFRKLRLIRGETLEIGNYSFYALDNQNLRQLWDWSKHNLTITQGKLFFHYNPKLCLSEIHKMEEVSGTKGRQERNDIALKTNGDQASCENELLKFSYIRTSFDKILLRWEPYWPPDFRDLLGFMLFYKEAPYQNVTEFDGQDACGSNSWTVVDIDPPLRSNDPKSQNHPGWLMRGLKPWTQYAIFVKTLVTFSDERRTYGAKSDIIYVQTDATNPSVPLDPISVSNSSSQIILKWKPPSDPNGNITHYLVFWERQAEDSELFELDYCLKGLKLPSRTWSPPFESEDSQKHNQSEYEDSAGECCSCPKTDSQILKELEESSFRKTFEDYLHNVVFVPRPSRKRRSLGDVGNVTVAVPTVAAFPNTSSTSVPTSPEEHRPFEKVVNKESLVISGLRHFTGYRIELQACNQDTPEERCSVAAYVSARTMPEAKADDIVGPVTHEIFENNVVHLMWQEPKEPNGLIVLYEVSYRRYGDEELHLCVSRKHFALERGCRLRGLSPGNYSVRIRATSLAGNGSWTEPTYFYVTDYLDVPSNIAKIIIGPLIFVFLFSVVIGSIYLFLRKRQPDGPLGPLYASSNPEYLSASDVFPCSVYVPDEWEVSREKITLLRELGQGSFGMVYEGNARDIIKGEAETRVAVKTVNESASLRERIEFLNEASVMKGFTCHHVVRLLGVVSKGQPTLVVMELMAHGDLKSYLRSLRPEAENNPGRPPPTLQEMIQMAAEIADGMAYLNAKKFVHRDLAARNCMVAHDFTVKIGDFGMTRDIYETDYYRKGGKGLLPVRWMAPESLKDGVFTTSSDMWSFGVVLWEITSLAEQPYQGLSNEQVLKFVMDGGYLDQPDNCPERVTDLMRMCWQFNPKMRPTFLEIVNLLKDDLHPSFPEVSFFHSEENKAPESEELEMEFEDMENVPLDRSSHCQREEAGGRDGGSSLGFKRSYEEHIPYTHMNGGKKNGRILTLPRSNPS

SEQ ID NO: 27234 - DNA, 7362 bp, Homo sapiens
tcccgccgcccgcccgccacccgccagcccaggtgcccgcccgccagtcagctagtccgtcggtccgcgcgtccctctgtcccggagcccgcagatcgcgacccagagcgcgcggggccgagagccgagagacagtcccgggcgcagcgcggagctccgggccccgagatcctgggacggggcccgggccgcagcggccggggggtcggggccaccaccgcaagggcctccgctcagtatttgtagctggcgaagccgcgcgcgcccttcccggggctgcctctgggccctccccggcaggggggctgcggcccgcgggtcgcgggcgtggaagagaaggacgcgcggcccccagcgcctcttgggtggccgcctcggagcatgacccccgcgggccagcgccgcgcgctctgatccgaggagaccccgcgctcccgcagccatggccaccgggggccggcggggggcggcggccgcgccgctgctggtggcggtggccgcgctgctactgggcgccgcgggccacctgtaccccggagaggtgtgtcccggcatggatatccggaacaacctcactaggttgcatgagctggagaattgctctgtcatcgaaggacacttgcagatactcttgatgttcaaaacgaggcccgaagatttccgagacctcagtttccccaaactcatcatgatcactgattacttgctgctcttccgggtctatgggctcgagagcctgaaggacctgttccccaacctcacggtcatccggggatcacgactgttctttaactacgcgctggtcatcttcgagatggttcacctcaaggaactcggcctctacaacctgatgaacatcacccggggttctgtccgcatcgagaagaacaatgagctctgttacttggccactatcgactggtcccgtatcctggattccgtggaggataattacatcgtgttgaacaaagatgacaacgaggagtgtggagacatctgtccgggtaccgcgaagggcaagaccaactgccccgccaccgtcatcaacgggcagtttgtcgaacgatgttggactcatagtcactgccagaaagtttgcccgaccatctgtaagtcacacggctgcaccgccgaaggcctctgttgccacagcgagtgcctgggcaactgttctcagcccgacgaccccaccaagtgcgtggcctgccgcaacttctacctggacggcaggtgtgtggagacctgcccgcccccgtactaccacttccaggactggcgctgtgtgaacttcagcttctgccaggacctgcaccacaaatgcaagaactcgcggaggcagggctgccaccagtacgtcattcacaacaacaagtgcatccctgagtgtccctccgggtacacgatgaattccagcaacttgctgtgcaccccatgcctgggtccctgtcccaaggtgtgccacctcctagaaggcgagaagaccatcgactcggtgacgtctgcccaggagctccgaggatgcaccgtcatcaacgggagtctgatcatcaacattcgaggaggcaacaatctggcagctgagctagaagccaacctcggcctcattgaagaaatttcagggtatctaaaaatccgccgatcctacgctctggtgtcactttccttcttccggaagttacgtctgattcgaggagagaccttggaaattgggaactactccttctatgccttggacaaccagaacctaaggcagctctgggactggagcaaacacaacctcaccatcactcaggggaaactcttcttccactataaccccaaactctgcttgtcagaaatccacaagatggaagaagtttcaggaaccaaggggcgccaggagagaaacgacattgccctgaagaccaatggggaccaggcatcctgtgaaaatgagttacttaaattttcttacattcggacatcttttgacaagatcttgctgagatgggagccgtactggccccccgacttccgagacctcttggggttcatgctgttctacaaagaggccccttatcagaatgtgacggagttcgacgggcaggatgcgtgtggttccaacagttggacggtggtagacattgacccacccctgaggtccaacgaccccaaatcacagaaccacccagggtggctgatgcggggtctcaagccctggacccagtatgccatctttgtgaagaccctggtcaccttttcggatgaacgccggacctatggggccaagagtgacatcatttatgtccagacagatgccaccaacccctctgtgcccctggatccaatctcagtgtctaactcatcatcccagattattctgaagtggaaaccaccctccgaccccaatggcaacatcacccactacctggttttctgggagaggcaggcggaagacagtgagctgttcgagctggattattgcctcaaagggctgaagctgccctcgaggacctggtctccaccattcgagtctgaagattctcagaagcacaaccagagtgagtatgaggattcggccggcgaatgctgctcctgtccaaagacagactctcagatcctgaaggagctggaggagtcctcgtttaggaagacgtttgaggattacctgcacaacgtggttttcgtccccagaaaaacctcttcaggcactggtgccgaggaccctaggccatctcggaaacgcaggtcccttggcgatgttgggaatgtgacggtggccgtgcccacggtggcagctttccccaacacttcctcgaccagcgtgcccacgagtccggaggagcacaggccttttgagaaggtggtgaacaaggagtcgctggtcatctccggcttgcgacacttcacgggctatcgcatcgagctgcaggcttgcaaccaggacacccctgaggaacggtgcagtgtggcagcctacgtcagtgcgaggaccatgcctgaagccaaggctgatgacattgttggccctgtgacgcatgaaatctttgagaacaacgtcgtccacttgatgtggcaggagccgaaggagcccaatggtctgatcgtgctgtatgaagtgagttatcggcgatatggtgatgaggagctgcatctctgcgtctcccgcaagcacttcgctctggaacggggctgcaggctgcgtgggctgtcaccggggaactacagcgtgcgaatccgggccacctcccttgcgggcaacggctcttggacggaacccacctatttctacgtgacagactatttagacgtcccgtcaaatattgcaaaaattatcatcggccccctcatctttgtctttctcttcagtgttgtgattggaagtatttatctattcctgagaaagaggcagccagatgggccgctgggaccgctttacgcttcttcaaaccctgagtatctcagtgccagtgatgtgtttccatgctctgtgtacgtgccggacgagtgggaggtgtctcgagagaagatcaccctccttcgagagctggggcagggctccttcggcatggtgtatgagggcaatgccagggacatcatcaagggtgaggcagagacccgcgtggcggtgaagacggtcaacgagtcagccagtctccgagagcggattgagttcctcaatgaggcctcggtcatgaagggcttcacctgccatcacgtggtgcgcctcctgggagtggtgtccaagggccagcccacgctggtggtgatggagctgatggctcacggagacctgaagagctacctccgttctctgcggccagaggctgagaataatcctggccgccctccccctacccttcaagagatgattcagatggcggcagagattgctgacgggatggcctacctgaacgccaagaagtttgtgcatcgggacctggcagcgagaaactgcatggtcgcccatgattttactgtcaaaattggagactttggaatgaccagagacatctatgaaacggattactaccggaaagggggcaagggtctgctccctgtacggtggatggcaccggagtccctgaaggatggggtcttcaccacttcttctgacatgtggtcctttggcgtggtcctttgggaaatcaccagcttggcagaacagccttaccaaggcctgtctaatgaacaggtgttgaaatttgtcatggatggagggtatctggatcaacccgacaactgtccagagagagtcactgacctcatgcgcatgtgctggcaattcaaccccaagatgaggccaaccttcctggagattgtcaacctgctcaaggacgacctgcaccccagctttccagaggtgtcgttcttccacagcgaggagaacaaggctcccgagagtgaggagctggagatggagtttgaggacatggagaatgtgcccctggaccgttcctcgcactgtcagagggaggaggcggggggccgggatggagggtcctcgctgggtttcaagcggagctacgaggaacacatcccttacacacacatgaacggaggcaagaaaaacgggcggattctgaccttgcctcggtccaatccttcctaacagtgcctaccgtggcgggggcgggcaggggttcccattttcgctttcctctggtttgaaagcctctggaaaactcaggattctcacgactctaccatgtccaatggagttcagagatcgttcctatacatttctgttcatcttaaggtggactcgtttggttaccaatttaactagtcctgcagaggatttaactgtgaacctggagggcaaggggtttccacagttgctgctcctttggggcaacgacggtttcaaaccaggattttgtgttttttcgttccccccacccgcccccagcagatggaaagaaagcacctgtttttacaaattctttttttttttttttttttttgctggtgtctgagcttcagtataaaagacaaaacttcctgtttgtggaacaaaagttcgaaagaaaaaacaaaacaaaaacacccagccctgttccaggagaatttcaagttttacaggttgagcttcaagatggtttttttggttttttttttttctctcatccaggctgaaggattttttttttctttacaaaatgagttcctcaaattgaccaatagctgctgctttcatattttggataagggtctgtggtcccggcgtgtgctcacgtgtgtatgcacgtgtgtgtgtccattagacacggctgatgtgtgtgcaaagtatccatgcggagttgatgctttgggaattggctcatgaaggttcttctcaagggtgcgagctcatccccctctctccttccttcttattgactgggagactgtgctctcgacagattcttcttgtgtcagaagtctagcctcaggtttctaccctcccttcacattggtggccaagggaggagcatttcatttggagtgattatgaatcttttcaagaccaaaccaagctaggacattaaaaaaaaaaaaagaaaaagaaagaaaaaacaaaatggaaaaaggaaaaaaaaaaagaactgagatgacagagttttgagaatatatttgtaccatatttaatttttaaagtctctggtattagcctcataagttattgactattccccggggttggcggggagtggggacatgagttggtctgcctgttgtggggccgggaaggggagggagtcaggcacaagtggcctctttgtttggtcttaaaggcatccatttctgggaatgaagccatgttcgctgctaacacttttggatgttgtgaggccacgtggagtgtgtgagagactaggttttatggatggtctggttcaggtaccaggtctgctggaaggttcctgttcggataagctggtagctacctagctctgagcctgccttcaagaacacctgtgttcatcctctgattctctgtgtgtacctcttgtggcgtttcctctcccgggtgtgaacatcctaaccgttattgtgcaaacccaagaacgtcagatcccaaagcacaacaacctggatggactttgggaacatctaagcaatgtaagagagaggtgcactgagagtacgtcttggtcccctccaccctgagagcatctgacggtcctcagtactgaactcccggaagctgctctgagcccggtgacctcatctgggccaggtgtggtgcctgagctgaatgctcaggtgcttacagtgttgcaatccctaagagagtagagtctggaggagaaaccgtgaaaaagaccttacacaccaccaagaacttccgaatgggcgtgaatccaccgtttcttctctttgcaaaaagaaccaccacagctgctcaaagaacacagtgaactcatcactttggttcatcaaaaaatcatcgcccatgcgttattcctgagtgcattttcttacaactttttgactgcttccttttcttcttctcttaagagttgtgggcttaagaatgggatagagtcataatggcaacctccaagccctctcaattcttgattaagaacacaggtagacatgaatcccaattgtctattgctatcttatttatatgattcgggaaaatacagcatgtaaaaatattgctgaggagcctcagtgattgggtacaagaagcaagagtacagaaattatttttgccaaatttattttgtaaatatgagggtctgtacctaaatttaaaaaaaaaacacgtagaactaggtattttgttctcttcttagtaaatttgtagtggttgtatactacactagctgcaattttcacatttttctaattcagaaaggtttttcttatattaggggaaaaagtatttattttaatatataaaatcactctgaaaatcactctcataaaaaatggagcgcatgtaaatttttatcaaagaaaaataaacaggtgaatgggggatagtgattttcttttttcagcacagtctacctcagtgtattgttaagatgtgattcaatcatggacatctttgagatttcagaattctacctggaaccggtctgaatcagggaacgtgtgtatcagctgattcgaatgccagggaccagtaagaattttgagggagggagttgggatggagaaggtatggcctttatgcgagcatagatccttttcttcctggctggtaatattcttctctgaatttaatcttcctttaaaaaaaaatcctccatctattgtcactatgttccccaaacataaactaagttccaggctgtcatgatgtatctgatatatggggtaacccagcaaggtgtaccttcctttggtgagagatggctgccggggcaaagacgggctttg

SEQ ID NO: 27235 - protein, 1382 aa, Homo sapiens
MATGGRRGAAAAPLLVAVAALLLGAAGHLYPGEVCPGMDIRNNLTRLHELENCSVIEGHLQILLMFKTRPEDFRDLSFPKLIMITDYLLLFRVYGLESLKDLFPNLTVIRGSRLFFNYALVIFEMVHLKELGLYNLMNITRGSVRIEKNNELCYLATIDWSRILDSVEDNYIVLNKDDNEECGDICPGTAKGKTNCPATVINGQFVERCWTHSHCQKVCPTICKSHGCTAEGLCCHSECLGNCSQPDDPTKCVACRNFYLDGRCVETCPPPYYHFQDWRCVNFSFCQDLHHKCKNSRRQGCHQYVIHNNKCIPECPSGYTMNSSNLLCTPCLGPCPKVCHLLEGEKTIDSVTSAQELRGCTVINGSLIINIRGGNNLAAELEANLGLIEEISGYLKIRRSYALVSLSFFRKLRLIRGETLEIGNYSFYALDNQNLRQLWDWSKHNLTITQGKLFFHYNPKLCLSEIHKMEEVSGTKGRQERNDIALKTNGDQASCENELLKFSYIRTSFDKILLRWEPYWPPDFRDLLGFMLFYKEAPYQNVTEFDGQDACGSNSWTVVDIDPPLRSNDPKSQNHPGWLMRGLKPWTQYAIFVKTLVTFSDERRTYGAKSDIIYVQTDATNPSVPLDPISVSNSSSQIILKWKPPSDPNGNITHYLVFWERQAEDSELFELDYCLKGLKLPSRTWSPPFESEDSQKHNQSEYEDSAGECCSCPKTDSQILKELEESSFRKTFEDYLHNVVFVPRKTSSGTGAEDPRPSRKRRSLGDVGNVTVAVPTVAAFPNTSSTSVPTSPEEHRPFEKVVNKESLVISGLRHFTGYRIELQACNQDTPEERCSVAAYVSARTMPEAKADDIVGPVTHEIFENNVVHLMWQEPKEPNGLIVLYEVSYRRYGDEELHLCVSRKHFALERGCRLRGLSPGNYSVRIRATSLAGNGSWTEPTYFYVTDYLDVPSNIAKIIIGPLIFVFLFSVVIGSIYLFLRKRQPDGPLGPLYASSNPEYLSASDVFPCSVYVPDEWEVSREKITLLRELGQGSFGMVYEGNARDIIKGEAETRVAVKTVNESASLRERIEFLNEASVMKGFTCHHVVRLLGVVSKGQPTLVVMELMAHGDLKSYLRSLRPEAENNPGRPPPTLQEMIQMAAEIADGMAYLNAKKFVHRDLAARNCMVAHDFTVKIGDFGMTRDIYETDYYRKGGKGLLPVRWMAPESLKDGVFTTSSDMWSFGVVLWEITSLAEQPYQGLSNEQVLKFVMDGGYLDQPDNCPERVTDLMRMCWQFNPKMRPTFLEIVNLLKDDLHPSFPEVSFFHSEENKAPESEELEMEFEDMENVPLDRSSHCQREEAGGRDGGSSLGFKRSYEEHIPYTHMNGGKKNGRILTLPRSNPS

SEQ ID NO: 27236 - DNA, 6919 bp, Homo sapiens
tcccgccgcccgcccgccacccgccagcccaggtgcccgcccgccagtcagctagtccgtcggtccgcgcgtccctctgtcccggagcccgcagatcgcgacccagagcgcgcggggccgagagccgagagacagtcccgggcgcagcgcggagctccgggccccgagatcctgggacggggcccgggccgcagcggccggggggtcggggccaccaccgcaagggcctccgctcagtatttgtagctggcgaagccgcgcgcgcccttcccggggctgcctctgggccctccccggcaggggggctgcggcccgcgggtcgcgggcgtggaagagaaggacgcgcggcccccagcgcctcttgggtggccgcctcggagcatgacccccgcgggccagcgccgcgcgctctgatccgaggagaccccgcgctcccgcagccatggccaccgggggccggcggggggcggcggccgcgccgctgctggtggcggtggccgcgctgctactgggcgccgcgggccacctgtaccccggagaggtgtgtcccggcatggatatccggaacaacctcactaggttgcatgagctggagaattgctctgtcatcgaaggacacttgcagatactcttgatgttcaaaacgaggcccgaagatttccgagacctcagtttccccaaactcatcatgatcactgattacttgctgctcttccgggtctatgggctcgagagcctgaaggacctgttccccaacctcacggtcatccggggatcacgactgttctttaactacgcgctggtcatcttcgagatggttcacctcaaggaactcggcctctacaacctgatgaacatcacccggggttctgtccgcatcgagaagaacaatgagctctgttacttggccactatcgactggtcccgtatcctggattccgtggaggataattacatcgtgttgaacaaagatgacaacgaggagtgtggagacatctgtccgggtaccgcgaagggcaagaccaactgccccgccaccgtcatcaacgggcagtttgtcgaacgatgttggactcatagtcactgccagaaagtttgcccgaccatctgtaagtcacacggctgcaccgccgaaggcctctgttgccacagcgagtgcctgggcaactgttctcagcccgacgaccccaccaagtgcgtggcctgccgcaacttctacctggacggcaggtgtgtggagacctgcccgcccccgtactaccacttccaggactggcgctgtgtgaacttcagcttctgccaggacctgcaccacaaatgcaagaactcgcggaggcagggctgccaccagtacgtcattcacaacaacaagtgcatccctgagtgtccctccgggtacacgatgaattccagcaacttgctgtgcaccccatgcctgggtccctgtcccaaggtgtgccacctcctagaaggcgagaagaccatcgactcggtgacgtctgcccaggagctccgaggatgcaccgtcatcaacgggagtctgatcatcaacattcgaggaggcaacaatctggcagctgagctagaagccaacctcggcctcattgaagaaatttcagggtatctaaaaatccgccgatcctacgctctggtgtcactttccttcttccggaagttacgtctgattcgaggagagaccttggaaattgggaactactccttctatgccttggacaaccagaacctaaggcagctctgggactggagcaaacacaacctcaccatcactcaggggaaactcttcttccactataaccccaaactctgcttgtcagaaatccacaagatggaagaagtttcaggaaccaaggggcgccaggagagaaacgacattgccctgaagaccaatggggaccaggcatcctgtgaaaatgagttacttaaattttcttacattcggacatcttttgacaagatcttgctgagatgggagccgtactggccccccgacttccgagacctcttggggttcatgctgttctacaaagaggccccttatcagaatgtgacggagttcgacgggcaggatgcgtgtggttccaacagttggacggtggtagacattgacccacccctgaggtccaacgaccccaaatcacagaaccacccagggtggctgatgcggggtctcaagccctggacccagtatgccatctttgtgaagaccctggtcaccttttcggatgaacgccggacctatggggccaagagtgacatcatttatgtccagacagatgccaccaacccctctgtgcccctggatccaatctcagtgtctaactcatcatcccagattattctgaagtggaaaccaccctccgaccccaatggcaacatcacccactacctggttttctgggagaggcaggcggaagacagtgagctgttcgagctggattattgcctcaaagggctgaagctgccctcgaggacctggtctccaccattcgagtctgaagattctcagaagcacaaccagagtgagtatgaggattcggccggcgaatgctgctcctgtccaaagacagactctcagatcctgaaggagctggaggagtcctcgtttaggaagacgtttgaggattacctgcacaacgtggttttcgtccccaggccatctcggaaacgcaggtcccttggcgatgttgggaatgtgacggtggccgtgcccacggtggcagctttccccaacacttcctcgaccagcgtgcccacgagtccggaggagcacaggccttttgagaaggtggtgaacaaggagtcgctggtcatctccggcttgcgacacttcacgggctatcgcatcgagctgcaggcttgcaaccaggacacccctgaggaacggtgcagtgtggcagcctacgtcagtgcgaggaccatgcctgaagccaaggctgatgacattgttggccctgtgacgcatgaaatctttgagaacaacgtcgtccacttgatgtggcaggagccgaaggagcccaatggtctgatcgtgctgtatgaagtgagttatcggcgatatggtgatgaggagctgcatctctgcgtctcccgcaagcacttcgctctggaacggggctgcaggctgcgtgggctgtcaccggggaactacagcgtgcgaatccgggccacctcccttgcgggcaacggctcttggacggaacccacctatttctacgtgacagactatttagacgtcccgtcaaatattgcaaaaattatcatcggccccctcatctttgtctttctcttcagtgttgtgattggaagtatttatctattcctgagaaagaggcagccagatgggccgctgggaccgctttacgcttcttcaaaccctgagtatctcagtgccagtgatgtgtttccatgctctgtgtacgtgccggacgagtgggaggtgtctcgagagaagatcaccctccttcgagagctggggcagggctccttcggcatggtgtatgagggcaatgccagggacatcatcaagggtgaggcagagacccgcgtggcggtgaagacggtcaacgagtcagccagtctccgagagcggattgagttcctcaatgaggcctcggtcatgaagggcttcacctgccatcacgtggtgcgcctcctgggagtggtgtccaagggccagcccacgctggtggtgatggagctgatggctcacggagacctgaagagctacctccgttctctgcggccagaggctgagaataatcctggccgccctccccctacccttcaagagatgattcagatggcggcagagattgctgacgggatggcctacctgaacgccaagaagtttgtgcatcgggacctggcagcgagaaactgcatggtcgcccatgattttactgtcaaaattggagactttggaatgaccagagacatctatgaaacggattactaccggaaagggggcaagggtctgctccctgtacggtggatggcaccggagtccctgaaggatggggtcttcaccacttcttctgacatgtggtcctttggcgtggtcctttgggaaatcaccagcttggcagaacagccttaccaaggcctgtctaatgaacaggtgttgaaatttgtcatggatggagggtatctggatcaacccgacaactgtccagagagagtcactgacctcatgcgcatgtgctggcaattcaaccccaagatgaggccaaccttcctggagattgtcaacctgctcaaggacgacctgcaccccagctttccagaggtgtcgttcttccacagcgaggagaacaaggctcccgagagtgaggagctggagatggagtttgaggacatggagaatgtgcccctggaccgttcctcgcactgtcagagggaggaggcggggggccgggatggagggtcctcgctgggtttcaagcggagctacgaggaacacatcccttacacacacatgaacggaggcaagaaaaacgggcggattctgaccttgcctcggtccaatccttcctaacagtgcctaccgtggcgggggcgggcaggggttcccattttcgctttcctctggtttgaaagcctctggaaaactcaggattctcacgactctaccatgtccaatggagttcagagatcgttcctatacatttctgttcatcttaaggtggactcgtttggttaccaatttaactagtcctgcagaggatttaactgtgaacctggagggcaaggggtttccacagttgctgctcctttggggcaacgacggtttcaaaccaggattttgtgttttttcgttccccccacccgcccccagcagatggaaagaaagcacctgtttttacaaattctttttttttttttttttttttgctggtgtctgagcttcagtataaaagacaaaacttcctgtttgtggaacaaaagttcgaaagaaaaaacaaaacaaaaacacccagccctgttccaggagaatttcaagttttacaggttgagcttcaagatggtttttttggttttttttttttctctcatccaggctgaaggattttttttttctttacaaaatgagttcctcaaattgaccaatagctgctgctttcatattttggataagggtctgtggtcccggcgtgtgctcacgtgtgtatgcacgtgtgtgtgtccattagacacggctgatgtgtgtgcaaagtatccatgcggagttgatgctttgggaattggctcatgaaggttcttctcaagggtgcgagctcatccccctctctccttccttcttattgactgggagactgtgctctcgacagattcttcttgtgtcagaagtctagcctcaggtttctaccctcccttcacattggtggccaagggaggagcatttcatttggagtgattatgaatcttttcaagaccaaaccaagctaggacattaaaaaaaaaaaaagaaaaagaaagaaaaaacaaaatggaaaaaggaaaaaaaaaaagaactgagatgacagagttttgagaatatatttgtaccatatttaatttttaaagtctctggtattagcctcataagttattgactattccccggggttggcggggagtggggacatgagttggtctgcctgttgtggggccgggaaggggagggagtcaggcacaagtggcctctttgtttggtcttaaaggcatccatttctgggaatgaagccatgttcgctgctaacacttttggatgttgtgaggccacgtggagtgtgtgagagactaggttttatggatggtctggttcaggtaccaggtctgctggaaggttcctgttcggataagctggtagctacctagctctgagcctgccttcaagaacacctgtgttcatcctctgattctctgtgtgtacctcttgtggcgtttcctctcccgggtgtgaacatcctaaccgttattgtgcaaacccaagaacgtcagatcccaaagcacaacaacctggatggactttgggaacatctaagcaatgtaagagagaggtgcactgagagtacgtcttggtcccctccaccctgagagcatctgacggtcctcagtactgaactcccggaagctgctctgagcccggtgacctcatctgggccaggtgtggtgcctgagctgaatgctcaggtgcttacagtgttgcaatccctaagagagtagagtctggaggagaaaccgtgaaaaagaccttacacaccaccaagaacttccgaatgggcgtgaatccaccgtttcttctctttgcaaaaagaaccaccacagctgctcaaagaacacagtgaactcatcactttggttcatcaaaaaatcatcgcccatgcgttattcctgagtgcattttcttacaactttttgactgcttccttttcttcttctcttaagagttgtgggcttaagaatgggatagagtcataatggcaacctccaagccctctcaattcttgattaagaacacaggtagacatgaatcccaattgtctattgctatcttatttatatgattcgggaaaatacagcatgtaaaaatattgctgaggagcctcagtgattgggtacaagaagcaagagtacagaaattatttttgccaaatttattttgtaaatatgagggtctgtacctaaatttaaaaaaaaaacacgtagaactaggtattttgttctcttcttagtaaatttgtagtggttgtatactacactagctgcaattttcacatttttctaattcagaaaggtttttcttatattaggggaaaaagtatttattttaatatataaaatcactctgaaaatcactctcataaaaaatggagcgcatgtaaatttttatcaaagaaaaataaacaggtgaatgggg

SEQ ID NO: 27237 - protein, 1370 aa, Homo sapiens; identical to SEQ ID NO: 27233

SEQ ID NO: 27238 - DNA, 6955 bp, Homo sapiens
tcccgccgcccgcccgccacccgccagcccaggtgcccgcccgccagtcagctagtccgtcggtccgcgcgtccctctgtcccggagcccgcagatcgcgacccagagcgcgcggggccgagagccgagagacagtcccgggcgcagcgcggagctccgggccccgagatcctgggacggggcccgggccgcagcggccggggggtcggggccaccaccgcaagggcctccgctcagtatttgtagctggcgaagccgcgcgcgcccttcccggggctgcctctgggccctccccggcaggggggctgcggcccgcgggtcgcgggcgtggaagagaaggacgcgcggcccccagcgcctcttgggtggccgcctcggagcatgacccccgcgggccagcgccgcgcgctctgatccgaggagaccccgcgctcccgcagccatggccaccgggggccggcggggggcggcggccgcgccgctgctggtggcggtggccgcgctgctactgggcgccgcgggccacctgtaccccggagaggtgtgtcccggcatggatatccggaacaacctcactaggttgcatgagctggagaattgctctgtcatcgaaggacacttgcagatactcttgatgttcaaaacgaggcccgaagatttccgagacctcagtttccccaaactcatcatgatcactgattacttgctgctcttccgggtctatgggctcgagagcctgaaggacctgttccccaacctcacggtcatccggggatcacgactgttctttaactacgcgctggtcatcttcgagatggttcacctcaaggaactcggcctctacaacctgatgaacatcacccggggttctgtccgcatcgagaagaacaatgagctctgttacttggccactatcgactggtcccgtatcctggattccgtggaggataattacatcgtgttgaacaaagatgacaacgaggagtgtggagacatctgtccgggtaccgcgaagggcaagaccaactgccccgccaccgtcatcaacgggcagtttgtcgaacgatgttggactcatagtcactgccagaaagtttgcccgaccatctgtaagtcacacggctgcaccgccgaaggcctctgttgccacagcgagtgcctgggcaactgttctcagcccgacgaccccaccaagtgcgtggcctgccgcaacttctacctggacggcaggtgtgtggagacctgcccgcccccgtactaccacttccaggactggcgctgtgtgaacttcagcttctgccaggacctgcaccacaaatgcaagaactcgcggaggcagggctgccaccagtacgtcattcacaacaacaagtgcatccctgagtgtccctccgggtacacgatgaattccagcaacttgctgtgcaccccatgcctgggtccctgtcccaaggtgtgccacctcctagaaggcgagaagaccatcgactcggtgacgtctgcccaggagctccgaggatgcaccgtcatcaacgggagtctgatcatcaacattcgaggaggcaacaatctggcagctgagctagaagccaacctcggcctcattgaagaaatttcagggtatctaaaaatccgccgatcctacgctctggtgtcactttccttcttccggaagttacgtctgattcgaggagagaccttggaaattgggaactactccttctatgccttggacaaccagaacctaaggcagctctgggactggagcaaacacaacctcaccatcactcaggggaaactcttcttccactataaccccaaactctgcttgtcagaaatccacaagatggaagaagtttcaggaaccaaggggcgccaggagagaaacgacattgccctgaagaccaatggggaccaggcatcctgtgaaaatgagttacttaaattttcttacattcggacatcttttgacaagatcttgctgagatgggagccgtactggccccccgacttccgagacctcttggggttcatgctgttctacaaagaggccccttatcagaatgtgacggagttcgacgggcaggatgcgtgtggttccaacagttggacggtggtagacattgacccacccctgaggtccaacgaccccaaatcacagaaccacccagggtggctgatgcggggtctcaagccctggacccagtatgccatctttgtgaagaccctggtcaccttttcggatgaacgccggacctatggggccaagagtgacatcatttatgtccagacagatgccaccaacccctctgtgcccctggatccaatctcagtgtctaactcatcatcccagattattctgaagtggaaaccaccctccgaccccaatggcaacatcacccactacctggttttctgggagaggcaggcggaagacagtgagctgttcgagctggattattgcctcaaagggctgaagctgccctcgaggacctggtctccaccattcgagtctgaagattctcagaagcacaaccagagtgagtatgaggattcggccggcgaatgctgctcctgtccaaagacagactctcagatcctgaaggagctggaggagtcctcgtttaggaagacgtttgaggattacctgcacaacgtggttttcgtccccagaaaaacctcttcaggcactggtgccgaggaccctaggccatctcggaaacgcaggtcccttggcgatgttgggaatgtgacggtggccgtgcccacggtggcagctttccccaacacttcctcgaccagcgtgcccacgagtccggaggagcacaggccttttgagaaggtggtgaacaaggagtcgctggtcatctccggcttgcgacacttcacgggctatcgcatcgagctgcaggcttgcaaccaggacacccctgaggaacggtgcagtgtggcagcctacgtcagtgcgaggaccatgcctgaagccaaggctgatgacattgttggccctgtgacgcatgaaatctttgagaacaacgtcgtccacttgatgtggcaggagccgaaggagcccaatggtctgatcgtgctgtatgaagtgagttatcggcgatatggtgatgaggagctgcatctctgcgtctcccgcaagcacttcgctctggaacggggctgcaggctgcgtgggctgtcaccggggaactacagcgtgcgaatccgggccacctcccttgcgggcaacggctcttggacggaacccacctatttctacgtgacagactatttagacgtcccgtcaaatattgcaaaaattatcatcggccccctcatctttgtctttctcttcagtgttgtgattggaagtatttatctattcctgagaaagaggcagccagatgggccgctgggaccgctttacgcttcttcaaaccctgagtatctcagtgccagtgatgtgtttccatgctctgtgtacgtgccggacgagtgggaggtgtctcgagagaagatcaccctccttcgagagctggggcagggctccttcggcatggtgtatgagggcaatgccagggacatcatcaagggtgaggcagagacccgcgtggcggtgaagacggtcaacgagtcagccagtctccgagagcggattgagttcctcaatgaggcctcggtcatgaagggcttcacctgccatcacgtggtgcgcctcctgggagtggtgtccaagggccagcccacgctggtggtgatggagctgatggctcacggagacctgaagagctacctccgttctctgcggccagaggctgagaataatcctggccgccctccccctacccttcaagagatgattcagatggcggcagagattgctgacgggatggcctacctgaacgccaagaagtttgtgcatcgggacctggcagcgagaaactgcatggtcgcccatgattttactgtcaaaattggagactttggaatgaccagagacatctatgaaacggattactaccggaaagggggcaagggtctgctccctgtacggtggatggcaccggagtccctgaaggatggggtcttcaccacttcttctgacatgtggtcctttggcgtggtcctttgggaaatcaccagcttggcagaacagccttaccaaggcctgtctaatgaacaggtgttgaaatttgtcatggatggagggtatctggatcaacccgacaactgtccagagagagtcactgacctcatgcgcatgtgctggcaattcaaccccaagatgaggccaaccttcctggagattgtcaacctgctcaaggacgacctgcaccccagctttccagaggtgtcgttcttccacagcgaggagaacaaggctcccgagagtgaggagctggagatggagtttgaggacatggagaatgtgcccctggaccgttcctcgcactgtcagagggaggaggcggggggccgggatggagggtcctcgctgggtttcaagcggagctacgaggaacacatcccttacacacacatgaacggaggcaagaaaaacgggcggattctgaccttgcctcggtccaatccttcctaacagtgcctaccgtggcgggggcgggcaggggttcccattttcgctttcctctggtttgaaagcctctggaaaactcaggattctcacgactctaccatgtccaatggagttcagagatcgttcctatacatttctgttcatcttaaggtggactcgtttggttaccaatttaactagtcctgcagaggatttaactgtgaacctggagggcaaggggtttccacagttgctgctcctttggggcaacgacggtttcaaaccaggattttgtgttttttcgttccccccacccgcccccagcagatggaaagaaagcacctgtttttacaaattctttttttttttttttttttttgctggtgtctgagcttcagtataaaagacaaaacttcctgtttgtggaacaaaagttcgaaagaaaaaacaaaacaaaaacacccagccctgttccaggagaatttcaagttttacaggttgagcttcaagatggtttttttggttttttttttttctctcatccaggctgaaggattttttttttctttacaaaatgagttcctcaaattgaccaatagctgctgctttcatattttggataagggtctgtggtcccggcgtgtgctcacgtgtgtatgcacgtgtgtgtgtccattagacacggctgatgtgtgtgcaaagtatccatgcggagttgatgctttgggaattggctcatgaaggttcttctcaagggtgcgagctcatccccctctctccttccttcttattgactgggagactgtgctctcgacagattcttcttgtgtcagaagtctagcctcaggtttctaccctcccttcacattggtggccaagggaggagcatttcatttggagtgattatgaatcttttcaagaccaaaccaagctaggacattaaaaaaaaaaaaagaaaaagaaagaaaaaacaaaatggaaaaaggaaaaaaaaaaagaactgagatgacagagttttgagaatatatttgtaccatatttaatttttaaagtctctggtattagcctcataagttattgactattccccggggttggcggggagtggggacatgagttggtctgcctgttgtggggccgggaaggggagggagtcaggcacaagtggcctctttgtttggtcttaaaggcatccatttctgggaatgaagccatgttcgctgctaacacttttggatgttgtgaggccacgtggagtgtgtgagagactaggttttatggatggtctggttcaggtaccaggtctgctggaaggttcctgttcggataagctggtagctacctagctctgagcctgccttcaagaacacctgtgttcatcctctgattctctgtgtgtacctcttgtggcgtttcctctcccgggtgtgaacatcctaaccgttattgtgcaaacccaagaacgtcagatcccaaagcacaacaacctggatggactttgggaacatctaagcaatgtaagagagaggtgcactgagagtacgtcttggtcccctccaccctgagagcatctgacggtcctcagtactgaactcccggaagctgctctgagcccggtgacctcatctgggccaggtgtggtgcctgagctgaatgctcaggtgcttacagtgttgcaatccctaagagagtagagtctggaggagaaaccgtgaaaaagaccttacacaccaccaagaacttccgaatgggcgtgaatccaccgtttcttctctttgcaaaaagaaccaccacagctgctcaaagaacacagtgaactcatcactttggttcatcaaaaaatcatcgcccatgcgttattcctgagtgcattttcttacaactttttgactgcttccttttcttcttctcttaagagttgtgggcttaagaatgggatagagtcataatggcaacctccaagccctctcaattcttgattaagaacacaggtagacatgaatcccaattgtctattgctatcttatttatatgattcgggaaaatacagcatgtaaaaatattgctgaggagcctcagtgattgggtacaagaagcaagagtacagaaattatttttgccaaatttattttgtaaatatgagggtctgtacctaaatttaaaaaaaaaacacgtagaactaggtattttgttctcttcttagtaaatttgtagtggttgtatactacactagctgcaattttcacatttttctaattcagaaaggtttttcttatattaggggaaaaagtatttattttaatatataaaatcactctgaaaatcactctcataaaaaatggagcgcatgtaaatttttatcaaagaaaaataaacaggtgaatgggg

SEQ ID NO: 27239 - protein, 1382 aa, Homo sapiens; identical to SEQ ID NO: 27235

SEQ ID NO: 27240 - DNA, 3413 bp, Homo sapiens
tcccgccgcccgcccgccacccgccagcccaggtgcccgcccgccagtcagctagtccgtcggtccgcgcgtccctctgtcccggagcccgcagatcgcgacccagagcgcgcggggccgagagccgagagacagtcccgggcgcagcgcggagctccgggccccgagatcctgggacggggcccgggccgcagcggccggggggtcggggccaccaccgcaagggcctccgctcagtatttgtagctggcgaagccgcgcgcgcccttcccggggctgcctctgggccctccccggcaggggggctgcggcccgcgggtcgcgggcgtggaagagaaggacgcgcggcccccagcgcctcttgggtggccgcctcggagcatgacccccgcgggccagcgccgcgcgctctgatccgaggagaccccgcgctcccgcagccatggccaccgggggccggcggggggcggcggccgcgccgctgctggtggcggtggccgcgctgctactgggcgccgcgggccacctgtaccccggagaggtgtgtcccggcatggatatccggaacaacctcactaggttgcatgagctggagaattgctctgtcatcgaaggacacttgcagatactcttgatgttcaaaacgaggcccgaagatttccgagacctcagtttccccaaactcatcatgatcactgattacttgctgctcttccgggtctatgggctcgagagcctgaaggacctgttccccaacctcacggtcatccggggatcacgactgttctttaactacgcgctggtcatcttcgagatggttcacctcaaggaactcggcctctacaacctgatgaacatcacccggggttctgtccgcatcgagaagaacaatgagctctgttacttggccactatcgactggtcccgtatcctggattccgtggaggataattacatcgtgttgaacaaagatgacaacgaggagtgtggagacatctgtccgggtaccgcgaagggcaagaccaactgccccgccaccgtcatcaacgggcagtttgtcgaacgatgttggactcatagtcactgccagaaagtttgcccgaccatctgtaagtcacacggctgcaccgccgaaggcctctgttgccacagcgagtgcctgggcaactgttctcagcccgacgaccccaccaagtgcgtggcctgccgcaacttctacctggacggcaggtgtgtggagacctgcccgcccccgtactaccacttccaggactggcgctgtgtgaacttcagcttctgccaggacctgcaccacaaatgcaagaactcgcggaggcagggctgccaccagtacgtcattcacaacaacaagtgcatccctgagtgtccctccgggtacacgatgaattccagcaacttgctgtgcaccccatgcctgggtccctgtcccaaggtgtgccacctcctagaaggcgagaagaccatcgactcggtgacgtctgcccaggagctccgaggatgcaccgtcatcaacgggagtctgatcatcaacattcgaggaggcaacaatctggcagctgagctagaagccaacctcggcctcattgaagaaatttcagggtatctaaaaatccgccgatcctacgctctggtgtcactttccttcttccggaagttacgtctgattcgaggagagaccttggaaattgggaactactccttctatgccttggacaaccagaacctaaggcagctctgggactggagcaaacacaacctcaccatcactcaggggaaactcttcttccactataaccccaaactctgcttgtcagaaatccacaagatggaagaagtttcaggaaccaaggggcgccaggagagaaacgacattgccctgaagaccaatggggaccaggcatcctgtgaaaatgagttacttaaattttcttacattcggacatcttttgacaagatcttgctgagatgggagccgtactggccccccgacttccgagacctcttggggttcatgctgttctacaaagaggccccttatcagaatgtgacggagttcgacgggcaggatgcgtgtggttccaacagttggacggtggtagacattgacccacccctgaggtccaacgaccccaaatcacagaaccacccagggtggctgatgcggggtctcaagccctggacccagtatgccatctttgtgaagaccctggtcaccttttcggatgaacgccggacctatggggccaagagtgacatcatttatgtccagacagatgccaccaacccctctgtgcccctggatccaatctcagtgtctaactcatcatcccagattattctgaagtggaaaccaccctccgaccccaatggcaacatcacccactacctggttttctgggagaggcaggcggaagacagtgagctgttcgagctggattattgcctcaaagggctgaagctgccctcgaggacctggtctccaccattcgagtctgaagattctcagaagcacaaccagagtgagtatgaggattcggccggcgaatgctgctcctgtccaaagacagactctcagatcctgaaggagctggaggagtcctcgtttaggaagacgtttgaggattacctgcacaacgtggttttcgtccccaggtcaggacttggcgctgggctctcttagtgggtgccaattggcttggtgttggtggaaggtcattacttagggaccgagaggtagtgggacccagagacggcagaagggtgggtggagtctgaatggagccctttcctgggtggaggaagagatcttgcagtttcgaaatttcgaggggaattttatcaggaagagcaaataatcgcacaaaaggggaaaaatggacaaaactcagcatttgcctttcttacctctcctgagctggtctccacgtgagttccaaaacaaactccgttagacgattaacatttttttttttctctctctctcttttttttttttttttgacagagtctcactctatcgtccaggctggagtgcggtggtgcgatttcagctcaccctttccgggttcgagtgattcttgtgcctcagcctcccaagtagctgggactacaggtgcgcagcaccacgcccagctaatttttatatttttagtagagacggggttttgccatgttggctaggctggtctctaacccctgacctcaggtgatctgcctgcctcggcctcccagagtgctgggattataggtgtgagccaccgtgcctggccgtgattattgaggctttagctgagcgcagtggtgtaagcctgtggtcccagctagttgggaagccgaggtggtagggttgcttgaggccagcctgggcaacataatgagaccccatcgctacc

SEQ ID NO: 27241 - protein, 752 aa, Homo sapiens
MATGGRRGAAAAPLLVAVAALLLGAAGHLYPGEVCPGMDIRNNLTRLHELENCSVIEGHLQILLMFKTRPEDFRDLSFPKLIMITDYLLLFRVYGLESLKDLFPNLTVIRGSRLFFNYALVIFEMVHLKELGLYNLMNITRGSVRIEKNNELCYLATIDWSRILDSVEDNYIVLNKDDNEECGDICPGTAKGKTNCPATVINGQFVERCWTHSHCQKVCPTICKSHGCTAEGLCCHSECLGNCSQPDDPTKCVACRNFYLDGRCVETCPPPYYHFQDWRCVNFSFCQDLHHKCKNSRRQGCHQYVIHNNKCIPECPSGYTMNSSNLLCTPCLGPCPKVCHLLEGEKTIDSVTSAQELRGCTVINGSLIINIRGGNNLAAELEANLGLIEEISGYLKIRRSYALVSLSFFRKLRLIRGETLEIGNYSFYALDNQNLRQLWDWSKHNLTITQGKLFFHYNPKLCLSEIHKMEEVSGTKGRQERNDIALKTNGDQASCENELLKFSYIRTSFDKILLRWEPYWPPDFRDLLGFMLFYKEAPYQNVTEFDGQDACGSNSWTVVDIDPPLRSNDPKSQNHPGWLMRGLKPWTQYAIFVKTLVTFSDERRTYGAKSDIIYVQTDATNPSVPLDPISVSNSSSQIILKWKPPSDPNGNITHYLVFWERQAEDSELFELDYCLKGLKLPSRTWSPPFESEDSQKHNQSEYEDSAGECCSCPKTDSQILKELEESSFRKTFEDYLHNVVFVPRSGLGAGLS

SEQ ID NO: 27242 - DNA, 857 bp, Homo sapiens
aactccattttttaaaaaaagaaaaaaaaatggttaggggaattaaaagaaaaacaaaaaaacatggcatgtgctaatgatccatagcctggacaccctctctccattatcctgcaatggatttggggcaaagataccaggagaggtccaatgcacgaagccttacatgggaagagtggagacggggtctatgcagttcgtttattgactgcctactaggtgtcatgttctggggcgctcagggcataggaagggagccagcctttgcctcctcagagcggccagtctagtggcaaatgcagatgttcacgatcaaaccaagtacactcagaagagggggagagttagagggagatctacattagttcagccagctggacgcggtggctcatgcttgtaatgccagcactttgggaggccgaggagggcagactgcttgagtcctggcctcaagtgatccgcctgccttggcctaccaaagtgctgggattacaggtgtgaaccactactctgggcttgccttggtattttaacaatcggaattgtctttgtggcaaatgctgatttcatgccagccgtggttctgggtgctttgattaggatattgcatcccatcttcccaacaatcttatttattgttgagaccactaaggcttcgagaggttaagcaacttctacttccaacactgccccgcccaccccttccgccgcgcaccccacacacatgggtagtaagtagtggagatgggatttgaagctggggattctggctcagaatccaagctctttacctttgtgtcttatagatgtcattgcgggaagttggtgaaatgcaggaaactgtaaaaagaaaggaa

SEQ ID NO: 27243 - protein, 36 aa, Homo sapiens
MLVMPALWEAEEGRLLESWPQVIRLPWPTKVLGLQV

SEQ ID NO: 27244 - DNA, 646 bp, Homo sapiens
tcatatttttagtagacatggggtttcaccatgttggccaggctggtctcaaactcctgacctcaggtgatccaccccccttgacctcccaaagtgctgggattacaggcgtgagccactgtgcccagcctgtgtggctctcttttggttaccctgtggtatcctgttttctcaagctcatcctccctggtgggtccatgatccctggaaattgttggtcttctccggccttttgaaattgctgccttatgaatgtccagagttgggtatctgcctttctctcccaaggaggaagaatcctgagggggcatctttgcttttaggtcccagggctttcactgacttcctccttgctggcttcttggtttgttccaaagatgtcctcggtacatcttctgagactaatgacatgataagtttctggaaggactatgatctggatgatgagggtttcatcacagtcctctttcagttctgtcctacagattacacttgttttcttccttcatcctttgtcttcactggttcactgtttccatctgcattcttctgttctcatttctttttgttgttgttttattttttattttttaatttattttttaaaatagtgtctcactctgtcacccaggctggagtgcagtgg

SEQ ID NO: 27245 - protein, 78 aa, Homo sapiens
MISFWKDYDLDDEGFITVLFQFCPTDYTCFLPSSFVFTGSLFPSAFFCSHFFLLLFYFLFFNLFFKIVSHSVTQAGVQ

SEQ ID NO: 27246 - DNA, 6457 bp, Homo sapiens
atgcgcagggctgaggggtgggagcagggctctctgcctccagaacccccatcctctgggctctttttaggcccctagattggcctgcagctgggagcagagtggcaagcatgcaggcaggcagttgagaaagaggaagtcgaggtgctattgggtcattctgtggttatcccaggctctacccagccagcggttcccttgggccagctcgaaacgctggccgtaggtcatgggagctgcaggagctgttagccaggctaggtgcctgcaggttgaagaactgagctctatctggctctgagcccaagtcatgtgtccagccttttgactctggagctgtggcttcagccaccaagagcagcagtggatcctggaaacctgagaacccagacttcttctctgccatgggggatgatcaggcaggatgattttcccaggcggctcagcgagagtatggaggacctcagcctggatttgggggcccttcagggcagcgagtatctgcaggacctgggccttggggccccttcccacagccagcctggggagaccccagacagccgccccaccggtgaagaaccaggaagagattctcttttctccagcttggcagggtcccaagacctgtcaaggcggcgcagctgggaaaggtcgcggagctgctcagagagctggcggaggctcagcctcgatgcctcagctgtggatgaggaaccctgtctcccccgaacactggccagccttgctttgaacctgccaggaggagggctgaagacctggactcaagggtgtctctctgggggcgggacccccgcagagagcccaggcaaggaatgtgacagccccaagaaaagagggaggtcaaggtccgttcctgtgtccttctatgagatccgctctccggaaatctctccgggtttggaagtgcccactccacctgttcaaggcctggaacctccagtgctggagtgcatggaaaaagaccatgtggaaccagatcacgtgctgattgtccagcaggtgcttcaagaacttcgacagtaccatggggcccggcagagggcttgcatgtcagccagccccggaggagcccactcgaacctgacctggtttgaattcctgtcggagagcgaggacggtgctggcaagaacgagaagagtgacaagagtaccagtgtgaagcgcaggctgagctgcctccgcagtcgagtgaccaggcagaaggagaaggggaagagcccagcacatctgaaggacaagggccaggatgcacgagagaggcgggagtgtgtcaatgggcaccagctgttgcaagggaccttctccggcccctccagctgccccctgtgtggcaaacctttcttgagctcagcctcgctcaaggagcacccccggggcaccctcctgtccgatggcagcccggccctgtccaggaatgtcggtatgacggtctctcagaaagggggtccccagccaacaccgagcccggctggccctgggacgcaactcggaccaatcacaggagagatggatgaagccgattctgcgtttttaaaatttaagcagacagctgatgactctctgtcccttacatctccaaacaccgagtccatttttgtagaagatccctacaccgcctcgctgaggagtgagattgagtcagacggccacgagtttgaagctgagtcctggagcctcgccgtggatgcagcctacgccaagaagcaaaagagggaggtggtgaaaagacaagatgtcctttatgagctgatgcagacagaggtgcaccacgtgcggacgctcaagatcatgctgaaggtgtactccagggccctgcaggaggagctgcagttcagcagcaaggccattggccgcctcttcccatgcgctgacgacctgctggagacgcacagccacttcctcgctcggctcaaggagcgccgccaggagtccctggaggagggcagtgaccggaattatgtcatccagaaaatcggcgacctcctggttcagcagttttcaggtgaaaatggggagagaatgaaagaaaagtacggtgtgttttgtagtggccacaatgaagctgttagtcattacaagttgctgcttcagcaaaacaagaaatttcaaaacttgatcaagaaaattggcaacttctccatcgtgcggcggcttggcgtgcaggagtgcattctcctggttacacaacgcataaccaaatacccagtgctggtggagcgcatcatccagaacacggaagctggcactgaggactatgaagacctgacccaggccttgaacctcatcaaagatatcatctcacaagtggacgccaaggtcagtgagtgtgagaagggccagcgcctcagggagatcgcagggaagatggacctgaagtcttccagcaaactcaagaacgggctcaccttccgcaaggaagacatgcttcagcggcagctccacctggagggcatgctatgctggaagaccacatcagggcgcttgaaagatatcctggctatcctgctgaccgacgtacttttgctgctacaagaaaaagatcagaaatacgtctttgcttctgtggactcaaagccacccgtcatctcgttacaaaagctcatcgtgagggaagtggccaacgaggagaaagcgatgtttctgatcagcgcctccttgcaagggccggagatgtatgaaatctacacgagctccaaagaggacaggaacgcctggatggcccacatccaaagggctgtggagagctgccctgacgaggaggaggggcccttcagcctgcccgaagaggaaaggaaggtggtcgaggcccgcgccacgagactccgggactttcaagagcggttgagcatgaaagaccagctgatcgcacagagcctcctagagaaacagcagatctacctggagatggccgagatgggcggcctcgaagacctgccccagccccgaggcctattccgtggaggggacccatccgagaccctgcagggggagctaattctcaagtcggccatgagcgagatcgagggcatccagagcctgatctgcaggcagctgggcagcgccaacggccaggcggaagacggaggcagctccacaggcccgcccaggagggctgagaccttcgcgggctacgactgcacaaacagccccaccaagaatggcagtttcaagaagaaagtcagcagcactgaccccaggccccgagactggcgaggccccccaaacagcccggacttgaagctcagtgacagtgacattcctgggagctctgaggaatcgccgcaggtggtggaggcgccaggcacggaatccgatccccgtctgcccaccgtcctggagtcggagcttgtccagcggatccagacactgtcccagctgctcctgaaccttcaggcggtaatcgcccaccaggacagctatgtggagacgcagcgggctgccatccaggagcgggagaagcagttccggctgcagtcgacgcgtgggaacctgctgctggagcaggagcggcaacgcaacttcgagaagcagcgggaggagcgcgcggccctggagaagctgcagagccagctgcggcacgagcagcagcgctgggagcgcgagcgccagtggcagcaccaggagctggagcgtgcgggcgcgcggctgcaggagcgcgagggcgaggcgcggcagctacgcgagcggctggagcaggagcgggccgagctggagcgccagcgccaggcctaccagcacgacctggagcggctgcgcgaggcccagcgtgccgtggagcgcgagcgggagcgcctggagctgctgcgccgcctcaagaagcagaacaccgcgccaggcgcgctgccgcccgacacactggccgaggcccagcccccaagccaccctcccagcttcaacggggaagggctggagggccctcgtgtgagcatgctgccatccggcgtggggccagagtacgcagagcgccccgaggtggctcgccgggacagcgcccccaccgagaaccggctggccaagagcgatgtgcccatccagctgctcagcgccaccaaccagttccagaggcaggcggccgtgcagcagcagatccccaccaagctggcggcctccaccaagggtggcaaggacaagggcggcaagagcaggggctctcagcgctgggagagctcagcgtccttcgacctgaagcagcagctgctgctcaacaagctcatggggaaagatgagagcacctcacggaaccgccgctcgctgagccctatcctgcccggcagacacagtcctgcgcccccaccagaccctggcttccccgccccgagcccaccgccagctgacagcccctccgagggcttctctctcaaggccgggggcacagccctcctgcccgggcccccagctccctcgccactgccggccacaccactcagcgccaaggaggacgccagcaaagaagacgtcatcttcttctaaaagggccgtgactcaaggaaagtttttaatggaaagttgagccagaactaaaccagggagctgtctgaaatcatagcaccccatccgggtggcggggagatcaactccgagctgtttttccgaggcagtgaggaacggtgccggctctgcacggagctgaggacaggacagaccttgctttgagaaggagctgccggccggggccacgctccacagccgccgcgcgacagtggagccaagggttagggcaccaggaggggccaggtggcgtcggcagcatctgtccccagaatcaggcagaatccacttcccaaacagagccccacgcaggttcaccatgaacctcagggtcagggaatgagccaggcacgggggcatgggcagagagggccacggggcagggcccactgagggaacatcagtggccctccagtcaggttctgtgggtttggaagcccatcgtgaaaggggctgacctttgcccctttttacttggcattggttttgaaaccagctgtttcccaaactctgcttcccaagggcaaccgttgctgttcacacgctcagcctgtctgggggagcgggcctctagcttcagccagggcgggtacacaccctgggcacagggtcctcagcccccgggaaatgagctcccagggctggcgtcccaccttccaggtgggggctggcacatcacagactgtcgagagcgccatgtcccagggcatgcagaggatgcacctagagacgttgcagcaagtggacaagtggccgctgtgcgggcccctcgcttgtagtgagctgttgcagcttacggtccgttccctggaggggtggaggaaggaggtgttgggcagcatcaaaggtgctgggacatcccagggtggtgagatccatccacgatccagctccggtggagaaagggcccatgtcaagccttgttctgcaccccaagcattggtggtaggactgggtcctggctgatcgtccttgttcccagtggggtacatgtgagcccctgccagggccaagtccttctcccgaacccagggtcctgggaactgcagatcccggggggattcagcccttctcccactgtgctggcagaggcactcctgtgacgctgaatacagtgaacagggacattcccgccactcggggacagatgggcacaagggaggggaaactccatcaggaagtgctcccctgggcagaggcgcccactgggtgctgtgggctcaggagggggcggggcaggagctggtgccaaccgggaaccagagccccacagccatacagcccattggtgacaaggtcctgagaacacagtggccaggtgtccccaggctcctggcccctccgacgacctcaactctgcccagcccggtccctggccatcagcgacgctgtccgccccccgtcagatcccatgtgtgccatgtttatcatcagtgttttgtatttttgtactgagtatcggagcactttacagaagctgactgtacattcctgttctgttgtgaagagaacattcccagaccctggcaccctcctgagccggcgtgtgccggtccagccctccgagatgccacaattccttggatgggggagaagttcaaggaatttctgctcggccacgcggtgggaaccccgcgtccccgccatgtggcagaggggtctcagtcgtgctaggcatcgggcggcagcgccgacagcccttccctcgccagtgcccctcggccactcctgggttggagcccgattttatttgtaaagttgacagtcgagcaaatgttcctattttcgtgggatctgcacacgtctttgtcagttgtggtcatgatcttagtcacctgctaattatttttacaatgattacaacatttcctcactgcgggatatttctgacccgctttagaacttaagacctgattctagcaataaacgtgtccgagatgagcggtga

SEQ ID NO: 27247 - protein, 1359 aa, Homo sapiens
MIRQDDFPRRLSESMEDLSLDLGALQGSEYLQDLGLGAPSHSQPGETPDSRPTGEEPGRDSLFSSLAGSQDLSRRRSWERSRSCSESWRRLSLDASAVDEEPCLPRTLASLALNLPGGGLKTWTQGCLSGGGTPAESPGKECDSPKKRGRSRSVPVSFYEIRSPEISPGLEVPTPPVQGLEPPVLECMEKDHVEPDHVLIVQQVLQELRQYHGARQRACMSASPGGAHSNLTWFEFLSESEDGAGKNEKSDKSTSVKRRLSCLRSRVTRQKEKGKSPAHLKDKGQDARERRECVNGHQLLQGTFSGPSSCPLCGKPFLSSASLKEHPRGTLLSDGSPALSRNVGMTVSQKGGPQPTPSPAGPGTQLGPITGEMDEADSAFLKFKQTADDSLSLTSPNTESIFVEDPYTASLRSEIESDGHEFEAESWSLAVDAAYAKKQKREVVKRQDVLYELMQTEVHHVRTLKIMLKVYSRALQEELQFSSKAIGRLFPCADDLLETHSHFLARLKERRQESLEEGSDRNYVIQKIGDLLVQQFSGENGERMKEKYGVFCSGHNEAVSHYKLLLQQNKKFQNLIKKIGNFSIVRRLGVQECILLVTQRITKYPVLVERIIQNTEAGTEDYEDLTQALNLIKDIISQVDAKVSECEKGQRLREIAGKMDLKSSSKLKNGLTFRKEDMLQRQLHLEGMLCWKTTSGRLKDILAILLTDVLLLLQEKDQKYVFASVDSKPPVISLQKLIVREVANEEKAMFLISASLQGPEMYEIYTSSKEDRNAWMAHIQRAVESCPDEEEGPFSLPEEERKVVEARATRLRDFQERLSMKDQLIAQSLLEKQQIYLEMAEMGGLEDLPQPRGLFRGGDPSETLQGELILKSAMSEIEGIQSLICRQLGSANGQAEDGGSSTGPPRRAETFAGYDCTNSPTKNGSFKKKVSSTDPRPRDWRGPPNSPDLKLSDSDIPGSSEESPQVVEAPGTESDPRLPTVLESELVQRIQTLSQLLLNLQAVIAHQDSYVETQRAAIQEREKQFRLQSTRGNLLLEQERQRNFEKQREERAALEKLQSQLRHEQQRWERERQWQHQELERAGARLQEREGEARQLRERLEQERAELERQRQAYQHDLERLREAQRAVERERERLELLRRLKKQNTAPGALPPDTLAEAQPPSHPPSFNGEGLEGPRVSMLPSGVGPEYAERPEVARRDSAPTENRLAKSDVPIQLLSATNQFQRQAAVQQQIPTKLAASTKGGKDKGGKSRGSQRWESSASFDLKQQLLLNKLMGKDESTSRNRRSLSPILPGRHSPAPPPDPGFPAPSPPPADSPSEGFSLKAGGTALLPGPPAPSPLPATPLSAKEDASKEDVIFF

SEQ ID NO: 27248 - DNA, 889 bp, Homo sapiens
gggcccggcagagggcttgcatgtcagccagccccggaggagcccactcgaacctgacctggtttgaattcctgtcggagagcgaggacggtgctggcaagaacgagaagagtgacaagagtaccagtgtgaagcgcaggctgagctgcctccgcagtcgagtgaccaggcagaaggagaaggggaagagcccagcacatctgaaggacaagggccaggatgcacgagagaggcgggagtgtgtcaatgggcaccagctgttgcaagggaccttctccggcccctccagctgccccctgtgtggcaaacctttcttgatagggatgtggtcccactgtgttgtccaggctggtctcaaaactcctgggctcaagcgatctgcccacttcagcctccaaatgccgttcctcaggattatgtctttgactgcagtcggcccttgaacagcacgggtttcagctgcgtgagtccagttacacacagacgtttttcagtcaatacagtcagccctctgcagccacaggttctgcttctgcaaccaaagcagaccaaaaatacagtgttctcaggatgaaaacccacagattcagagggccgacttttcccatatgccggacaactgtacccccctcttcttttctgtttctgcacatggactcctcccagagtgctgggattacaagcatgagccaccaccccaggccggagtttctttcttgagctagattttcttgcaaggttacacttattagcaaagtccttgggaaaagcaatttggtaatgcaagtctaaacatcagaaaggatttgtaacctttgcgtccaaaatctcgtctcacggaggctcttgtatgaaattggaatgcctcgaatgtctaacagcagggaaa

SEQ ID NO: 27249 - protein, 140 aa, Homo sapiens
MSASPGGAHSNLTWFEFLSESEDGAGKNEKSDKSTSVKRRLSCLRSRVTRQKEKGKSPAHLKDKGQDARERRECVNGHQLLQGTFSGPSSCPLCGKPFLIGMWSHCVVQAGLKTPGLKRSAHFSLQMPFLRIMSLTAVGP

SEQ ID NO: 27250 - DNA, 5189 bp, Homo sapiens
tgctagctactgtggatctgggggggccggacggaggcatcggaggcggctgcgagagtggcagaggagctggcggagagcggcctgcgggcgatcgggccgagcctcgctcaaggagcacccccggggcaccctcctgtccgatggcagcccggccctgtccaggaatgtcggtatgacggtctctcagaaagggggtccccagccaacaccgagcccggctggccctgggacgcaactcggaccaatcacaggagagatggatgaagccgattctgcgtttttaaaatttaagcagacagctgatgactctctgtcccttacatctccaaacaccgagtccatttttgtagaagatccctacaccgcctcgctgaggagtgagattgagtcagacggccacgagtttgaagctgagtcctggagcctcgccgtggatgcagcctacgccaagaagcaaaagagggaggtggtgaaaagacaagatgtcctttatgagctgatgcagacagaggtgcaccacgtgcggacgctcaagatcatgctgaaggtgtactccagggccctgcaggaggagctgcagttcagcagcaaggccattggccgcctcttcccatgcgctgacgacctgctggagacgcacagccacttcctcgctcggctcaaggagcgccgccaggagtccctggaggagggcagtgaccggaattatgtcatccagaaaatcggcgacctcctggttcagcagttttcaggtgaaaatggggagagaatgaaagaaaagtacggtgtgttttgtagtggccacaatgaagctgttagtcattacaagttgctgcttcagcaaaacaagaaatttcaaaacttgatcaagaaaattggcaacttctccatcgtgcggcggcttggcgtgcaggagtgcattctcctggttacacaacgcataaccaaatacccagtgctggtggagcgcatcatccagaacacggaagctggcactgaggactatgaagacctgacccaggccttgaacctcatcaaagatatcatctcacaagtggacgccaaggtcagtgagtgtgagaagggccagcgcctcagggagatcgcagggaagatggacctgaagtcttccagcaaactcaagaacgggctcaccttccgcaaggaagacatgcttcagcggcagctccacctggagggcatgctatgctggaagaccacatcagggcgcttgaaagatatcctggctatcctgctgaccgacgtacttttgctgctacaagaaaaagatcagaaatacgtctttgcttctgtggactcaaagccacccgtcatctcgttacaaaagctcatcgtgagggaagtggccaacgaggagaaagcgatgtttctgatcagcgcctccttgcaagggccggagatgtatgaaatctacacgagctccaaagaggacaggaacgcctggatggcccacatccaaagggctgtggagagctgccctgacgaggaggaggggcccttcagcctgcccgaagaggaaaggaaggtggtcgaggcccgcgccacgagactccgggactttcaagagcggttgagcatgaaagaccagctgatcgcacagagcctcctagagaaacagcagatctacctggagatggccgagatgggcggcctcgaagacctgccccagccccgaggcctattccgtggaggggacccatccgagaccctgcagggggagctaattctcaagtcggccatgagcgagatcgagggcatccagagcctgatctgcaggcagctgggcagcgccaacggccaggcggaagacggaggcagctccacaggcccgcccaggagggctgagaccttcgcgggctacgactgcacaaacagccccaccaagaatggcagtttcaagaagaaagtcagcagcactgaccccaggccccgagactggcgaggccccccaaacagcccggacttgaagctcagtgacagtgacattcctgggagctctgaggaatcgccgcaggtggtggaggcgccaggcacggaatccgatccccgtctgcccaccgtcctggagtcggagcttgtccagcggatccagacactgtcccagctgctcctgaaccttcaggcggtaatcgcccaccaggacagctatgtggagacgcagcgggctgccatccaggagcgggagaagcagttccggctgcagtcgacgcgtgggaacctgctgctggagcaggagcggcaacgcaacttcgagaagcagcgggaggagcgcgcggccctggagaagctgcagagccagctgcggcacgagcagcagcgctgggagcgcgagcgccagtggcagcaccaggagctggagcgtgcgggcgcgcggctgcaggagcgcgagggcgaggcgcggcagctacgcgagcggctggagcaggagcgggccgagctggagcgccagcgccaggcctaccagcacgacctggagcggctgcgcgaggcccagcgtgccgtggagcgcgagcgggagcgcctggagctgctgcgccgcctcaagaagcagaacaccgcgccaggcgcgctgccgcccgacacactggccgaggcccagcccccaagccaccctcccagcttcaacggggaagggctggagggccctcgtgtgagcatgctgccatccggcgtggggccagagtacgcagagcgccccgaggtggctcgccgggacagcgcccccaccgagaaccggctggccaagagcgatgtgcccatccagctgctcagcgccaccaaccagttccagaggcaggcggccgtgcagcagcagatccccaccaagctggcggcctccaccaagggtggcaaggacaagggcggcaagagcaggggctctcagcgctgggagagctcagcgtccttcgacctgaagcagcagctgctgctcaacaagctcatggggaaagatgagagcacctcacggaaccgccgctcgctgagccctatcctgcccggcagacacagtcctgcgcccccaccagaccctggcttccccgccccgagcccaccgccagctgacagcccctccgagggcttctctctcaaggccgggggcacagccctcctgcccgggcccccagctccctcgccactgccggccacaccactcagcgccaaggaggacgccagcaaagaagacgtcatcttcttctaaaagggccgtgactcaaggaaagtttttaatggaaagttgagccagaactaaaccagggagctgtctgaaatcatagcaccccatccgggtggcggggagatcaactccgagctgtttttccgaggcagtgaggaacggtgccggctctgcacggagctgaggacaggacagaccttgctttgagaaggagctgccggccggggccacgctccacagccgccgcgcgacagtggagccaagggttagggcaccaggaggggccaggtggcgtcggcagcatctgtccccagaatcaggcagaatccacttcccaaacagagccccacgcaggttcaccatgaacctcagggtcagggaatgagccaggcacgggggcatgggcagagagggccacggggcagggcccactgagggaacatcagtggccctccagtcaggttctgtgggtttggaagcccatcgtgaaaggggctgacctttgcccctttttacttggcattggttttgaaaccagctgtttcccaaactctgcttcccaagggcaaccgttgctgttcacacgctcagcctgtctgggggagcgggcctctagcttcagccagggcgggtacacaccctgggcacagggtcctcagcccccgggaaatgagctcccagggctggcgtcccaccttccaggtgggggctggcacatcacagactgtcgagagcgccatgtcccagggcatgcagaggatgcacctagagacgttgcagcaagtggacaagtggccgctgtgcgggcccctcgcttgtagtgagctgttgcagcttacggtccgttccctggaggggtggaggaaggaggtgttgggcagcatcaaaggtgctgggacatcccagggtggtgagatccatccacgatccagctccggtggagaaagggcccatgtcaagccttgttctgcaccccaagcattggtggtaggactgggtcctggctgatcgtccttgttcccagtggggtacatgtgagcccctgccagggccaagtccttctcccgaacccagggtcctgggaactgcagatcccggggggattcagcccttctcccactgtgctggcagaggcactcctgtgacgctgaatacagtgaacagggacattcccgccactcggggacagatgggcacaagggaggggaaactccatcaggaagtgctcccctgggcagaggcgcccactgggtgctgtgggctcaggagggggcggggcaggagctggtgccaaccgggaaccagagccccacagccatacagcccattggtgacaaggtcctgagaacacagtggccaggtgtccccaggctcctggcccctccgacgacctcaactctgcccagcccggtccctggccatcagcgacgctgtccgccccccgtcagatcccatgtgtgccatgtttatcatcagtgttttgtatttttgtactgagtatcggagcactttacagaagctgactgtacattcctgttctgttgtgaagagaacattcccagaccctggcaccctcctgagccggcgtgtgccggtccagccctccgagatgccacaattccttggatgggggagaagttcaaggaatttctgctcggccacgcggtgggaaccccgcgtccccgccatgtggcagaggggtctcagtcgtgctaggcatcgggcggcagcgccgacagcccttccctcgccagtgcccctcggccactcctgggttggagcccgattttatttgtaaagttgacagtcgagcaaatgttcctattttcgtgggatctgcacacgtctttgtcagttgtggtcatgatcttagtcacctgctaattatttttacaatgattacaacatttcctcactgcgggatatttctgacccgctttagaacttaagacctgattctagcaataaacgtgtccgagatgagcggtga

SEQ ID NO: 27251 - protein, 1015 aa, Homo sapiens; identical to SEQ ID NO: 3693

SEQ ID NO: 27252 - DNA, 785 bp, Homo sapiens
taaatcgacttgtgcctcaatatactttttttttttttaaggaaactattgcttgggaataattttcagtttacagaaaaattgcatagatagaaaagagaatattcatggtacccacacccagtttccccgcacattaataactgatgactaaactcccaggctttatccaaatttcacctatttttctgctccagaatccagctcaggctcccacattgcacttggtggatttaacttttgagccaccactcccagccctgtttgtttcttgaatagtcctttgcagaaaactggagacttatggactagggcccagctgccttcaaaagatgtttggggtccctttacaagtgagaggctatataggaatctgcaatttaagacaggcaattcttgcttacaaattggcatttctggaagtcagtgtgcctctagattatttataaaggacagtttgaaaccaattaagacagtcacttaatatgtcatatcaggtccgggtacactggcccatgcctataatcccagcactttgggaagtcgaagcgggaggatcacttaaggctaggtattcaagaccagcctgggcgacataatgagacccccgttgctacagaaaaattttaaattagctgggcatggtatcacacacctgtaatcctagctactcaggaggctgaggctggaggatcccttgagcccaggaattggaggcttcagtgagctgtgatcatgccactgtactctagcctagatgatggagcgagaatgtgtctctcttt

SEQ ID NO: 27253 - protein, 42 aa, Homo sapiens [sequence omitted]

SEQ ID NO: 27254 - DNA, 5934 bp, Homo sapiens
aggtgagcttgtcagcgggcacacgtatcctatgatctgaacccttaaattaatgaacagatgggtgtagacagcggtttgcagcccctgttgatgttgggttggtttataatcaccatatggaacagaatcggagcctcgcgtccacttcgatgctagaattctgttcgagtgctgatgaccaggggcggctaaacaccatgccctgccatctctgggtcttagagtcaccctaacatctgatctagattaattatcatcatgtgcgaggttttggcatgaagcacgccaggctcaccgtttcatgatcttagactatttacagcaaactcaaacagctcacttgctttttacaccctgcaaagaccaagggagagcctggaggggttgttttttttttctgttttattctatcaaagcagcaaatactgcaatttccacagtaaatggtcacagtggggaccaatatcctgccctccagacccgctgcttcagccaatacagcaagggaagacgcagctctgttttctagaaggatcccaccgaggcataaaaacggcgcagcccagcctggcgccgcgccgggtcccggagccccgggcgcgaacatggggaatgcgcactccaaaagcggggacaggcacagcgcgctccccggccgccccgagctgtctttttacggctctttccccaggaaatggagcgagaacgtcttcttggataacgagctgctgacctccaagatcctgtctgtgctgcggccgcagtcggagcggggcttccgcgccggggacctccgctacccgacccactttctcagcaccaactctgtccttgcctctgtcacagcctcgctcaaggagcacccccggggcaccctcctgtccgatggcagcccggccctgtccaggaatgtcggtatgacggtctctcagaaagggggtccccagccaacaccgagcccggctggccctgggacgcaactcggaccaatcacaggagagatggatgaagccgattctgcgtttttaaaatttaagcagacagctgatgactctctgtcccttacatctccaaacaccgagtccatttttgtagaagatccctacaccgcctcgctgaggagtgagattgagtcagacggccacgagtttgaagctgagtcctggagcctcgccgtggatgcagcctacgccaagaagcaaaagagggaggtggtgaaaagacaagatgtcctttatgagctgatgcagacagaggtgcaccacgtgcggacgctcaagatcatgctgaaggtgtactccagggccctgcaggaggagctgcagttcagcagcaaggccattggccgcctcttcccatgcgctgacgacctgctggagacgcacagccacttcctcgctcggctcaaggagcgccgccaggagtccctggaggagggcagtgaccggaattatgtcatccagaaaatcggcgacctcctggttcagcagttttcaggtgaaaatggggagagaatgaaagaaaagtacggtgtgttttgtagtggccacaatgaagctgttagtcattacaagttgctgcttcagcaaaacaagaaatttcaaaacttgatcaagaaaattggcaacttctccatcgtgcggcggcttggcgtgcaggagtgcattctcctggttacacaacgcataaccaaatacccagtgctggtggagcgcatcatccagaacacggaagctggcactgaggactatgaagacctgacccaggccttgaacctcatcaaagatatcatctcacaagtggacgccaaggtcagtgagtgtgagaagggccagcgcctcagggagatcgcagggaagatggacctgaagtcttccagcaaactcaagaacgggctcaccttccgcaaggaagacatgcttcagcggcagctccacctggagggcatgctatgctggaagaccacatcagggcgcttgaaagatatcctggctatcctgctgaccgacgtacttttgctgctacaagaaaaagatcagaaatacgtctttgcttctgtggactcaaagccacccgtcatctcgttacaaaagctcatcgtgagggaagtggccaacgaggagaaagcgatgtttctgatcagcgcctccttgcaagggccggagatgtatgaaatctacacgagctccaaagaggacaggaacgcctggatggcccacatccaaagggctgtggagagctgccctgacgaggaggaggggcccttcagcctgcccgaagaggaaaggaaggtggtcgaggcccgcgccacgagactccgggactttcaagagcggttgagcatgaaagaccagctgatcgcacagagcctcctagagaaacagcagatctacctggagatggccgagatgggcggcctcgaagacctgccccagccccgaggcctattccgtggaggggacccatccgagaccctgcagggggagctaattctcaagtcggccatgagcgagatcgagggcatccagagcctgatctgcaggcagctgggcagcgccaacggccaggcggaagacggaggcagctccacaggcccgcccaggagggctgagaccttcgcgggctacgactgcacaaacagccccaccaagaatggcagtttcaagaagaaagtcagcagcactgaccccaggccccgagactggcgaggccccccaaacagcccggacttgaagctcagtgacagtgacattcctgggagctctgaggaatcgccgcaggtggtggaggcgccaggcacggaatccgatccccgtctgcccaccgtcctggagtcggagcttgtccagcggatccagacactgtcccagctgctcctgaaccttcaggcggtaatcgcccaccaggacagctatgtggagacgcagcgggctgccatccaggagcgggagaagcagttccggctgcagtcgacgcgtgggaacctgctgctggagcaggagcggcaacgcaacttcgagaagcagcgggaggagcgcgcggccctggagaagctgcagagccagctgcggcacgagcagcagcgctgggagcgcgagcgccagtggcagcaccaggagctggagcgtgcgggcgcgcggctgcaggagcgcgagggcgaggcgcggcagctacgcgagcggctggagcaggagcgggccgagctggagcgccagcgccaggcctaccagcacgacctggagcggctgcgcgaggcccagcgtgccgtggagcgcgagcgggagcgcctggagctgctgcgccgcctcaagaagcagaacaccgcgccaggcgcgctgccgcccgacacactggccgaggcccagcccccaagccaccctcccagcttcaacggggaagggctggagggccctcgtgtgagcatgctgccatccggcgtggggccagagtacgcagagcgccccgaggtggctcgccgggacagcgcccccaccgagaaccggctggccaagagcgatgtgcccatccagctgctcagcgccaccaaccagttccagaggcaggcggccgtgcagcagcagatccccaccaagctggcggcctccaccaagggtggcaaggacaagggcggcaagagcaggggctctcagcgctgggagagctcagcgtccttcgacctgaagcagcagctgctgctcaacaagctcatggggaaagatgagagcacctcacggaaccgccgctcgctgagccctatcctgcccggcagacacagtcctgcgcccccaccagaccctggcttccccgccccgagcccaccgccagctgacagcccctccgagggcttctctctcaaggccgggggcacagccctcctgcccgggcccccagctccctcgccactgccggccacaccactcagcgccaaggaggacgccagcaaagaagacgtcatcttcttctaaaagggccgtgactcaaggaaagtttttaatggaaagttgagccagaactaaaccagggagctgtctgaaatcatagcaccccatccgggtggcggggagatcaactccgagctgtttttccgaggcagtgaggaacggtgccggctctgcacggagctgaggacaggacagaccttgctttgagaaggagctgccggccggggccacgctccacagccgccgcgcgacagtggagccaagggttagggcaccaggaggggccaggtggcgtcggcagcatctgtccccagaatcaggcagaatccacttcccaaacagagccccacgcaggttcaccatgaacctcagggtcagggaatgagccaggcacgggggcatgggcagagagggccacggggcagggcccactgagggaacatcagtggccctccagtcaggttctgtgggtttggaagcccatcgtgaaaggggctgacctttgcccctttttacttggcattggttttgaaaccagctgtttcccaaactctgcttcccaagggcaaccgttgctgttcacacgctcagcctgtctgggggagcgggcctctagcttcagccagggcgggtacacaccctgggcacagggtcctcagcccccgggaaatgagctcccagggctggcgtcccaccttccaggtgggggctggcacatcacagactgtcgagagcgccatgtcccagggcatgcagaggatgcacctagagacgttgcagcaagtggacaagtggccgctgtgcgggcccctcgcttgtagtgagctgttgcagcttacggtccgttccctggaggggtggaggaaggaggtgttgggcagcatcaaaggtgctgggacatcccagggtggtgagatccatccacgatccagctccggtggagaaagggcccatgtcaagccttgttctgcaccccaagcattggtggtaggactgggtcctggctgatcgtccttgttcccagtggggtacatgtgagcccctgccagggccaagtccttctcccgaacccagggtcctgggaactgcagatcccggggggattcagcccttctcccactgtgctggcagaggcactcctgtgacgctgaatacagtgaacagggacattcccgccactcggggacagatgggcacaagggaggggaaactccatcaggaagtgctcccctgggcagaggcgcccactgggtgctgtgggctcaggagggggcggggcaggagctggtgccaaccgggaaccagagccccacagccatacagcccattggtgacaaggtcctgagaacacagtggccaggtgtccccaggctcctggcccctccgacgacctcaactctgcccagcccggtccctggccatcagcgacgctgtccgccccccgtcagatcccatgtgtgccatgtttatcatcagtgttttgtatttttgtactgagtatcggagcactttacagaagctgactgtacattcctgttctgttgtgaagagaacattcccagaccctggcaccctcctgagccggcgtgtgccggtccagccctccgagatgccacaattccttggatgggggagaagttcaaggaatttctgctcggccacgcggtgggaaccccgcgtccccgccatgtggcagaggggtctcagtcgtgctaggcatcgggcggcagcgccgacagcccttccctcgccagtgcccctcggccactcctgggttggagcccgattttatttgtaaagttgacagtcgagcaaatgttcctattttcgtgggatctgcacacgtctttgtcagttgtggtcatgatcttagtcacctgctaattatttttacaatgattacaacatttcctcactgcgggatatttctgacccgctttagaacttaagacctgattctagcaataaacgtgtccgagatgagcggtga

SEQ ID NO: 27255 - protein, 1173 aa, Homo sapiens
MVTVGTNILPSRPAASANTAREDAALFSRRIPPRHKNGAAQPGAAPGPGAPGANMGNAHSKSGDRHSALPGRPELSFYGSFPRKWSENVFLDNELLTSKILSVLRPQSERGFRAGDLRYPTHFLSTNSVLASVTASLKEHPRGTLLSDGSPALSRNVGMTVSQKGGPQPTPSPAGPGTQLGPITGEMDEADSAFLKFKQTADDSLSLTSPNTESIFVEDPYTASLRSEIESDGHEFEAESWSLAVDAAYAKKQKREVVKRQDVLYELMQTEVHHVRTLKIMLKVYSRALQEELQFSSKAIGRLFPCADDLLETHSHFLARLKERRQESLEEGSDRNYVIQKIGDLLVQQFSGENGERMKEKYGVFCSGHNEAVSHYKLLLQQNKKFQNLIKKIGNFSIVRRLGVQECILLVTQRITKYPVLVERIIQNTEAGTEDYEDLTQALNLIKDIISQVDAKVSECEKGQRLREIAGKMDLKSSSKLKNGLTFRKEDMLQRQLHLEGMLCWKTTSGRLKDILAILLTDVLLLLQEKDQKYVFASVDSKPPVISLQKLIVREVANEEKAMFLISASLQGPEMYEIYTSSKEDRNAWMAHIQRAVESCPDEEEGPFSLPEEERKVVEARATRLRDFQERLSMKDQLIAQSLLEKQQIYLEMAEMGGLEDLPQPRGLFRGGDPSETLQGELILKSAMSEIEGIQSLICRQLGSANGQAEDGGSSTGPPRRAETFAGYDCTNSPTKNGSFKKKVSSTDPRPRDWRGPPNSPDLKLSDSDIPGSSEESPQVVEAPGTESDPRLPTVLESELVQRIQTLSQLLLNLQAVIAHQDSYVETQRAAIQEREKQFRLQSTRGNLLLEQERQRNFEKQREERAALEKLQSQLRHEQQRWERERQWQHQELERAGARLQEREGEARQLRERLEQERAELERQRQAYQHDLERLREAQRAVERERERLELLRRLKKQNTAPGALPPDTLAEAQPPSHPPSFNGEGLEGPRVSMLPSGVGPEYAERPEVARRDSAPTENRLAKSDVPIQLLSATNQFQRQAAVQQQIPTKLAASTKGGKDKGGKSRGSQRWESSASFDLKQQLLLNKLMGKDESTSRNRRSLSPILPGRHSPAPPPDPGFPAPSPPPADSPSEGFSLKAGGTALLPGPPAPSPLPATPLSAKEDASKEDVIFF

SEQ ID NO: 27256 - DNA, 2594 bp, Homo sapiens
ggaagtgtcaggtgggggtggccaggcccctctgctctcggaggctgccctggcgggtggggacagctggccagcctggagctggcccaaataccttctctcttccagcgtccttcgacctgaagcagcagctgctgctcaacaagctcatggggaaagatgagagcacctcacggaaccgccgctcgctgagccctatcctgcccggcagacacagtcctgcgcccccaccagaccctggcttccccgccccgagcccaccgccagctgacagcccctccgagggcttctctctcaaggccgggggcacagccctcctgcccgggcccccagctccctcgccactgccggccacaccactcagcgccaaggaggacgccagcaaagaagacgtcatcttcttctaaaagggccgtgactcaaggtgcaaggcccctccctgccctgcccacccttcctgctctctggggacccccatggggtcaccatgcccacccagctgtcccctcctcttccctagcaaaccactgatgaccgcctggcaggggccagcctgtcggtgctctgggccttgcagctgtttctgtagggttagcggtggtgccggggtcactttctgaatctctttttttttttttcaaaaaggaaagtttttaatggaaagttgagccagaactaaaccagggagctgtctgaaatcatagcaccccatccgggtggcggggagatcaactccgagctgtttttccgaggcagtgaggaacggtgccggctctgcacggagctgaggacaggacagaccttgctttgagaaggagctgccggccggggccacgctccacagccgccgcgcgacagtggagccaagggttagggcaccaggaggggccaggtggcgtcggcagcatctgtccccagaatcaggcagaatccacttcccaaacagagccccacgcaggttcaccatgaacctcagggtcagggaatgagccaggcacgggggcatgggcagagagggccacggggcagggcccactgagggaacatcagtggccctccagtcaggttctgtgggtttggaagcccatcgtgaaaggggctgacctttgcccctttttacttggcattggttttgaaaccagctgtttcccaaactctgcttcccaagggcaaccgttgctgttcacacgctcagcctgtctgggggagcgggcctctagcttcagccagggcgggtacacaccctgggcacagggtcctcagcccccgggaaatgagctcccagggctggcgtcccaccttccaggtgggggctggcacatcacagactgtcgagagcgccatgtcccagggcatgcagaggatgcacctagagacgttgcagcaagtggacaagtggccgctgtgcgggcccctcgcttgtagtgagctgttgcagcttacggtccgttccctggaggggtggaggaaggaggtgttgggcagcatcaaaggtgctgggacatcccagggtggtgagatccatccacgatccagctccggtggagaaagggcccatgtcaagccttgttctgcaccccaagcattggtggtaggactgggtcctggctgatcgtccttgttcccagtggggtacatgtgagcccctgccagggccaagtccttctcccgaacccagggtcctgggaactgcagatcccggggggattcagcccttctcccactgtgctggcagaggcactcctgtgacgctgaatacagtgaacagggacattcccgccactcggggacagatgggcacaagggaggggaaactccatcaggaagtgctcccctgggcagaggcgcccactgggtgctgtgggctcaggagggggcggggcaggagctggtgccaaccgggaaccagagccccacagccatacagcccattggtgacaaggtcctgagaacacagtggccaggtgtccccaggctcctggcccctccgacgacctcaactctgcccagcccggtccctggccatcagcgacgctgtccgccccccgtcagatcccatgtgtgccatgtttatcatcagtgttttgtatttttgtactgagtatcggagcactttacagaagctgactgtacattcctgttctgttgtgaagagaacattcccagaccctggcaccctcctgagccggcgtgtgccggtccagccctccgagatgccacaattccttggatgggggagaagttcaaggaatttctgctcggccacgcggtgggaaccccgcgtccccgccatgtggcagaggggtctcagtcgtgctaggcatcgggcggcagcgccgacagcccttccctcgccagtgcccctcggccactcctgggttggagcccgattttatttgtaaagttgacagtcgagcaaatgttcctattttcgtgggatctgcacacgtctttgtcagttgtggtcatgatcttagtcacctgctaattatttttacaatgattacaacatttcctcactgcgggatatttctgacccgctttagaacttaagacctgattctagcaataaacgtgtccgagatgagcggtga

SEQ ID NO: 27257 - protein, 85 aa, Homo sapiens
MGKDESTSRNRRSLSPILPGRHSPAPPPDPGFPAPSPPPADSPSEGFSLKAGGTALLPGPPAPSPLPATPLSAKEDASKEDVIFF

SEQ ID NO: 27258 - DNA, 1274 bp, Homo sapiens
gggcacagccctcctgcccgggcccccagctccctcgccactgccggccacaccactcagcgccaaggaggacgccagcaaagaagacgtcatcttcttctaaaagggccgtgactcaaggtgcaaggcccctccctgccctgcccacccttcctgctctctggggacccccatggggtcaccatgcccacccagctgtcccctcctcttccctagcaaaccactgatgaccgcctggcaggggccagcctgtcggtgctctgggccttgcagctgtttctgtagggttagcggtggtgccggggtcactttctgaatctctttttttttttttcaaaaaggaaagtttttaatggaaagttgagccagaactaaaccagggagctgtctgaaatcatagcaccccatccgggtggcggggagatcaactccgagctgtttttccgaggcagtgaggaacggtgccggctctgcacggagctgaggacaggacagaccttgctttgagaaggagctgccggccggggccacgctccacagccgccgcgcgacagtggagccaagggttagggcaccaggaggggccaggtggcgtcggcagcatctgtccccagaatcaggcagaatccacttcccaaacagagccccacgcaggttcaccatgaacctcagggtcagggaatgagccagcccggtccctggccatcagcgacgctgtccgccccccgtcagatcccatgtgtgccatgtttatcatcagtgttttgtatttttgtactgagtatcggagcactttacagaagctgactgtacattcctgttctgttgtgaagagaacattcccagaccctggcaccctcctgagccggcgtgtgccggtccagccctccgagatgccacaattccttggatgggggagaagttcaaggaatttctgctcggccacgcggtgggaaccccgcgtccccgccatgtggcagaggggtctcagtcgtgctaggcatcgggcggcagcgccgacagcccttccctcgccagtgcccctcggccactcctgggttggagcccgattttatttgtaaagttgacagtcgagcaaatgttcctattttcgtgggatctgcacacgtctttgtcagttgtggtcatgatcttagtcacctgctaattatttttacaatgattacaacatttcctcactgcgggatatttctgacccgctttagaacttaagacctgattctagcaataaacgtgtccgagatgagcggtga

SEQ ID NO: 27259 - protein, 41 aa, Homo sapiens [sequence omitted]

SEQ ID NO: 27260 - DNA, 2000 bp, Homo sapiens
ctctctggggacccccatggggtcaccatgcccacccagctgtcccctcctcttccctagcaaaccactgatgaccgcctggcaggggccagcctgtcggtgctctgggccttgcagctgtttctgtagggttagcggtggtgccggggtcactttctgaatctctttttttttttttcaaaaaggaaagtttttaatggaaagttgagccagaactaaaccagggagctgtctgaaatcatagcaccccatccgggtggcggggagatcaactccgagctgtttttccgaggcagtgaggaacggtgccgcatctgtccccagaatcaggcagaatccacttcccaaacagagccccacgcaggttcaccatgaacctcagggtcagggaatgagccaggcacgggggcatgggcagagagggccacggggcagggcccactgagggaacatcagtggccctccagtcaggttctgtgggtttggaagcccatcgtgaaaggggctgacctttgcccctttttacttggcattggttttgaaaccagctgtttcccaaactctgcttcccaagggcaaccgttgctgttcacacgctcagcctgtctgggggagcgggcctctagcttcagccagggcgggtacacaccctgggcacagggtcctcagcccccgggaaatgagctcccagggctggcgtcccaccttccaggtgggggctggcacatcacagactgtcgagagcgccatgtcccagggcatgcagaggatgcacctagagacgttgcagcaagtggacaagtggccgctgtgcgggcccctcgcttgtagtgagctgttgcagcttacggtccgttccctggaggggtggaggaaggaggtgttgggcagcatcaaaggtgctgggacatcccagggtggtgagatccatccacgatccagctccggtggagaaagggcccatgtcaagccttgttctgcaccccaagcattggtggtaggactgggtcctggctgatcgtccttgttcccagtggggtacatgtgagcccctgccagggccaagtccttctcccgaacccagggtcctgggaactgcagatcccggggggattcagcccttctcccactgtgctggcagaggcactcctgtgacgctgaatacagtgaacagggacattcccgccactcggggacagatgggcacaagggaggggaaactccatcaggaagtgctcccctgggcagaggcgcccactgggtgctgtgggctcaggagggggcggggcaggagctggtgccaaccgggaaccagagccccacagccatacagcccattggtgacaaggtcctgagaacacagtggccaggtgtccccaggctcctggcccctccgacgacctcaactctgcccagcccggtccctggccatcagcgacgctgtccgccccccgtcagatcccatgtgtgccatgtttatcatcagtgttttgtatttttgtactgagtatcggagcactttacagaagctgactgtacattcctgttctgttgtgaagagaacattcccagaccctggcaccctcctgagccggcgtgtgccggtccagccctccgagatgccacaattccttggatgggggagaagttcaaggaatttctgctcggccacgcggtgggaaccccgcgtccccgccatgtggcagaggggtctcagtcgtgctaggcatcgggcggcagcgccgacagcccttccctcgccagtgcccctcggccactcctgggttggagcccgattttatttgtaaagttgacagtcgagcaaatgttcctattttcgtgggatctgcacacgtctttgtcagttgtggtcatgatcttagtcacctgctaattatttttacaatgattacaacatttcctcactgcgggatatttctgacccgctttagaacttaagacctgattctagcaataaacgtgtccgagatgagcggtga

SEQ ID NO: 27261 - protein, 114 aa, Homo sapiens
MCAMFIISVLYFCTEYRSTLQKLTVHSCSVVKRTFPDPGTLLSRRVPVQPSEMPQFLGWGRSSRNFCSATRWEPRVPAMWQRGLSRARHRAAAPTALPSPVPLGHSWVGARFYL

SEQ ID NO: 27262 - DNA, 860 bp, Homo sapiens
cgcgccaggcagatgagggaagctggagtgaggttcagagcccggagggaggaggaggacgcctttgtccgctgtgtctccgtcctagggaacctggctgaccagctctactacccctgtgagcacgtggcctgggcggctgatgcccgggtcctccacgtggactcttctcggtggtggacgctgagtacaaccctgtgggccctctctctgctcctgggggttgccaggtccctgtggatgctgctgaaactgagacagaggctgcggagccccacggcgcccttcaccagcccgctgccccggggcaagcggagggccatggaggcgcagatgcagtcggaggcgctgtcacttctcagcaacctggccgacctggccaacgccgtgcactggctgccccggggcgtgctgtgggccggccgcttcccgccgtggctagtgggcctcatgggcaccatctcctcaatcctcagcatgtaccaggcggcccgggccggcggccaggccgaggccactaccccctgacactgccggaagagcacagggacacagccagagcccacggagggcccttcccgcaaagcagaagccgccagggcaggggccggggctctcatggagctgcctgtggtgaaacccatgggcagggtgggtggagggactgatgcgaggtcccccaggcctcagcctggagctcctgagccgtgacagttttcaggggccgtgcagggcttcagcagcacctcctgcctgccagctggcgtcttgtatccaaatcaagatgaggaagagggggcctgtcgtgccttgagaaagctggaacgggaatcaattaaacattgtggtgctggcgcctg

SEQ ID NO: 27263 - protein, 171 aa, Homo sapiens
MREAGVRFRARREEEDAFVRCVSVLGNLADQLYYPCEHVAWAADARVLHVDSSRWWTLSTTLWALSLLLGVARSLWMLLKLRQRLRSPTAPFTSPLPRGKRRAMEAQMQSEALSLLSNLADLANAVHWLPRGVLWAGRFPPWLVGLMGTISSILSMYQAARAGGQAEATTP

SEQ ID NO: 27264 - DNA, 1067 bp, Homo sapiens
ggagttgccatggcgtcgctgagcggcctggcgtcggcgctggagtcgtacaggggccgggaccgcctgatccgagtgctggggtactgctgccagctggttggtggagttctggttgaacagtgtcccgccaggtccgaagtggggacacgtctgttggtggtgtccacccaactcagccactgcaggaccatcttgcgactctttgatgacctggccatgtttgtctacactaagcaatatggcctgggggcacaggaggaggacgcctttgtccgctgtgtctccgtcctagggaacctggctgaccagctctactacccctgtgagcacgtggcctgggcggctgatgcccgggtcctccacgtggactcttctcggtggtggacgctgagtacaaccctgtgggccctctctctgctcctgggggttgccaggtccctgtggatgctgctgaaactgagacagaggctgcggagccccacggcgcccttcaccagcccgctgccccggggcaagcggagggccatggaggcgcagatgcagtcggaggcgctgtcacttctcagcaacctggccgacctggccaacgccgtgcactggctgccccggggcgtgctgtgggccggccgcttcccgccgtggctagtgggcctcatgggcaccatctcctcaatcctcagcatgtaccaggcggcccgggccggcggccaggccgaggccactaccccctgacactgccggaagagcacagggacacagccagagcccacggagggcccttcccgcaaagcagaagccgccagggcaggggccggggctctcatggagctgcctgtggtgaaacccatgggcagggtgggtggagggactgatgcgaggtcccccaggcctcagcctggagctcctgagccgtgacagttttcaggggccgtgcagggcttcagcagcacctcctgcctgccagctggcgtcttgtatccaaatcaagatgaggaagagggggcctgtcgtgccttgagaaagctggaacgggaatcaattaaacattgtggtgctggcgcctg

SEQ ID NO: 27265 - protein, 241 aa, Homo sapiens; identical to SEQ ID NO: 3695

SEQ ID NO: 27266 - DNA, 279 bp, Homo sapiens
cacagcccgctgccccggggcaagcggagggccatggaggcgcagatgcagtcggaggcgctgtcacttctcagcaacctggccgacctggccaacgccgtgcactggctgccccggggcgtgctgtgggccggccgcttcccgccgtggctagtgggcctcatgggcaccatctcctgcctgccagctggcgtcttgtatccaaatcaagatgaggaagagggggcctgtcgtgccttgagaaagctggaacgggaatcaattaaacattgtggtgct

SEQ ID NO: 27267 - protein, 81 aa, Homo sapiens
MEAQMQSEALSLLSNLADLANAVHWLPRGVLWAGRFPPWLVGLMGTISCLPAGVLYPNQDEEEGACRALRKLERESIKHCG

SEQ ID NO: 27268 - DNA, 690 bp, Homo sapiens
acaccctcctggacacttcctacccatgttacctgctggtgacctgtcttgttcatggctatatccgcacagcctggcagaaaacagagaatctgttttgtggctggtgtcccgcgatggccacaggcgccctcctgccgtgctcgcgcccgtgcccgatgtcccggctggacttcctcaaggcctcgcacttctcgctggggcctgacctgcggctgcacgagggcaccatgcgcaccacgtcgcaccgggactttgcctacccggctgccacccgggagccgccgagcctgcagccgccgcccgcgctgcttttcccaatggacccgcgctgggaccgggaagagcgcgtgtcggaggcgcaccgcgcgttcccgccgccatccacgccgccgtgggagctgctgcaagcgcaggcgcgggaacgcacgctcgccatgcaggccggcaacctgcacctgcacgaggacgcgcacgccgggatcggcctctccaacgcgcacgccgcctacggctggcccgagctgccggcgcgcacccgagagcggatccgcggcgcgcgcctcatcttcgaccgcgactccctgcctcctggcgaccgcgacaagttgcgcatcccgcccaccacgcaccaggcgctctttccaccccacgacgcgcgcccgcagcctcgcgcgcccagttgccacc

SEQ ID NO: 27269 - protein, 211 aa, Homo sapiens
MAISAQPGRKQRICFVAGVPRWPQAPSCRARARARCPGWTSSRPRTSRWGLTCGCTRAPCAPRRTGTLPTRLPPGSRRACSRRPRCFSQWTRAGTGKSACRRRTARSRRHPRRRGSCCKRRRGNARSPCRPATCTCTRTRTPGSASPTRTPPTAGPSCRRAPESGSAARASSSTATPCLLATATSCASRPPRTRRSFHPTTRARSLARPVA

SEQ ID NO: 27270 - DNA, 1666 bp, Homo sapiens
aggaacatgaggatcctctgagagaccagggacagagggagacccaaagatctggtctgtagctaagtgaattttctaaaactcattgattcacacgccatcccttgaggtggctggtgtcccgcgatggccacaggcgccctcctgccgtgctcgcgcccgtgcccgatgtcccggctggacttcctcaaggcctcgcacttctcgctggggcctgacctgcggctgcacgagggcaccatgcgcaccacgtcgcaccgggactttgcctacccggctgccacccgggagccgccgagcctgcagccgccgcccgcgctgcttttcccaatggacccgcgctgggaccgggaagagcgcgtgtcggaggcgcaccgcgcgttcccgccgccatccacgccgccgtgggagctgctgcaagcgcaggcgcgggaacgcacgctcgccatgcaggccggcaacctgcacctgcacgaggacgcgcacgccgggatcggcctctccaacgcgcacgccgcctacggctggcccgagctgccggcgcgcacccgagagcggatccgcggcgcgcgcctcatcttcgaccgcgactccctgcctcctggcgaccgcgacaagttgcgcatcccgcccaccacgcaccaggcgctctttccaccccacgacgcgcgcccgcagcctcgcgcgcccagttgccacctcgggggccccaacaccctcaagtgggactacacgagacaagatgggacttcctaccaaagacagttccaggccctgccaggcccacctgccttgaggtgtaagagggcctcctccggagtggagctgggagactgcaagatcagctatggatcaacgtgttcggagcagaaacaggcctacaggccccaggatctgcctgaagataggtatgacaaggcccaggccacagcccacatccactgtgtaaatatccgtcctggtgacggcctcttccgcgacaggaccaccaaggccgagcacttctatgccagggagccagagccttttgttcttcaccacgatcagactccggagtcgcacatcctgaaaggaaattggtgccccggccccggcagtctggacaccttcatgcagtacttctacggccagccgccacccccgacccagccacccagccgccacgtgcctcatgagaaattgcagagtcatgtgaccctaggggagccaaagctactcaaacgcttcttcaagaccaccatgggctcggactactgcccttcagagtggagacaggtgcagaaagcgcccaacctccacttgcagcaaagctacctgccgcggggcacgggcgaattcgattttttaaccatgaaccagaagatgctgaagccacacagaacacctccggccccggtgactgaagagatgctacagcggtgcaagtacagccacatggagccccctctgggtggactgcgcttcttctcaacacaatacaaggacgagtttcctttcaagtaccagggcccagcagccctgagactgaaaaatcctcaggagggcttcgtgcccctgggcacgcctcaccagcgcggctgcagggagaagatagaccctctggtcccccagccccctatgtacctgtgccccagccagcaataaatgccatcttggcaacattcca

SEQ ID NO: 27271 - protein, 505 aa, Homo sapiens
MATGALLPCSRPCPMSRLDFLKASHFSLGPDLRLHEGTMRTTSHRDFAYPAATREPPSLQPPPALLFPMDPRWDREERVSEAHRAFPPPSTPPWELLQAQARERTLAMQAGNLHLHEDAHAGIGLSNAHAAYGWPELPARTRERIRGARLIFDRDSLPPGDRDKLRIPPTTHQALFPPHDARPQPRAPSCHLGGPNTLKWDYTRQDGTSYQRQFQALPGPPALRCKRASSGVELGDCKISYGSTCSEQKQAYRPQDLPEDRYDKAQATAHIHCVNIRPGDGLFRDRTTKAEHFYAREPEPFVLHHDQTPESHILKGNWCPGPGSLDTFMQYFYGQPPPPTQPPSRHVPHEKLQSHVTLGEPKLLKRFFKTTMGSDYCPSEWRQVQKAPNLHLQQSYLPRGTGEFDFLTMNQKMLKPHRTPPAPVTEEMLQRCKYSHMEPPLGGLRFFSTQYKDEFPFKYQGPAALRLKNPQEGFVPLGTPHQRGCREKIDPLVPQPPMYLCPSQQ

SEQ ID NO: 27272 - DNA, 668 bp, Homo sapiens
agacccctgtctctaaaaaaaaaaatagaaagaattagccatgcatggtggtgcacacctatagtcccagatgctcagaagactgaggtggctggtgtcccgcgatggccacaggcgccctcctgccgtgctcgcgcccgtgcccgatgtcccggctggacttcctcaaggcctcgcacttctcgctggggcctgacctgcggctgcacgagggcaccatgcgcaccacgtcgcaccgggactttgcctacccggctgccacccgggagccgccgagcctgcagccgccgcccgcgctgcttttcccaatggacccgcgctgggaccgggaagagcgcgtgtcggaggcgcaccgcgcgttcccgccgccatccacgccgccgtgggagctgctgcaagcgcaggcgcgggaacgcacgctcgccatgcaggccggcaacctgcacctgcacgaggacgcgcacgccgggatcggcctctccaacgcgcacgccgcctacggctggcccgagctgccggcgcgcacccgagagcggatccgcggcgcgcgcctcatcttcgaccgcgactccctgcctcctggcgaccgcgacaagttgcgcatcccgcccaccacgcaccaggcgctctttccaccccacgacgcgcgcccgcagcctcgcgcgccc

SEQ ID NO: 27273 - protein, 41 aa, Homo sapiens
MLRRLRWLVSRDGHRRPPAVLAPVPDVPAGLPQGLALLAGA

SEQ ID NO: 27274 - DNA, 405 bp, Homo sapiens
gagccaaagctactcaaacgcttcttcaagaccaccatgggctcggactactgcccttcagagtggagacagaattcgattttttaaccatgaaccagaagatgctgaagccacacagaacacctccggccccggtgactgaagagatgctacagcggtgcaagtacagccacatggagccccctctgggtggactgcgcttcttctcaacacaatacaaggacgagtttcctttcaagtaccagggcccagcagccctgagactgaaaaatcctcaggagggcttcgtgcccctgggcacgcctcaccagcgcggctgcagggagaagatagaccctctggtcccccagccccctatgtacctgtgccccagccagcaataaatgccatcttggcaacattcca

SEQ ID NO: 27275 - protein, 97 aa, Homo sapiens
MNQKMLKPHRTPPAPVTEEMLQRCKYSHMEPPLGGLRFFSTQYKDEFPFKYQGPAALRLKNPQEGFVPLGTPHQRGCREKIDPLVPQPPMYLCPSQQ

SEQ ID NO: 27276 - DNA, 589 bp, Homo sapiens
ctcctcccccacctcctccctcttccccagcgcctacctctttcccagctcctccctctttcccagctcctcccccttcctctggcttctccctccttctttggctcctccctcccccctctcctaatccatttttctcccctggtcaacttcagcgctggcctgggcttggctcttgaacccttcccttgaacttcaccacaccctcagccccgcctcggcccacagccctcactcagcctccccaacctgaatctccagaattcgattttttaaccatgaaccagaagatgctgaagccacacagaacacctccggccccggtgactgaagagatgctacagcggtgcaagtacagccacatggagccccctctgggtggactgcgcttcttctcaacacaatacaaggacgagtttcctttcaagtaccagggcccagcagccctgagactgaaaaatcctcaggagggcttcgtgcccctgggcacgcctcaccagcgcggctgcagggagaagatagaccctctggtcccccagccccctatgtacctgtgccccagccagcaataaatgccatcttggcaaca

SEQ ID NO: 27277 - protein, 97 aa, Homo sapiens; identical to SEQ ID NO: 27275

SEQ ID NO: 27278 - DNA, 2038 bp, Homo sapiens
ccagaattcgattttttaaccatgaaccagaagatgctgaagccacacagaacacctccggccccggtgactgaagagatgctacagcgggtaataattcctaaattagtcaagactgtcacggatgcaaagaacagacatccactaaaaccagctcaaacacccagaacatttgttggtttgtggtacaggaaagaatgagttctgtggcttcaggtcttgccccagaagctgcgggcacatccacgcctgaaatgcggcgctcagtcctggtcaggaacccaggccacaaaggcctgagacccgtttatgaagagctcgactctgactccgaggacctagaccccaatcctgaagatctggacccggtttctgaagacccagagcctgatcctgaagacctcaacactgtcccggaagacgtggaccccagctatgaagatctggagcccgtctcggaggatctggaccccgacgccgaagctccgggctcggaaccccaagatcccgaccccatgtcttcgagtttcgacctcgatccagatgtgattggccccgtacccctgattctcgatcctaacagcgacaccctcagccccggcgatccaaaagtggaccccatctcctctggcctcactgccaccccccaggtcttggccaccagccccgcggtgctccccgcccccgccagcccgccccggcccttctcctgcccggattgcgggcgagccttccgccgcagctccgggctgagccagcatcgccgcacgcacagcggcgagaagccgtaccgctgccccgactgcgggaagtccttcagccacggtgccaccctggctcagcaccgtggcatccacactggggcgcggccgtaccagtgcgcggcctgcggcaaggccttcggctggcgctccacgctgctgaaacatcgcagcagccacagcggggagaagccgcaccactgcccggtgtgtggcaaggccttcgggcacggctcgctcctggcacagcacctgcgcacgcacggcggcccgcggccccacaagtgcccggtgtgcgccaagggcttcggccagggctctgcgctgctcaaacacctgcgcacgcacacgggcgagcggccctacccgtgtccgcagtgcggcaaggccttcgggcagagctcggcgctgctgcagcaccagcgcacacacacggccgagcgcccctaccgctgcccccactgcggcaaagccttcgggcagagctccaacttgcaacaccacctgcgcatccacacgggcgagcggccctacgcctgcccgcactgctccaaggccttcggccagagctcagcgctgctccagcacctgcacgtgcattcgggcgagcgtccctatcgctgtcagctctgcgggaaggccttcggccaggcctccagcctcaccaagcacaaacgggtgcatgagggtgcagccgctgctgcagctgccgcggccgctgcagctgcagcagcggccgccggcctgggcctcgggcctggcctaagccctgcatccatgatgaggccggggcaggtctccctcctgggtcctgatgctgtttctgtgctcggctctggcttgggcctcagccctggcaccagctctggccgcaaccctgaccctggctctgggccgggcactctgccggatcccagctccaaacccctccccggctccagatccacccccagccctactcctgtggaatcttctgacccaaaggctgggcacgacgctggtcccgaccttgtgcccagcccagaccttgatcctgtgcccagcccagaccctgatcctgtgcccagccctgatcccaaccctgtgtcctgccctgacccctgttctcccactcgtggcactgtcagcccagccctccctaccggcgagagtccagagtgggtacaggagcaaggggcactgctggggcctgatggctgaaggagacgccggcatcctcgggggcctggggaagttgtgtgttgtgcagtcagtaaaatcctcccactgcctccggg

SEQ ID NO: 27279 - protein, 587 aa, Homo sapiens
MSSVASGLAPEAAGTSTPEMRRSVLVRNPGHKGLRPVYEELDSDSEDLDPNPEDLDPVSEDPEPDPEDLNTVPEDVDPSYEDLEPVSEDLDPDAEAPGSEPQDPDPMSSSFDLDPDVIGPVPLILDPNSDTLSPGDPKVDPISSGLTATPQVLATSPAVLPAPASPPRPFSCPDCGRAFRRSSGLSQHRRTHSGEKPYRCPDCGKSFSHGATLAQHRGIHTGARPYQCAACGKAFGWRSTLLKHRSSHSGEKPHHCPVCGKAFGHGSLLAQHLRTHGGPRPHKCPVCAKGFGQGSALLKHLRTHTGERPYPCPQCGKAFGQSSALLQHQRTHTAERPYRCPHCGKAFGQSSNLQHHLRIHTGERPYACPHCSKAFGQSSALLQHLHVHSGERPYRCQLCGKAFGQASSLTKHKRVHEGAAAAAAAAAAAAAAAAAGLGLGPGLSPASMMRPGQVSLLGPDAVSVLGSGLGLSPGTSSGRNPDPGSGPGTLPDPSSKPLPGSRSTPSPTPVESSDPKAGHDAGPDLVPSPDLDPVPSPDPDPVPSPDPNPVSCPDPCSPTRGTVSPALPTGESPEWVQEQGALLGPDG

SEQ ID NO: 27280 - DNA, 1964 bp, Homo sapiens
tctcctggctggcagcggggatctgtgtctccaaggaaagtttgccccgagcccttcccggcccggcgtagggttctccggaaaccatcactcacatctagcacttggaggcctccagggacagcggtgacccaccatctgggtcttgccccagaagctgcgggcacatccacgcctgaaatgcggcgctcagtcctggtcaggaacccaggccacaaaggcctgagacccgtttatgaagagctcgactctgactccgaggacctagaccccaatcctgaagatctggacccggtttctgaagacccagagcctgatcctgaagacctcaacactgtcccggaagacgtggaccccagctatgaagatctggagcccgtctcggaggatctggaccccgacgccgaagctccgggctcggaaccccaagatcccgaccccatgtcttcgagtttcgacctcgatccagatgtgattggccccgtacccctgattctcgatcctaacagcgacaccctcagccccggcgatccaaaagtggaccccatctcctctggcctcactgccaccccccaggtcttggccaccagccccgcggtgctccccgcccccgccagcccgccccggcccttctcctgcccggattgcgggcgagccttccgccgcagctccgggctgagccagcatcgccgcacgcacagcggcgagaagccgtaccgctgccccgactgcgggaagtccttcagccacggtgccaccctggctcagcaccgtggcatccacactggggcgcggccgtaccagtgcgcggcctgcggcaaggccttcggctggcgctccacgctgctgaaacatcgcagcagccacagcggggagaagccgcaccactgcccggtgtgtggcaaggccttcgggcacggctcgctcctggcacagcacctgcgcacgcacggcggcccgcggccccacaagtgcccggtgtgcgccaagggcttcggccagggctctgcgctgctcaaacacctgcgcacgcacacgggcgagcggccctacccgtgtccgcagtgcggcaaggccttcgggcagagctcggcgctgctgcagcaccagcgcacacacacggccgagcgcccctaccgctgcccccactgcggcaaagccttcgggcagagctccaacttgcaacaccacctgcgcatccacacgggcgagcggccctacgcctgcccgcactgctccaaggccttcggccagagctcagcgctgctccagcacctgcacgtgcattcgggcgagcgtccctatcgctgtcagctctgcgggaaggccttcggccaggcctccagcctcaccaagcacaaacgggtgcatgagggtgcagccgctgctgcagctgccgcggccgctgcagctgcagcagcggccgccggcctgggcctcgggcctggcctaagccctgcatccatgatgaggccggggcaggtctccctcctgggtcctgatgctgtttctgtgctcggctctggcttgggcctcagccctggcaccagctctggccgcaaccctgaccctggctctgggccgggcactctgccggatcccagctccaaacccctccccggctccagatccacccccagccctactcctgtggaatcttctgacccaaaggctgggcacgacgctggtcccgaccttgtgcccagcccagaccttgatcctgtgcccagcccagaccctgatcctgtgcccagccctgatcccaaccctgtgtcctgccctgacccctgttctcccactcgtggcactgtcagcccagccctccctaccggcgagagtccagagtgggtacaggagcaaggggcactgctggggcctgatggctgaaggagacgccggcatcctcgggggcctggggaagttgtgtgttgtgcagtcagtaaaatcctcccactgcctccggg

SEQ ID NO: 27281 - protein, 568 aa, Homo sapiens
MRRSVLVRNPGHKGLRPVYEELDSDSEDLDPNPEDLDPVSEDPEPDPEDLNTVPEDVDPSYEDLEPVSEDLDPDAEAPGSEPQDPDPMSSSFDLDPDVIGPVPLILDPNSDTLSPGDPKVDPISSGLTATPQVLATSPAVLPAPASPPRPFSCPDCGRAFRRSSGLSQHRRTHSGEKPYRCPDCGKSFSHGATLAQHRGIHTGARPYQCAACGKAFGWRSTLLKHRSSHSGEKPHHCPVCGKAFGHGSLLAQHLRTHGGPRPHKCPVCAKGFGQGSALLKHLRTHTGERPYPCPQCGKAFGQSSALLQHQRTHTAERPYRCPHCGKAFGQSSNLQHHLRIHTGERPYACPHCSKAFGQSSALLQHLHVHSGERPYRCQLCGKAFGQASSLTKHKRVHEGAAAAAAAAAAAAAAAAAGLGLGPGLSPASMMRPGQVSLLGPDAVSVLGSGLGLSPGTSSGRNPDPGSGPGTLPDPSSKPLPGSRSTPSPTPVESSDPKAGHDAGPDLVPSPDLDPVPSPDPDPVPSPDPNPVSCPDPCSPTRGTVSPALPTGESPEWVQEQGALLGPDG

SEQ ID NO: 27282 - DNA, 1954 bp, Homo sapiens
ggagcgcctggcggggccgctgggccgagggggccgccggcggggctggcgggcggggggcttcctgcgggcccggggggagccggcggccggcgcgggcgcggcgggccgggcaggggcgaggggcgccgggtcttgccccagaagctgcgggcacatccacgcctgaaatgcggcgctcagtcctggtcaggaacccaggccacaaaggcctgagacccgtttatgaagagctcgactctgactccgaggacctagaccccaatcctgaagatctggacccggtttctgaagacccagagcctgatcctgaagacctcaacactgtcccggaagacgtggaccccagctatgaagatctggagcccgtctcggaggatctggaccccgacgccgaagctccgggctcggaaccccaagatcccgaccccatgtcttcgagtttcgacctcgatccagatgtgattggccccgtacccctgattctcgatcctaacagcgacaccctcagccccggcgatccaaaagtggaccccatctcctctggcctcactgccaccccccaggtcttggccaccagccccgcggtgctccccgcccccgccagcccgccccggcccttctcctgcccggattgcgggcgagccttccgccgcagctccgggctgagccagcatcgccgcacgcacagcggcgagaagccgtaccgctgccccgactgcgggaagtccttcagccacggtgccaccctggctcagcaccgtggcatccacactggggcgcggccgtaccagtgcgcggcctgcggcaaggccttcggctggcgctccacgctgctgaaacatcgcagcagccacagcggggagaagccgcaccactgcccggtgtgtggcaaggccttcgggcacggctcgctcctggcacagcacctgcgcacgcacggcggcccgcggccccacaagtgcccggtgtgcgccaagggcttcggccagggctctgcgctgctcaaacacctgcgcacgcacacgggcgagcggccctacccgtgtccgcagtgcggcaaggccttcgggcagagctcggcgctgctgcagcaccagcgcacacacacggccgagcgcccctaccgctgcccccactgcggcaaagccttcgggcagagctccaacttgcaacaccacctgcgcatccacacgggcgagcggccctacgcctgcccgcactgctccaaggccttcggccagagctcagcgctgctccagcacctgcacgtgcattcgggcgagcgtccctatcgctgtcagctctgcgggaaggccttcggccaggcctccagcctcaccaagcacaaacgggtgcatgagggtgcagccgctgctgcagctgccgcggccgctgcagctgcagcagcggccgccggcctgggcctcgggcctggcctaagccctgcatccatgatgaggccggggcaggtctccctcctgggtcctgatgctgtttctgtgctcggctctggcttgggcctcagccctggcaccagctctggccgcaaccctgaccctggctctgggccgggcactctgccggatcccagctccaaacccctccccggctccagatccacccccagccctactcctgtggaatcttctgacccaaaggctgggcacgacgctggtcccgaccttgtgcccagcccagaccttgatcctgtgcccagcccagaccctgatcctgtgcccagccctgatcccaaccctgtgtcctgccctgacccctgttctcccactcgtggcactgtcagcccagccctccctaccggcgagagtccagagtgggtacaggagcaaggggcactgctggggcctgatggctgaaggagacgccggcatcctcgggggcctggggaagttgtgtgttgtgcagtcagtaaaatcctcccactgcctccggg

SEQ ID NO: 27283 - protein, 568 aa, Homo sapiens; identical to SEQ ID NO: 27281

SEQ ID NO: 27284 - DNA, 1193 bp, Homo sapiens
cagcggcgagaagccgtaccgctgccccgactgcgggaagtccttcagccacggtgccaccctggctcagcaccgtggcatccacactggggcgcggccgtaccagtgcgcggcctgcggcaaggccttcggctggcgctccacgctgctgaaacatcgcagcagccacagcggggagaagccgcaccactgcccggtgtgtggcaaggccttcgggcacggctcgctcctggcacagcacctgcgcacgcacggcggcccgcggccccacaagtgcccggtgtgcgccaagggcttcggccagggctctgcgctgctcaaacacctgcgcacgcacacgggcgagcggccctacccgtgtccgcagtgcggcaaggccttcgggcagagctcggcgctgctgcagcaccagcgcacacacacggccgagcgcccctaccgctgcccccactgcggcaaagccttcgggcagagctccaacttgcaacaccacctgcgcatccacacgggcgagcggccctacgcctgcccgcactgctccaaggccttcggccagagctcagcgctgctccagcacctgcacgtgcattcgggcgagcgtccctatcgctgtcagctctgcgggaaggccttcggccaggcctccagcctcaccaagcacaaacgggtgcatgagggtgcagccgctgctgcagctgccgcggccgctgcagctgcagcagcggccgccggcctgggcctcgggcctggcctaagccctgcatccatgatgaggccggggcaggtctccctcctgggtcctgatgctgtttctgtgctcggctctggcttgggcctcagccctggcaccagctctggccgcaaccctgaccctggctctgggccgggcactctgccggatcccagctccaaacccctccccggctccagatccacccccaaccttgatcctgtgcccagcccagaccctgatcctgtgcccagccctgatcccaaccctgtgtcctgccctgacccctgttctcccactcgtggcactgtcagcccagccctccctaccggcgagagtccagagtgggtacaggagcaaggggcactgctggggcctgatggctgaaggagacgccggcatcctcgggggcctggggaagttgtgtgttgtgcagtcagtaaaatcctcccactgcctccgg

SEQ ID NO: 27285 - protein, 129 aa, Homo sapiens
MLFLCSALAWASALAPALAATLTLALGRALCRIPAPNPSPAPDPPPTLILCPAQTLILCPALIPTLCPALTPVLPLVALSAQPSLPARVQSGYRSKGHCWGLMAEGDAGILGGLGKLCVVQSVKSSHCL

SEQ ID NO: 27286 - DNA, 727 bp, Homo sapiens
agatcagctgatgccggagggtttgaagccgcgccgcgagggagcgaggtcgcagtgacagcggcgggcgatcggacccaggctgccccgccgtacccgcctgcgtcccgcgctcccgccccagcatgacagccccggcgggtccgcgcggctcagagaccgagcggcttctgacccccaaccccgggtatgggacccaggcggggccttcaccggcccctccgacacccccagaagaggaagaccttcgccgtcgtctcaaatactttttcatgagtccctgcgacaagtttcgagccaagggccgcaagccctgcaagctgatgctgcaagtggtcaagatcctggtggtcacggtgcagctcatcctgtttgggctcagtaatcagctggctgtgacattccgggaagagaacaccatcgccttccgacacctcttcctgctgggctactcggacggagcggatgacaccttcgcagcctacacgcgggagcagctgtaccaggccatcttccatgctgtggaccagtacctggcgttgcctgacgtgtcactgggccggtatgcgtatgtccgtggtgggggtgacccttggaccaatggctcagggcttgctctctgccagcggtactaccaccgaggccacgtggacccggccaacgacacatttgacattgatccgatggtggttactggctggtcaatgtcaccatccacttccggctg

SEQ ID NO: 27287 - protein, 199 aa, Homo sapiens
MTAPAGPRGSETERLLTPNPGYGTQAGPSPAPPTPPEEEDLRRRLKYFFMSPCDKFRAKGRKPCKLMLQVVKILVVTVQLILFGLSNQLAVTFREENTIAFRHLFLLGYSDGADDTFAAYTREQLYQAIFHAVDQYLALPDVSLGRYAYVRGGGDPWTNGSGLALCQRYYHRGHVDPANDTFDIDPMVVTGWSMSPSTS

SEQ ID NO: 27288 - DNA, 2317 bp, Homo sapiens
agatcagctgatgccggagggtttgaagccgcgccgcgagggagcgaggtcgcagtgacagcggcgggcgatcggacccaggctgccccgccgtacccgcctgcgtcccgcgctcccgccccagcatgacagccccggcgggtccgcgcggctcagagaccgagcggcttctgacccccaaccccgggtatgggacccaggcggggccttcaccggcccctccgacacccccagaagaggaagaccttcgccgtcgtctcaaatactttttcatgagtccctgcgacaagtttcgagccaagggccgcaagccctgcaagctgatgctgcaagtggtcaagatcctggtggtcacggtgcagctcatcctgtttgggctcagtaatcagctggctgtgacattccgggaagagaacaccatcgccttccgacacctcttcctgctgggctactcggacggagcggatgacaccttcgcagcctacacgcgggagcagctgtaccaggccatcttccatgctgtggaccagtacctggcgttgcctgacgtgtcactgggccggtatgcgtatgtccgtggtgggggtgacccttggaccaatggctcagggcttgctctctgccagcggtactaccaccgaggccacgtggacccggccaacgacacatttgacattgatccgatggtggttactgactgcatccaggtggatccccccgagcggccccctccgccccccagcgacgatctcaccctcttggaaagcagctccagttacaagaacctcacgctcaaattccacaagtactgcctgctcactcgaggggggcccagggtgggggaggcagcacactaggcactctcaccccagcaactacttccctaaggtggggacagggcccccccgcccgcgctggtgcctgctgggtgagcacttcccctgccagctgcagagtcagcacgtggcaggggacgctggcacttggggccggaagggacccgaagacgcccctgaccctcacccgagcctcctgcctaggctggtcaatgtcaccatccacttccggctgaagaccattaacctccagagcctcatcaataatgagatcccggactgctataccttcagcgtcctgatcacgtttgacaacaaagcacacagtgggcggatccccatcagcctggagacccaggcccacatccaggagtgtaagcaccccagtgtcttccagcacggagacaacagcttccggctcctgtttgacgtggtggtcatcctcacctgctccctgtccttcctcctctgcgcccgctcactccttcgaggcttcctgctgcagaacgagtttgtggggttcatgtggcggcagcggggacgggtcatcagcctgtgggagcggctggaatttgtcaatggctggtacatcctgctcgtcaccagcgatgtgctcaccatctcgggcaccatcatgaagatcggcatcgaggccaagaacttggcgagctacgacgtctgcagcatcctcctgggcacctcgacgctgctggtgtgggtgggcgtgatccgctacctgaccttcttccacaactacaatatcctcatcgccacactgcgggtggccctgcccagcgtcatgcgcttctgctgctgcgtggctgtcatctacctgggctactgcttctgtggctggatcgtgctggggccctatcatgtgaagttccgctcactctccatggtgtctgagtgcctgttctcgctcatcaatggggacgacatgtttgtgacgttcgccgccatgcaggcgcagcagggccgcagcagcctggtgtggctcttctcccagctctacctttactccttcatcagcctcttcatctacatggtgctcagcctcttcatcgcgctcatcaccggcgcctacgacaccatcaagcatcccggcggcgcaggcgcagaggagagcgagctgcaggcctacatcgcacagtgccaggacagccccacctccggcaagttccgccgcgggagcggctcggcctgcagccttctctgctgctgcggaagggacccctcggaggagcattcgctgctggtgaattgattcgacctgactgccgttggaccgtaggccctggactgcagagacccccgcccccgaccccgcttatttatttgtagggtttgcttttaaggatcggctccctgtcgcgcccgaggagggcctggacctttcgtgtcggacccttgggggcggggagactgggtggggagggtgttgaataaaagggaaaataaatgtgtcgttttcattttta

SEQ ID NO: 27289 - protein, 545 aa, Homo sapiens
MTPSQPTRGSSCTRPSSMLWTSTWRCLTCHWAGMRMSVVGVTLGPMAQGLLSASGTTTEATWTRPTTHLTLIRWWLLTASRWIPPSGPLRPPATISPSWKAAPVTRTSRSNSTSTACSLEGGPGWGRQHTRHSHPSNYFPKVGTGPPRPRWCLLGEHFPCQLQSQHVAGDAGTWGRKGPEDAPDPHPSLLPRLVNVTIHFRLKTINLQSLINNEIPDCYTFSVLITFDNKAHSGRIPISLETQAHIQECKHPSVFQHGDNSFRLLFDVVVILTCSLSFLLCARSLLRGFLLQNEFVGFMWRQRGRVISLWERLEFVNGWYILLVTSDVLTISGTIMKIGIEAKNLASYDVCSILLGTSTLLVWVGVIRYLTFFHNYNILIATLRVALPSVMRFCCCVAVIYLGYCFCGWIVLGPYHVKFRSLSMVSECLFSLINGDDMFVTFAAMQAQQGRSSLVWLFSQLYLYSFISLFIYMVLSLFIALITGAYDTIKHPGGAGAEESELQAYIAQCQDSPTSGKFRRGSGSACSLLCCCGRDPSEEHSLLVN

SEQ ID NO: 27290 - DNA, 2082 bp, Homo sapiens
agatcagctgatgccggagggtttgaagccgcgccgcgagggagcgaggtcgcagtgacagcggcgggcgatcggacccaggctgccccgccgtacccgcctgcgtcccgcgctcccgccccagcatgacagccccggcgggtccgcgcggctcagagaccgagcggcttctgacccccaaccccgggtatgggacccaggcggggccttcaccggcccctccgacacccccagaagaggaagaccttcgccgtcgtctcaaatactttttcatgagtccctgcgacaagtttcgagccaagggccgcaagccctgcaagctgatgctgcaagtggtcaagatcctggtggtcacggtgcagctcatcctgtttgggctcagtaatcagctggctgtgacattccgggaagagaacaccatcgccttccgacacctcttcctgctgggctactcggacggagcggatgacaccttcgcagcctacacgcgggagcagctgtaccaggccatcttccatgctgtggaccagtacctggcgttgcctgacgtgtcactgggccggtatgcgtatgtccgtggtgggggtgacccttggaccaatggctcagggcttgctctctgccagcggtactaccaccgaggccacgtggacccggccaacgacacatttgacattgatccgatggtggttactgactgcatccaggtggatccccccgagcggccccctccgccccccagcgacgatctcaccctcttggaaagcagctccagttacaagaacctcacgctcaaattccacaagctggtcaatgtcaccatccacttccggctgaagaccattaacctccagagcctcatcaataatgagatcccggactgctataccttcagcgtcctgatcacgtttgacaacaaagcacacagtgggcggatccccatcagcctggagacccaggcccacatccaggagtgtaagcaccccagtgtcttccagcacggagacaacagcttccggctcctgtttgacgtggtggtcatcctcacctgctccctgtccttcctcctctgcgcccgctcactccttcgaggcttcctgctgcagaacgagtttgtggggttcatgtggcggcagcggggacgggtcatcagcctgtgggagcggctggaatttgtcaatggctggtacatcctgctcgtcaccagcgatgtgctcaccatctcgggcaccatcatgaagatcggcatcgaggccaagaacttggcgagctacgacgtctgcagcatcctcctgggcacctcgacgctgctggtgtgggtgggcgtgatccgctacctgaccttcttccacaactacaatatcctcatcgccacactgcgggtggccctgcccagcgtcatgcgcttctgctgctgcgtggctgtcatctacctgggctactgcttctgtggctggatcgtgctggggccctatcatgtgaagttccgctcactctccatggtgtctgagtgcctgttctcgctcatcaatggggacgacatgtttgtgacgttcgccgccatgcaggcgcagcagggccgcagcagcctggtgtggctcttctcccagctctacctttactccttcatcagcctcttcatctacatggtgctcagcctcttcatcgcgctcatcaccggcgcctacgacaccatcaagcatcccggcggcgcaggcgcagaggagagcgagctgcaggcctacatcgcacagtgccaggacagccccacctccggcaagttccgccgcgggagcggctcggcctgcagccttctctgctgctgcggaagggacccctcggaggagcattcgctgctggtgaattgattcgacctgactgccgttggaccgtaggccctggactgcagagacccccgcccccgaccccgcttatttatttgtagggtttgcttttaaggatcggctccctgtcgcgcccgaggagggcctggacctttcgtgtcggacccttgggggcggggagactgggtggggagggtgttgaataaaagggaaaataaatgtgtcgttttcattttta

SEQ ID NO: 27291 - protein, 580 aa, Homo sapiens; identical to SEQ ID NO: 3701

SEQ ID NO: 27292 - DNA, 889 bp, Homo sapiens
ccggagggtttgaagccgcgccgcgagggagcgaggtcgcagtgacagcggcgggcgatcggacccaggctgccccgccgtacccgcctgcgtcccgcgctcccgccccagcatgacagccccggcgggtccgcgcggctcagagaccgagcggcttctgacccccaaccccgggtatgggacccaggcggggccttcaccggcccctccgacacccccagaagaggaagaccttcgccgtcgtctcaaatactttttcatgagtccctgcgacaagtttcgagccaagggccgcaagccctgcaagctgatgctgcaagtggtcaagatcctggtggtcacggtgcaggtgaggccagccaagcaggggccccagctgaaggccacctgtggctgctgtgctccttgaagagagtcttaaagcagcactttggaaggccgaggccggtggatcgcttgaggctgggagttcaagaccagtctggccagcatggtgaaaccccatctctactaaaaatacaaaaaaattagccgtgcgtggtggcgggtgcctgtaatcccagctacttggcaggctgaggcaggagaatcgcttgaattgggaggcggaggttgccgtgagctgaaatcatgccactgcactccagcctgggcaacagagcaagactgtctcaaaaaaaaaaagaagccgactctgaggctcagagaggttaggagacttgcccaaagtcacacagcaatagaacattgggagctgggatttgaacccaggcagtctgacaccatgttgacccaatggctgcacagatagttctccctcccccatgccagaccctgtgctgggctctgggaaccccaagatgaatcagacccagccactgccctaagt

SEQ ID NO: 27293 - protein, 98 aa, Homo sapiens
MTAPAGPRGSETERLLTPNPGYGTQAGPSPAPPTPPEEEDLRRRLKYFFMSPCDKFRAKGRKPCKLMLQVVKILVVTVQVRPAKQGPQLKATCGCCAP

SEQ ID NO: 27294 - DNA, 479 bp, Homo sapiens
gggccagctgaggatcaccatgttaatggcaacgtcccagggtcaatgacaaggtcattgaaactgtatgacttagctgggttcagtggctcatgcctgaaatcccagcaccttgggaggccaaggcaggtggatcacctgaggtcaggagttcgagaccagcctggccaacgtggtgaaaccccatctctagtaaaaatacaaaaattagccaggtgtggtggcacgtgcaagtaatcccagagtgctggtattataggcgtgagccaccgtgcccagccacagctgttgattttaatcccagcagctcaggctcccaacagtgaagcctcgtcctgcccactcaccagtaaccaccatcggatcaatgtcaaatgtgtcgttggccgggtccacgtggcctcggtggtagtaccgctggcagagagcaagccctgagccattggtccaagggtcacccccaccacggacatacgcat

SEQ ID NO: 27295 - protein, 63 aa, Homo sapiens
MTRSLKLYDLAGFSGSCLKSQHLGRPRQVDHLRSGVRDQPGQRGETPSLVKIQKLARCGGTCK

SEQ ID NO: 27296 - DNA, 472 bp, Homo sapiens
gagtttgtggggttcatgtggcggcagcggggacgggtcatcagcctcctcttcatcgcgctcatcaccggcgcctacgacaccatcaagcatcccggcggcgcaggcgcagaggagagcgagctgcaggcctacatcgcacagtgccaggacagccccacctccggcaagttccgccgcgggagcggctcggcctgcagccttctctgctgctgcggaagggacccctcggaggagcattcgctgctggtgaattgattcgacctgactgccgttggaccgtaggccctggactgcagagacccccgcccccgaccccgcttatttatttgtagggtttgcttttaaggatcggctccctgtcgcgcccgaggagggcctggacctttcgtgtcggacccttgggggcggggagactgggtggggagggtgttgaataaaagggaaaataaatgtgtcgttttcattttta

SEQ ID NO: 27297 - protein, 80 aa, Homo sapiens
MWRQRGRVISLLFIALITGAYDTIKHPGGAGAEESELQAYIAQCQDSPTSGKFRRGSGSACSLLCCCGRDPSEEHSLLVN

SEQ ID NO: 27298 - DNA, 207 bp, Homo sapiens
tgctgctgcgtggctgtcatctacctgactgccgttggaccgtaggccctggactgcagagacccccgcccccgaccccgcttatttatttgtagggtttgcttttaaggatcggctccctgtcgcgcccgaggagggcctggacctttcgtgtcggacccttgggggcggggagactgggtggggagggtgttgaataaaagggaa

SEQ ID NO: 27299 - protein, 30 aa, Homo sapiens
LLRGCHLPDCRWTVGPGLQRPPPPTPLIYL

SEQ ID NO: 27300 - DNA, 1177 bp, Homo sapiens
acaattttttaaaaattttaattcaaatgaagtacaattgcaaatttagcctctgacttgcaccatcctgtatccagtgctcaaaagccagtgtggctggtggctgccatattggacagcatagatattgaatacttccatcgcctctagactgaagagatgggagcccaggggcagtgcaccgaggggaaggaatagctaaagcaaaggtctagtagcctgaaaaaacttggagaaaagatggcccctccatgaggccgagtgagaggaaggaagccttggctgggaccctgccacatccaatgtcaccggcagatgggtacacccccttttccccatgcatggattcagctgtcccacagacacattgactcaggcccttggaactacttcctgtcttgccttagcacgtagacatcacacacatgcatccactcaggtgggcagtctcaggccctgctcccactgctgtgctcagcgtgcatccagctcactcaatagatggtttctgagcatcgaggtcatgtcagccctggctctaggtctgtaggtgctggacctacagcagaaggcaaagacacagactggcaaagacacagcttgtatccaggttcaggggtcagggaaggtccctctgtgcaagcaaactgtggaacaacgggtggagcaggcccagcaagtgcaaaggcccggaggtgggaagcgatgcagatatggctggaggggagggcggacttcaagggccttggaggttgggagccactttcaggctgagcctcccggcttctctccccagcatcccggcggcgcaggcgcagaggagagcgagctgcaggcctacatcgcacagtgccaggacagccccacctccggcaagttccgccgcgggagcggctcggcctgcagccttctctgctgctgcggaagggacccctcggaggagcattcgctgctggtgaattgattcgacctgactgccgttggaccgtaggccctggactgcagagacccccgcccccgaccccgcttatttatttgtagggtttgcttttaaggatcggctccctgtcgcgcccgaggagggcctggacctttcgtgtcggacccttgggggcggggagactgggtggggagggtgttgaataaaagggaaaataaatgtgtcgttttcattttt

SEQ ID NO: 27301 - protein, 81 aa, Homo sapiens
MAGGEGGLQGPWRLGATFRLSLPASLPSIPAAQAQRRASCRPTSHSARTAPPPASSAAGAARPAAFSAAAEGTPRRSIRCW

SEQ ID NO: 27302 - DNA, 450 bp, Homo sapiens
tctctgcagtccagggcctacggtccaacggcagtcaggtcgaatcaattcaccagcagcgaatgctcctccgaggggtccctggaggaaggaagcagggaagaggggcgtcagttttctctggctcgctcccctttccccattccctaacctccaatctgaatgtgccaccaaggcttccttcctctcactcggcctcatggaggggccatcttttctccaagttttttcaggctactagacctttgctttagctattccttcccctcggtgcactgcccctgggctcccatctcttcagtctagaggcgatggaagtattcaatatctatgctgtccaatatggcagccaccagccacactggcttttgagcactggatacaggatggtgcaagtcagaggctaaatttgcaattgtacttcatttgaattaaaatttttaaaaaatt

SEQ ID NO: 27303 - protein, 63 aa, Homo sapiens
MLLRGVPGGRKQGRGASVFSGSLPFPHSLTSNLNVPPRLPSSHSASWRGHLFSKFFQATRPLL

SEQ ID NO: 27304 - DNA, 4463 bp, Homo sapiens
aatttaaaggggccgtgcctgcggagccgggcggaacgctagcggtgttggcgcggagtggaccccggctgcggcccctggcaatggcgccaccatcggtcccggagtcccagtgatgctctgtgccatagagcccccataacttcactactacgtgatagtaaatccccggcaaaaaccagcagcgccttgcaagcccacgccaccccaagcatcccaggactcttctgaaacgactccgggctaccagatcggccgtccagctggaatcaaccgatggaggctccgctgcaaactggaatggtgcttggcgtgatgatcggggccggagtggcggtggtggtcacggccgtgctcatcctcctggtggtgcggaggctgcgagtgccaaaaaccccagccccggatggcccccggtatcggttccggaagagggacaaagtgctcttctatggccggaagattatgcggaaggtgtcacaatccacctcctccctcgtggatacctctgtctccgccacctcccggccacgcatgaggaagaaactgaagatgctcaacattgccaagaagatcctgcgcatccagaaagagacgcccacgctgcagcggaaggagcccccgcccgcagtgctagaagctgacctgaccgagggcgacctggctaactcccatctgccctctgaagtgctttatatgctcaagaacgtccgggtgctgggccacttcgagaagccactcttcctggagctctgccgccacatggtcttccagcggctgggccagggtgactacgtcttccggccgggccagccagatgccagcatctacgtggtgcaggacgggctgctggagctctgtctgccagggcctgacgggaaggagtgtgtggtgaaggaagtggttcctggggacagcgtcaacagccttctcagcatcctggatgtcatcaccggtcaccagcatccccagcggaccgtgtctgcccgggcggcccgggactccacggtgctgcgcctgccggtggaagcattctccgcggtcttcaccaagtacccggagagcttggtgcgggtcgtgcagatcatcatggtgcggctgcagcgagtcaccttcctggcactgcacaactacctgggtctgaccaatgagctcttcagccacgagatccagcccctgcgtctgttccccagccccggcctcccaactcgcaccagccctgtgcggggctccaagagaatggtcagcacctcagctacagacgagcccagggagaccccagggcggccacccgatcccaccggggccccgctgcctggacctacaggggaccctgtgaagcccacatccctggaaaccccctcggcccctctgctgagccgctgcgtctccatgccaggggacatctcaggcttgcagggtggcccccgctccgacttcgacatggcctatgagcgtggccggatctccgtgtccctgcaggaagaggcctccggggggtccctggcagcccccgctcggacccccactcaggagcctcgtgagcagccggcaggcgcctgtgaatacagctactgtgaggatgagtcggccactggtggctgccctttcgggccctaccagggccgccagaccagcagcatcttcgaggcagcaaagcaggagctggccaagctgatgcggattgaggacccctccctcctgaacagcagagtcttgctgcaccacgccaaagctggcaccatcattgcccgccagggagaccaggacgtgagcctgcacttcgtgctctggggctgcctgcacgtgtaccagcgcatgatcgacaaggcggaggacgtgtgcctgttcgtagcgcagcccggggaactggtggggcagctggcggtgctcactggcgaacctctcatcttcacactgcgagcccaacgcgactgcaccttcctgcggatctccaagtccgacttctatgagatcatgcgcgcacagcccagtgtggtgctgagtgcggcgcacacggtggcagccaggatgtcgcccttcgtgcgccagatggacttcgccatcgactggactgcagtggaggcgggacgcgcgctgtacaggcagggcgaccgctccgactgcacttacatcgtgctcaatgggcggctgcgtagcgtgatccagcgaggcagtggcaagaaggagctggtgggcgagtacggccgcggcgacctcatcggcgtggtggaggcactgacccggcagccgcgagccacgacggtgcacgcggtgcgcgacacggagctggccaagcttcccgagggcaccttgggtcacatcaaacgccggtacccgcaggtcgtgacccgccttatccacctactgagccagaaaattctagggaatttgcagcagctgcaaggacccttcccaggctctgggttgggtgtgcccccacactcggaactcaccaacccagccagcaacctggcaactgtggcaatcctgcctgtgtgtgctgaggtccccatggtggccttcacgctggagctgcagcacgccctgcaggccatcggtccgacgctactccttaacagtgacatcatccgggcacgcctgggggcctccgcactggatagcatccaagagttccggctgtcagggtggctggcccagcaggaggatgcacaccgtatcgtactctaccagacggacgcctcgctgacgccctggaccgtgcgctgcctgcgacaggccgactgcatcctcattgtgggcctgggggaccaggagcctaccctcggccagctggagcagatgctggagaacacggctgtgcgcgcccttaagcagctagtcctgctccaccgagaggagggcgcgggccccacgcgcaccgtggagtggctaaatatgcgcagctggtgctcggggcacctgcacctgcgctgtccgcgccgcctcttttcgcgccgcagccctgccaagctgcatgagctctacgagaaggttttctccaggcgcgcggaccggcacagcgacttctcccgcttggcgagggtgctcacggggaacaccattgcccttgtgctaggcgggggcggggccaggggctgctcgcacatcggagtactaaaggcattagaggaggcgggggtccccgtggacctggtgggcggcacgtccattggctctttcatcggagcgttgtacgcggaggagcgcagcgccagccgcacgaagcagcgggcccgggagtgggccaagagcatgacttcggtgctggaacctgtgttggacctcacgtacccagtcacctccatgttcactgggtctgcctttaaccgcagcatccatcgggtcttccaggataagcagattgaggacctgtggctgccttacttcaacgtgaccacagatatcaccgcctcagccatgcgagtccacaaagatggctccctgtggcggtacgtgcgcgccagcatgacgctgtcgggctacctgcccccgctgtgcgaccccaaggacgggcacctactcatggatggcggctacatcaacaatctgccagcggacatcgcccgcagcatgggtgccaaaacggtcatcgccattgacgtggggagccaggatgagacggacctcagcacctacggggacagcctgtccggctggtggctgctgtggaagcggctgaatccctgggctgacaaggtaaaggttccagacatggctgaaatccagtcccgcctggcctacgtgtcctgtgtgcggcagctagaggttgtcaagtccagctcctactgcgagtacctgcgcccgcccatcgactgcttcaagaccatggactttgggaagttcgaccagatctatgatgtgggctaccagtacgggaaggcggtgtttggaggctggagccgtggcaacgtcattgagaaaatgctcacagaccggcggtctacagaccttaatgagagccgccgtgcagacgtgcttgccttcccaagctctggcttcactgacttggcagagattgtgtcccggattgagccccccacgagctatgtctctgatggctgtgctgacggagaggagtcagattgtctgacagagtatgaggaggacgccggacccgactgctcgagggatgaaggggggtcccccgagggcgcaagccccagcactgcctccgagatggaggaggagaagtcgattctccggcaacgacgctgtctgccccaggagccgcccggctcagccacagatgcctgaggacctcgacaggggtcaccccctccctcccacccctggactgggctgggggtggccccgtgggggtagctcactccccctcctgctgctatgcctgtgacccccgcggcccacacactggactgacctgccctgagcggggatgcagtgttgcactgatgacttgaccagcccctcccccaataaactcgcctcttggaaatggc

SEQ ID NO: 27305 - protein, 1326 aa, Homo sapiens [sequence omitted]

SEQ ID NO: 27306 - DNA, 465 bp, Homo sapiens
aacgctagcggtgttggcgcggagtggaccccggctgcggcccctgggtgtttccacaccggtagccagctgtgccctgaggtggaagaggaccggccacccaggaattttccaagtaacgactcggagtctccgggattcctatctcccggcccccgaatttccattaatattctagcgatgtcagaaacatcctcagcttcccagaaaaatcccagtaatattccagcatctctcagtatcttccaaggagcccggacgccctccccaggcccgctctcataagcaccccaggaatgtgcccacccacctcctggttttcccagcagtagtattgtaatcctcagaatctcagtaactttccagtgaccccgcatccccacccactaatcccagcgtctctggttacgcctcccagcaatggcgccaccatcggtcccggagtcccagtgatgctctgtgcca

SEQ ID NO: 27307 - protein, 34 aa, Homo sapiens
MSETSSASQKNPSNIPASLSIFQGARTPSPGPLS

SEQ ID NO: 27308 - DNA, 4376 bp, Homo sapiens
gcactgcgggccgccgggcctcagggaagagtcgcgcccccggggagggagcagcactggcccattctgcagatggggacatcgagtcacgggctggctacgaactcctcgggggcgaaggtggcggagagggatgggttccaggacgtcctggcgcccggggaaggctcggcgggacggatttgcggtgcgcagccagtgccgttcgtccctcaggtgcttggcgtgatgatcggggccggagtggcggtggtggtcacggccgtgctcatcctcctggtggtgcggaggctgcgagtgccaaaaaccccagccccggatggcccccggtatcggttccggaagagggacaaagtgctcttctatggccggaagattatgcggaaggtgtcacaatccacctcctccctcgtggatacctctgtctccgccacctcccggccacgcatgaggaagaaactgaagatgctcaacattgccaagaagatcctgcgcatccagaaagagacgcccacgctgcagcggaaggagcccccgcccgcagtgctagaagctgacctgaccgagggcgacctggctaactcccatctgccctctgaagtgctttatatgctcaagaacgtccgggtgctgggccacttcgagaagccactcttcctggagctctgccgccacatggtcttccagcggctgggccagggtgactacgtcttccggccgggccagccagatgccagcatctacgtggtgcaggacgggctgctggagctctgtctgccagggcctgacgggaaggagtgtgtggtgaaggaagtggttcctggggacagcgtcaacagccttctcagcatcctggatgtcatcaccggtcaccagcatccccagcggaccgtgtctgcccgggcggcccgggactccacggtgctgcgcctgccggtggaagcattctccgcggtcttcaccaagtacccggagagcttggtgcgggtcgtgcagatcatcatggtgcggctgcagcgagtcaccttcctggcactgcacaactacctgggtctgaccaatgagctcttcagccacgagatccagcccctgcgtctgttccccagccccggcctcccaactcgcaccagccctgtgcggggctccaagagaatggtcagcacctcagctacagacgagcccagggagaccccagggcggccacccgatcccaccggggccccgctgcctggacctacaggggaccctgtgaagcccacatccctggaaaccccctcggcccctctgctgagccgctgcgtctccatgccaggggacatctcaggcttgcagggtggcccccgctccgacttcgacatggcctatgagcgtggccggatctccgtgtccctgcaggaagaggcctccggggggtccctggcagcccccgctcggacccccactcaggagcctcgtgagcagccggcaggcgcctgtgaatacagctactgtgaggatgagtcggccactggtggctgccctttcgggccctaccagggccgccagaccagcagcatcttcgaggcagcaaagcaggagctggccaagctgatgcggattgaggacccctccctcctgaacagcagagtcttgctgcaccacgccaaagctggcaccatcattgcccgccagggagaccaggacgtgagcctgcacttcgtgctctggggctgcctgcacgtgtaccagcgcatgatcgacaaggcggaggacgtgtgcctgttcgtagcgcagcccggggaactggtggggcagctggcggtgctcactggcgaacctctcatcttcacactgcgagcccaacgcgactgcaccttcctgcggatctccaagtccgacttctatgagatcatgcgcgcacagcccagtgtggtgctgagtgcggcgcacacggtggcagccaggatgtcgcccttcgtgcgccagatggacttcgccatcgactggactgcagtggaggcgggacgcgcgctgtacaggcagggcgaccgctccgactgcacttacatcgtgctcaatgggcggctgcgtagcgtgatccagcgaggcagtggcaagaaggagctggtgggcgagtacggccgcggcgacctcatcggcgtggtggaggcactgacccggcagccgcgagccacgacggtgcacgcggtgcgcgacacggagctggccaagcttcccgagggcaccttgggtcacatcaaacgccggtacccgcaggtcgtgacccgccttatccacctactgagccagaaaattctagggaatttgcagcagctgcaaggacccttcccaggctctgggttgggtgtgcccccacactcggaactcaccaacccagccagcaacctggcaactgtggcaatcctgcctgtgtgtgctgaggtccccatggtggccttcacgctggagctgcagcacgccctgcaggccatcggtccgacgctactccttaacagtgacatcatccgggcacgcctgggggcctccgcactggatagcatccaagagttccggctgtcagggtggctggcccagcaggaggatgcacaccgtatcgtactctaccagacggacgcctcgctgacgccctggaccgtgcgctgcctgcgacaggccgactgcatcctcattgtgggcctgggggaccaggagcctaccctcggccagctggagcagatgctggagaacacggctgtgcgcgcccttaagcagctagtcctgctccaccgagaggagggcgcgggccccacgcgcaccgtggagtggctaaatatgcgcagctggtgctcggggcacctgcacctgcgctgtccgcgccgcctcttttcgcgccgcagccctgccaagctgcatgagctctacgagaaggttttctccaggcgcgcggaccggcacagcgacttctcccgcttggcgagggtgctcacggggaacaccattgcccttgtgctaggcgggggcggggccaggggctgctcgcacatcggagtactaaaggcattagaggaggcgggggtccccgtggacctggtgggcggcacgtccattggctctttcatcggagcgttgtacgcggaggagcgcagcgccagccgcacgaagcagcgggcccgggagtgggccaagagcatgacttcggtgctggaacctgtgttggacctcacgtacccagtcacctccatgttcactgggtctgcctttaaccgcagcatccatcgggtcttccaggataagcagattgaggacctgtggctgccttacttcaacgtgaccacagatatcaccgcctcagccatgcgagtccacaaagatggctccctgtggcggtacgtgcgcgccagcatgacgctgtcgggctacctgcccccgctgtgcgaccccaaggacgggcacctactcatggatggcggctacatcaacaatctgccagcggacatcgcccgcagcatgggtgccaaaacggtcatcgccattgacgtggggagccaggatgagacggacctcagcacctacggggacagcctgtccggctggtggctgctgtggaagcggctgaatccctgggctgacaaggtaaaggttccagacatggctgaaatccagtcccgcctggcctacgtgtcctgtgtgcggcagctagaggttgtcaagtccagctcctactgcgagtacctgcgcccgcccatcgactgcttcaagaccatggactttgggaagttcgaccagatctatgatgtgggctaccagtacgggaaggcggtgtttggaggctggagccgtggcaacgtcattgagaaaatgctcacagaccggcggtctacagaccttaatgagagccgccgtgcagacgtgcttgccttcccaagctctggcttcactgacttggcagagattgtgtcccggattgagccccccacgagctatgtctctgatggctgtgctgacggagaggagtcagattgtctgacagagtatgaggaggacgccggacccgactgctcgagggatgaaggggggtcccccgagggcgcaagccccagcactgcctccgagatggaggaggagaagtcgattctccggcaacgacgctgtctgccccaggagccgcccggctcagccacagatgcctgaggacctcgacaggggtcaccccctccctcccacccctggactgggctgggggtggccccgtgggggtagctcactccccctcctgctgctatgcctgtgacccccgcggcccacacactggactgacctgccctgagcggggatgcagtgttgcactgatgacttgaccagcccctcccccaataaactcgcctcttggaaatggc

SEQ ID NO: 27309 - protein, 1365 aa, Homo sapiens
MGTSSHGLATNSSGAKVAERDGFQDVLAPGEGSAGRICGAQPVPFVPQVLGVMIGAGVAVVVTAVLILLVVRRLRVPKTPAPDGPRYRFRKRDKVLFYGRKIMRKVSQSTSSLVDTSVSATSRPRMRKKLKMLNIAKKILRIQKETPTLQRKEPPPAVLEADLTEGDLANSHLPSEVLYMLKNVRVLGHFEKPLFLELCRHMVFQRLGQGDYVFRPGQPDASIYVVQDGLLELCLPGPDGKECVVKEVVPGDSVNSLLSILDVITGHQHPQRTVSARAARDSTVLRLPVEAFSAVFTKYPESLVRVVQIIMVRLQRVTFLALHNYLGLTNELFSHEIQPLRLFPSPGLPTRTSPVRGSKRMVSTSATDEPRETPGRPPDPTGAPLPGPTGDPVKPTSLETPSAPLLSRCVSMPGDISGLQGGPRSDFDMAYERGRISVSLQEEASGGSLAAPARTPTQEPREQPAGACEYSYCEDESATGGCPFGPYQGRQTSSIFEAAKQELAKLMRIEDPSLLNSRVLLHHAKAGTIIARQGDQDVSLHFVLWGCLHVYQRMIDKAEDVCLFVAQPGELVGQLAVLTGEPLIFTLRAQRDCTFLRISKSDFYEIMRAQPSVVLSAAHTVAARMSPFVRQMDFAIDWTAVEAGRALYRQGDRSDCTYIVLNGRLRSVIQRGSGKKELVGEYGRGDLIGVVEALTRQPRATTVHAVRDTELAKLPEGTLGHIKRRYPQVVTRLIHLLSQKILGNLQQLQGPFPGSGLGVPPHSELTNPASNLATVAILPVCAEVPMVAFTLELQHALQAIGPTLLLNSDIIRARLGASALDSIQEFRLSGWLAQQEDAHRIVLYQTDASLTPWTVRCLRQADCILIVGLGDQEPTLGQLEQMLENTAVRALKQLVLLHREEGAGPTRTVEWLNMRSWCSGHLHLRCPRRLFSRRSPAKLHELYEKVFSRRADRHSDFSRLARVLTGNTIALVLGGGGARGCSHIGVLKALEEAGVPVDLVGGTSIGSFIGALYAEERSASRTKQRAREWAKSMTSVLEPVLDLTYPVTSMFTGSAFNRSIHRVFQDKQIEDLWLPYFNVTTDITASAMRVHKDGSLWRYVRASMTLSGYLPPLCDPKDGHLLMDGGYINNLPADIARSMGAKTVIAIDVGSQDETDLSTYGDSLSGWWLLWKRLNPWADKVKVPDMAEIQSRLAYVSCVRQLEVVKSSSYCEYLRPPIDCFKTMDFGKFDQIYDVGYQYGKAVFGGWSRGNVIEKMLTDRRSTDLNESRRADVLAFPSSGFTDLAEIVSRIEPPTSYVSDGCADGEESDCLTEYEEDAGPDCSRDEGGSPEGASPSTASEMEEEKSILRQRRCLPQEPPGSATDA

SEQ ID NO: 27310 - DNA, 461 bp, Homo sapiens
ccatcttagttgtcaagtctcagctcactgtccttagaaaagcctctttctccctcccttcctccctccctctttcagccacacggcaagatgaccctcttttgtcttctagatattgtattctctatctgtaatttctttccttttcttttctttttttttttctttctttttttttttttgagatggagttttgctctggttgcccaggctggagtgcaatggcgtaggctcggctcactgcaacctctgcctccccggttcaagcgattctcctgcctcagccgtccaagtagtgagactacaggcatgtgtcaccaagcccagctaatgtttgaaatttttgtagagacgggggtcctactatgttgcccaggctggtttcaaactcaatctcctgggctcaagcgatcctcctgcctcagcctcccaaagtgctgagattacaggcatgagccacc

SEQ ID NO: 27311 - protein, 116 aa, Homo sapiens
MTLFCLLDIVFSICNFFPFLFFFFFFLFFFLRWSFALVAQAGVQWRRLGSLQPLPPRFKRFSCLSRPSSETTGMCHQAQLMFEIFVETGVLLCCPGWFQTQSPGLKRSSCLSLPKC

SEQ ID NO: 27312 - DNA, 827 bp, Homo sapiens
ctgggtctgcctttaaccgcagcatccatcgggtcttccaggataagcagattgaggtaggcccacctcatcccctgccctgcctacccctccccggaggagccccctgctcctcccccacctcgatccctgtccccgcaggacctgtggctgccttacttcaacgtgaccacagatatcaccgcctcagccatgcgagtccacaaagatggctccctgtggcggtacgtgcgcgccagcatgacgctgtcgggctacctgcccccgctgtgcgaccccaaggacgggcacctactcatggatggcggctacatcaacaatctgccaggcaagtggccgcccgcaccacccgcacacgcaagcacctcccgcaccacacacacgcacacgcgtgggcacacacagacaggctcgatgacgggacacatgcccaagctgcccatgcaggggtgcagacacacatgcgcacacatacgatcacttgcacaaaatgatacatgaatgtgcctgtggacagcgacatgtgcagttgagatctacattctggccaggcgcggtggctcagcctggaatcccagcactttgggaggcctgaggtgggtggatcacctgaggtcaggagtttgagacccgcctggccaacatggtgaaaccccgtctctactaaaaatacaaaaaattaaccaggctggtggggtgtgcctgtaatcccagctactcaggaggctgaggcagataaatcacttgaacctgggagttggaggttgcagtgagctgagatcatgctactgcactccagcctgggcgacagagcaagactcagtctc

SEQ ID NO: 27313 - protein, 102 aa, Homo sapiens
MRVHKDGSLWRYVRASMTLSGYLPPLCDPKDGHLLMDGGYINNLPGKWPPAPPAHASTSRTTHTHTRGHTQTGSMTGHMPKLPMQGCRHTCAHIRSLAQNDT

SEQ ID NO: 27314 - DNA, 662 bp, Homo sapiens
agtggggacaagcaaagcagggttgcagacatggacccagcccctcatttcccacaggatgtgggctaccagtacgggaaggcggtgtttggaggctggagccgtggcaacgtcattgagaaaatgctcacagaccggcggtctacagaccttaatgagagccgccgtgcagacgtgcttgccttcccaagctctggcttcactgacttggcagagattgtgtcccggattgagccccccacgagctatgtctctgatggctgtgctgacggagaggagtcagattgtctgacagagtatgaggaggacgccggacccgactgctcgagggatgaaggggggtcccccgagggcgcaagccccagcactgcctccgagatggaggaggagaagtcgattctccggcaacgacgctgtctgccccaggagccgcccggctcagccacagatgcctgaggacctcgacaggggtcaccccctccctcccacccctggactgggctgggggtggccccgtgggggtagctcactccccctcctgctgctatgcctgtgacccccgcggcccacacactggactgacctgccctgagcggggatgcagtgttgcactgatgacttgaccagcccctcccccaataaactcgcctcttggaaatggc

SEQ ID NO: 27315 - protein, 141 aa, Homo sapiens
MDPAPHFPQDVGYQYGKAVFGGWSRGNVIEKMLTDRRSTDLNESRRADVLAFPSSGFTDLAEIVSRIEPPTSYVSDGCADGEESDCLTEYEEDAGPDCSRDEGGSPEGASPSTASEMEEEKSILRQRRCLPQEPPGSATDA

SEQ ID NO: 27316 - DNA, 4102 bp, Homo sapiens
gcggcggtagcagcagcgggcccggctggggcgcgagcgcggcgcagcccagcccagcccagtccgagcgcggacccggcgcccgcagccccggcgccgccatggtggaggcggcgccccccgggcccgggccgctgcggaggacctttctagtgcccgagatcaagtcgctggaccagtacgatttctcgcgggccaaggcggcggccagcctggcgtgggtgctgcgggccgcgttcgggggcgcagagcacgtgcccccggagctgtgggagcccttctataccgaccagtacgcgcaggagcatgtgaagcccccggtgacacggctgctgctctcagccgagctctactgcagagcctggcgccaggcactgccacagcttgaaacaccccccaacccctctgcactgctggccctgctggcgcggaggggcacagtgcctgctttgcccgagcgcccggtgcgcgaggccgacctgaggcaccagcccattctcatgggagcccacctagctgtcattgatgccctcatggctgcctttgccttcgagtggacaaagaccctgccaggtcccttggccctgaccagcttggagcacaagctgcttttctgggtggacacgaccgtccggcggctgcaggagaagaccgagcaggaagcggcccagcgagcctctccagcagcccctgcagacggggcggccccggcgcagccctcgatccgataccgcaaggaccgtgtggtggcgcgacgtgccccctgcttcccgacggtgaccagcctccaggacctggccagtggggccgcgctggccgccaccatccactgctattgtccccagctgcttcgacttgaggaggtgtgcttgaaggaccccatgtctgtggcggacagcctgtacaacctccagctcgtgcaggatttctgtgcctctcgccttcctcgtggctgccccctgtcccttgaggacttgctgtacgtcccaccgccactcaaggtcaacttggtggtgatgctggccgagttgttcatgtgttttgaggtgctcaagcccgactttgtgcaagtgaaggacttgcccgatggtcacgctgcctccccccggggcactgaggcctccccacctcagaacaacagcggcagtagttctcctgtcttcaccttccgccacccgcttctgtcatctggtggcccccagtccccactccgaggatccacaggctccctgaagtcttccccgtccatgtcccatatggaggccctgggcaaggcctggaaccggcagctcagccgtcccctctcccaggctgtgtcattcagcaccccctttggcctggacagcgacgtggatgtcgtcatgggagaccctgtgctcctccgctctgtgagctcggacagcctgggccccccgcgtcccgcgccggccaggacccccacccagccacccccggagcctggtgacctgcccaccatcgaggaagctctgcagatcatccacagtgccgagccccggctcctcccagatggggcggccgacggcagcttctacctccactcccctgaggggccctccaagccatccctggcctccccctacctgcccgaggggacctccaaaccactgtccgacaggcccaccaaagcaccagtgtacatgccacaccccgagaccccctcgaaaccatctccctgtctggtgggggaggcatcgaaaccgccagccccatccgaggggtccccgaaggcggtggcttcgtccccagcagccaccaactccgaggtgaaaatgaccagctttgcagaacgcaagaaacagctggtgaaggcagaggctgaggccggagcggggtcccccacgtccactccggccccgccggaggccctgagctcggagatgagtgagctcagcgcccggctggaggagaaacgcagagccatcgaggctcagaagcgacggattgaggccatattcgccaagcaccgccagcggctgggcaaaagcgccttcctgcaggtgcagccgcgggaagcctctggggaggcggaagcagaggcggaggaggccgattccggtccagtccctggtggggagcggcccgcaggcgagggccagggtgagccaacctcacggcccaaggcagtgaccttctcgccagacctgggcccggtgccccacgaggggctgggggaatacaatcgagcggtcagcaagctgagtgccgccttgagctcgctgcagcgggacatgcagaggctcacggaccagcagcagcggctcctggccccgcccgaggcccccggatccgccccaccacctgctgcgtgggtcatccctggccccacgacggggcccaaagctgcatcccccagccccgcccggcgagtcccggccacccggcgcagccctgggcccgggcccagccagtcaccccgcagcccgaaacacacgcggccagcggagctgcggctggcacccttgaccagggtgcttacgccaccccacgacgtagacagcctcccccacctgcgcaagttctcgccgagccaggtgcccgtgcagacgcgctcttccatcctcctggcggaggagacgccccccgaggagccagccgcccggccgggcctcatcgagatcccgctgggcagcctggcagatcccgccgccgaggacgagggagacgggagccccgctggtgctgaggattccttggaggaggaggcgtcttcggagggggagccccgggtggggctggggttcttctacaaggatgaagacaagcctgaggacgagatggcccaaaagcgggccagcctgctggagcggcagcagcggcgagcagaggaggcgcggcggcgcaagcagtggcaggaggtggagaaggaacagcggagggaggaggccgcgaggctggcccaagaggaggccccgggcccagccccgcttgtgtccgcagtcccgatggcgactccagcccctgctgcccgggctccagccgaggaggaggtgggcccccggaagggggacttcacgcggcaggagtacgagcgccgggcccagctgaagctgatggacgacctcgataaggtgctgcggccccgggctgcggggtccgggggtccaggtcggggcgggcggagggccacccggcctcgctcgggttgctgtgacgactcagccctggcacgaagcccagcccgcggcctgctgggctctcggctgagcaaaatctattcccagtccaccctgtcactgtccactgtggccaacgaggcccacaataacctcggggtgaagaggcccacgtctcgggctccctccccgtcaggtctcatgtccccaagccgcctgcctggaagccgcgaacgggactgggaaaatggcagcaatgcctcctccccagcgtcagtgcccgagtacacaggtccacggctgtacaaagaacccagcgccaagtccaacaagttcatcatccacaatgccctatcacactgctgcctggcgggcaaggtgaacgaaccgcagaagaatcgcattctggaggaaattgagaaaagcaaggccaaccacttcctgatcctctttcgcgactcgagctgccagttccgggcgctctacacgctgtcgggggagacagaggagctgtcgcggctggcagggtatgggccccggaccgtcacgcccgccatggtggaaggcatctacaagtacaactcggaccgcaagcgcttcacccagatccccgccaagaccatgtccatgagcgtcgatgccttcaccatccagggacacctctggcagggcaagaaacccaccactcccaagaagggcggcggcacccccaaatagccccacccgggcggtccacgggccgggccctgtgtgctgcggccgccatcccctggaggacagtcagtcggtattcctgggtcctgtctgtccccaaccgtgtctgggtggggctggagtctccaccctctgactttgagtccagtcctgctgtgggggctgagctgggaggttcagggactcagggctcagctcagtccccttgtctgtcctcccccacttcttgaataaaataatttaaagagaagttg

SEQ ID NO: 27317 - protein, 1249 aa, Homo sapiens
MVEAAPPGPGPLRRTFLVPEIKSLDQYDFSRAKAAASLAWVLRAAFGGAEHVPPELWEPFYTDQYAQEHVKPPVTRLLLSAELYCRAWRQALPQLETPPNPSALLALLARRGTVPALPERPVREADLRHQPILMGAHLAVIDALMAAFAFEWTKTLPGPLALTSLEHKLLFWVDTTVRRLQEKTEQEAAQRASPAAPADGAAPAQPSIRYRKDRVVARRAPCFPTVTSLQDLASGAALAATIHCYCPQLLRLEEVCLKDPMSVADSLYNLQLVQDFCASRLPRGCPLSLEDLLYVPPPLKVNLVVMLAELFMCFEVLKPDFVQVKDLPDGHAASPRGTEASPPQNNSGSSSPVFTFRHPLLSSGGPQSPLRGSTGSLKSSPSMSHMEALGKAWNRQLSRPLSQAVSFSTPFGLDSDVDVVMGDPVLLRSVSSDSLGPPRPAPARTPTQPPPEPGDLPTIEEALQIIHSAEPRLLPDGAADGSFYLHSPEGPSKPSLASPYLPEGTSKPLSDRPTKAPVYMPHPETPSKPSPCLVGEASKPPAPSEGSPKAVASSPAATNSEVKMTSFAERKKQLVKAEAEAGAGSPTSTPAPPEALSSEMSELSARLEEKRRAIEAQKRRIEAIFAKHRQRLGKSAFLQVQPREASGEAEAEAEEADSGPVPGGERPAGEGQGEPTSRPKAVTFSPDLGPVPHEGLGEYNRAVSKLSAALSSLQRDMQRLTDQQQRLLAPPEAPGSAPPPAAWVIPGPTTGPKAASPSPARRVPATRRSPGPGPSQSPRSPKHTRPAELRLAPLTRVLTPPHDVDSLPHLRKFSPSQVPVQTRSSILLAEETPPEEPAARPGLIEIPLGSLADPAAEDEGDGSPAGAEDSLEEEASSEGEPRVGLGFFYKDEDKPEDEMAQKRASLLERQQRRAEEARRRKQWQEVEKEQRREEAARLAQEEAPGPAPLVSAVPMATPAPAARAPAEEEVGPRKGDFTRQEYERRAQLKLMDDLDKVLRPRAAGSGGPGRGGRRATRPRSGCCDDSALARSPARGLLGSRLSKIYSQSTLSLSTVANEAHNNLGVKRPTSRAPSPSGLMSPSRLPGSRERDWENGSNASSPASVPEYTGPRLYKEPSAKSNKFIIHNALSHCCLAGKVNEPQKNRILEEIEKSKANHFLILFRDSSCQFRALYTLSGETEELSRLAGYGPRTVTPAMVEGIYKYNSDRKRFTQIPAKTMSMSVDAFTIQGHLWQGKKPTTPKKGGGTPK

SEQ ID NO: 27318 - DNA, 4183 bp, Homo sapiens
gcggcggtagcagcagcgggcccggctggggcgcgagcgcggcgcagcccagcccagcccagtccgagcgcggacccggcgcccgcagccccggcgccgccatggtggaggcggcgccccccgggcccgggccgctgcggaggacctttctagtgcccgagatcaagtcgctggaccagtacgatttctcgcgggccaaggcggcggccagcctggcgtgggtgctgcgggccgcgttcgggggcgcagagcacgtgcccccggagctgtgggagcccttctataccgaccagtacgcgcaggagcatgtgaagcccccggtgacacggctgctgctctcagccgagctctactgcagagcctggcgccaggcactgccacagcttgaaacaccccccaacccctctgcactgctggccctgctggcgcggaggggcacagtgcctgctttgcccgagcgcccggtgcgcgaggccgacctgaggcaccagcccattctcatgggagcccacctagctgtcattgatgccctcatggctgcctttgccttcgagtggacaaagaccctgccaggtcccttggccctgaccagcttggagcacaagctgcttttctgggtggacacgaccgtccggcggctgcaggagaagaccgagcaggaagcggcccagcgagcctctccagcagcccctgcagacggggcggccccggcgcagccctcgtgccctacgcgctggtactggaagctggttcctcacgcaattgccttctgtttgaaggagtcggggagcaaaccccccatgatccgataccgcaaggaccgtgtggtggcgcgacgtgccccctgcttcccgacggtgaccagcctccaggacctggccagtggggccgcgctggccgccaccatccactgctattgtccccagctgcttcgacttgaggaggtgtgcttgaaggaccccatgtctgtggcggacagcctgtacaacctccagctcgtgcaggatttctgtgcctctcgccttcctcgtggctgccccctgtcccttgaggacttgctgtacgtcccaccgccactcaaggtcaacttggtggtgatgctggccgagttgttcatgtgttttgaggtgctcaagcccgactttgtgcaagtgaaggacttgcccgatggtcacgctgcctccccccggggcactgaggcctccccacctcagaacaacagcggcagtagttctcctgtcttcaccttccgccacccgcttctgtcatctggtggcccccagtccccactccgaggatccacaggctccctgaagtcttccccgtccatgtcccatatggaggccctgggcaaggcctggaaccggcagctcagccgtcccctctcccaggctgtgtcattcagcaccccctttggcctggacagcgacgtggatgtcgtcatgggagaccctgtgctcctccgctctgtgagctcggacagcctgggccccccgcgtcccgcgccggccaggacccccacccagccacccccggagcctggtgacctgcccaccatcgaggaagctctgcagatcatccacagtgccgagccccggctcctcccagatggggcggccgacggcagcttctacctccactcccctgaggggccctccaagccatccctggcctccccctacctgcccgaggggacctccaaaccactgtccgacaggcccaccaaagcaccagtgtacatgccacaccccgagaccccctcgaaaccatctccctgtctggtgggggaggcatcgaaaccgccagccccatccgaggggtccccgaaggcggtggcttcgtccccagcagccaccaactccgaggtgaaaatgaccagctttgcagaacgcaagaaacagctggtgaaggcagaggctgaggccggagcggggtcccccacgtccactccggccccgccggaggccctgagctcggagatgagtgagctcagcgcccggctggaggagaaacgcagagccatcgaggctcagaagcgacggattgaggccatattcgccaagcaccgccagcggctgggcaaaagcgccttcctgcaggtgcagccgcgggaagcctctggggaggcggaagcagaggcggaggaggccgattccggtccagtccctggtggggagcggcccgcaggcgagggccagggtgagccaacctcacggcccaaggcagtgaccttctcgccagacctgggcccggtgccccacgaggggctgggggaatacaatcgagcggtcagcaagctgagtgccgccttgagctcgctgcagcgggacatgcagaggctcacggaccagcagcagcggctcctggccccgcccgaggcccccggatccgccccaccacctgctgcgtgggtcatccctggccccacgacggggcccaaagctgcatcccccagccccgcccggcgagtcccggccacccggcgcagccctgggcccgggcccagccagtcaccccgcagcccgaaacacacgcggccagcggagctgcggctggcacccttgaccagggtgcttacgccaccccacgacgtagacagcctcccccacctgcgcaagttctcgccgagccaggtgcccgtgcagacgcgctcttccatcctcctggcggaggagacgccccccgaggagccagccgcccggccgggcctcatcgagatcccgctgggcagcctggcagatcccgccgccgaggacgagggagacgggagccccgctggtgctgaggattccttggaggaggaggcgtcttcggagggggagccccgggtggggctggggttcttctacaaggatgaagacaagcctgaggacgagatggcccaaaagcgggccagcctgctggagcggcagcagcggcgagcagaggaggcgcggcggcgcaagcagtggcaggaggtggagaaggaacagcggagggaggaggccgcgaggctggcccaagaggaggccccgggcccagccccgcttgtgtccgcagtcccgatggcgactccagcccctgctgcccgggctccagccgaggaggaggtgggcccccggaagggggacttcacgcggcaggagtacgagcgccgggcccagctgaagctgatggacgacctcgataaggtgctgcggccccgggctgcggggtccgggggtccaggtcggggcgggcggagggccacccggcctcgctcgggttgctgtgacgactcagccctggcacgaagcccagcccgcggcctgctgggctctcggctgagcaaaatctattcccagtccaccctgtcactgtccactgtggccaacgaggcccacaataacctcggggtgaagaggcccacgtctcgggctccctccccgtcaggtctcatgtccccaagccgcctgcctggaagccgcgaacgggactgggaaaatggcagcaatgcctcctccccagcgtcagtgcccgagtacacaggtccacggctgtacaaagaacccagcgccaagtccaacaagttcatcatccacaatgccctatcacactgctgcctggcgggcaaggtgaacgaaccgcagaagaatcgcattctggaggaaattgagaaaagcaaggccaaccacttcctgatcctctttcgcgactcgagctgccagttccgggcgctctacacgctgtcgggggagacagaggagctgtcgcggctggcagggtatgggccccggaccgtcacgcccgccatggtggaaggcatctacaagtacaactcggaccgcaagcgcttcacccagatccccgccaagaccatgtccatgagcgtcgatgccttcaccatccagggacacctctggcagggcaagaaacccaccactcccaagaagggcggcggcacccccaaatagccccacccgggcggtccacgggccgggccctgtgtgctgcggccgccatcccctggaggacagtcagtcggtattcctgggtcctgtctgtccccaaccgtgtctgggtggggctggagtctccaccctctgactttgagtccagtcctgctgtgggggctgagctgggaggttcagggactcagggctcagctcagtccccttgtctgtcctcccccacttcttgaataaaataatttaaagagaagttg

SEQ ID NO: 27319 - protein, 1276 aa, Homo sapiens
MVEAAPPGPGPLRRTFLVPEIKSLDQYDFSRAKAAASLAWVLRAAFGGAEHVPPELWEPFYTDQYAQEHVKPPVTRLLLSAELYCRAWRQALPQLETPPNPSALLALLARRGTVPALPERPVREADLRHQPILMGAHLAVIDALMAAFAFEWTKTLPGPLALTSLEHKLLFWVDTTVRRLQEKTEQEAAQRASPAAPADGAAPAQPSCPTRWYWKLVPHAIAFCLKESGSKPPMIRYRKDRVVARRAPCFPTVTSLQDLASGAALAATIHCYCPQLLRLEEVCLKDPMSVADSLYNLQLVQDFCASRLPRGCPLSLEDLLYVPPPLKVNLVVMLAELFMCFEVLKPDFVQVKDLPDGHAASPRGTEASPPQNNSGSSSPVFTFRHPLLSSGGPQSPLRGSTGSLKSSPSMSHMEALGKAWNRQLSRPLSQAVSFSTPFGLDSDVDVVMGDPVLLRSVSSDSLGPPRPAPARTPTQPPPEPGDLPTIEEALQIIHSAEPRLLPDGAADGSFYLHSPEGPSKPSLASPYLPEGTSKPLSDRPTKAPVYMPHPETPSKPSPCLVGEASKPPAPSEGSPKAVASSPAATNSEVKMTSFAERKKQLVKAEAEAGAGSPTSTPAPPEALSSEMSELSARLEEKRRAIEAQKRRIEAIFAKHRQRLGKSAFLQVQPREASGEAEAEAEEADSGPVPGGERPAGEGQGEPTSRPKAVTFSPDLGPVPHEGLGEYNRAVSKLSAALSSLQRDMQRLTDQQQRLLAPPEAPGSAPPPAAWVIPGPTTGPKAASPSPARRVPATRRSPGPGPSQSPRSPKHTRPAELRLAPLTRVLTPPHDVDSLPHLRKFSPSQVPVQTRSSILLAEETPPEEPAARPGLIEIPLGSLADPAAEDEGDGSPAGAEDSLEEEASSEGEPRVGLGFFYKDEDKPEDEMAQKRASLLERQQRRAEEARRRKQWQEVEKEQRREEAARLAQEEAPGPAPLVSAVPMATPAPAARAPAEEEVGPRKGDFTRQEYERRAQLKLMDDLDKVLRPRAAGSGGPGRGGRRATRPRSGCCDDSALARSPARGLLGSRLSKIYSQSTLSLSTVANEAHNNLGVKRPTSRAPSPSGLMSPSRLPGSRERDWENGSNASSPASVPEYTGPRLYKEPSAKSNKFIIHNALSHCCLAGKVNEPQKNRILEEIEKSKANHFLILFRDSSCQFRALYTLSGETEELSRLAGYGPRTVTPAMVEGIYKYNSDRKRFTQIPAKTMSMSVDAFTIQGHLWQGKKPTTPKKGGGTPK

SEQ ID NO: 27320 - DNA, 1880 bp, Homo sapiens
ggcctgtactcacttctgacttagtcctgcgccactgtcctcagctctgtgtcccagccacactggcccccttgtacttccgtgccccccagtaggtttgctccagcctcagggcctcggcactagctgtcccctctgcctggaacgctctgctctgtacgcccacctagttaaatcctgatcattctacagggtacttcctctgggaagccttcctgggtgtctccaggccaggccggggtcctcccgcagtgtagagtgtctgtgcccaacacgagcttttgctggcactcactgctgtctgctgcttttgtcttccccgttgggttaagcagtgtgtgtgtgagcggcacccagtgtatcccatccctgttgtgtcccagtacttagtgtggggctgtgcatacagtaggcaccaactaagtgcatttagaacaatgatgaaaacaaaagcacaggtgggtggcgggcaggctgggtggagggaagatgggcctccagccatgttgggggagggggtggctggctggactcggcgtctgtccccaggatgaagacaagcctgaggacgagatggcccaaaagcgggccagcctgctggagcggcagcagcggcgagcagaggaggcgcggcggcgcaagcagtggcaggaggtggagaaggaacagcggagggaggaggccgcgaggctggcccaagaggaggccccgggcccagccccgcttgtgtccgcagtcccgatggcgactccagcccctgctgcccgggctccagccgaggaggaggtgggcccccggaagggggacttcacgcggcaggagtacgagcgccgggcccagctgaagctgatggacgacctcgataaggtgctgcggccccgggctgcggggtccgggggtccaggtcggggcgggcggagggccacccggcctcgctcgggttgctgtgacgactcagccctggcacgaagcccagcccgcggcctgctgggctctcggctgagcaaaatctattcccagtccaccctgtcactgtccactgtggccaacgaggcccacaataacctcggggtgaagaggcccacgtctcgggctccctccccgtcaggtctcatgtccccaagccgcctgcctggaagccgcgaacgggactgggaaaatggcagcaatgcctcctccccagcgtcagtgcccgagtacacaggtccacggctgtacaaagaacccagcgccaagtccaacaagttcatcatccacaatgccctatcacactgctgcctggcgggcaaggtgaacgaaccgcagaagaatcgcattctggaggaaattgagaaaagcaaggccaaccacttcctgatcctctttcgcgactcgagctgccagttccgggcgctctacacgctgtcgggggagacagaggagctgtcgcggctggcagggtatgggccccggaccgtcacgcccgccatggtggaaggcatctacaagtacaactcggaccgcaagcgcttcacccagatccccgccaagaccatgtccatgagcgtcgatgccttcaccatccagggacacctctggcagggcaagaaacccaccactcccaagaagggcggcggcacccccaaatagccccacccgggcggtccacgggccgggccctgtgtgctgcggccgccatcccctggaggacagtcagtcggtattcctgggtcctgtctgtccccaaccgtgtctgggtggggctggagtctccaccctctgactttgagtccagtcctgctgtgggggctgagctgggaggttcagggactcagggctcagctcagtccccttgtctgtcctcccccacttcttgaataaaataatttaaagagaagttg

SEQ ID NO: 27321 - protein, 379 aa, Homo sapiens [sequence omitted]

SEQ ID NO: 27322 - DNA, 1445 bp, Homo sapiens
gtgtctgtgcccaacacgagcttttgctggcactcactgctgtctgctgcttttgtcttccccgttgggttaagcagtgtgtgtgtgagcggcacccagtgtatcccatccctgttgtgtcccagtacttagtgtggggctgtgcatacagtaggcaccaactaagtgcatttagaacaatgatgaaaacaaaagcacaggtgggtggcgggcaggctgggtggagggaagatgggcctccagccatgttgggggagggggtggctggctggactcggcgtctgtccccaggatgaagacaagcctgaggacgagatggcccaaaagcgggccagcctgctggagcggcagcagcggcgagcagaggaggcgcggcggcgcaagcagtggcaggaggtggagaaggaacagcggagggaggaggccgcgaggctggcccaagaggaggccccgggcccagccccgcttgtgtccgcagtcccgatggcgactccagcccctgctgcccgggctccagccgaggaggaggtgggcccccggaagggggacttcacgcggcaggagtacgacaaaatctattcccagtccaccctgtcactgtccactgtggccaacgaggcccacaataacctcggggtgaagaggcccacgtctcgggctccctccccgtcaggtctcatgtccccaagccgcctgcctggaagccgcgaacgggactgggaaaatggcagcaatgcctcctccccagcgtcagtgcccgagtacacaggtccacggctgtacaaagaacccagcgccaagtccaacaagttcatcatccacaatgccctatcacactgctgcctggcgggcaaggtgaacgaaccgcagaagaatcgcattctggaggaaattgagaaaagcaaggccaaccacttcctgatcctctttcgcgactcgagctgccagttccgggcgctctacacgctgtcgggggagacagaggagctgtcgcggctggcagggtatgggccccggaccgtcacgcccgccatggtggaaggcatctacaagtacaactcggaccgcaagcgcttcacccagatccccgccaagaccatgtccatgagcgtcgatgccttcaccatccagggacacctctggcagggcaagaaacccaccactcccaagaagggcggcggcacccccaaatagccccacccgggcggtccacgggccgggccctgtgtgctgcggccgccatcccctggaggacagtcagtcggtattcctgggtcctgtctgtccccaaccgtgtctgggtggggctggagtctccaccctctgactttgagtccagtcctgctgtgggggctgagctgggaggttcagggactcagggctcagctcagtccccttgtctgtcctcccccacttcttgaataaaataatttaaagagaagttg

SEQ ID NO: 27323 - protein, 320 aa, Homo sapiens
MGLQPCWGRGWLAGLGVCPQDEDKPEDEMAQKRASLLERQQRRAEEARRRKQWQEVEKEQRREEAARLAQEEAPGPAPLVSAVPMATPAPAARAPAEEEVGPRKGDFTRQEYDKIYSQSTLSLSTVANEAHNNLGVKRPTSRAPSPSGLMSPSRLPGSRERDWENGSNASSPASVPEYTGPRLYKEPSAKSNKFIIHNALSHCCLAGKVNEPQKNRILEEIEKSKANHFLILFRDSSCQFRALYTLSGETEELSRLAGYGPRTVTPAMVEGIYKYNSDRKRFTQIPAKTMSMSVDAFTIQGHLWQGKKPTTPKKGGGTPK

SEQ ID NO: 27324 - DNA, 850 bp, Homo sapiens
gccttgtacctgctgtacgcacagctggaggaggagtggggcctggcccggcatgccatggccgtgtacgagcgtgccaccagggccgtggagcccgcccagcagtatgacatgttcaacatctacatcaagcgggcggccgagatctatggggtcacccacacccgcggcatctaccagaaggccattgaggtgctgtcggacgagcacgcgcgtgagatgtgcctgcggtttgcagacatggagtgcaagctcggggagattgaccgcgcccgggccatctacagcttctgctcccagatctgtgacccccggacgaccggcgcgttctggcagacgtggaaggactttgaggtccggcatggcaatgaggacaccatcaaggaaatgctgcgtatccggcgcagcgtgcaggccacgtacaacacgcaggtcaacttcatggcctcgcagatgctcaaggtctcgggcagtgccacgggcaccgtgtctgacctggcccctgggcagagtggcatggacgacatgaagctgctggaacagcgggcagagcagctggcggctgaggcggagcgtgaccagcccttgcgcgcccagagcaagatcctgttcgtgaggagtgacgcctcccgggaggagctggcagagctggcacagcaggtcaaccccgaggagatccagctgggcgaggacgaggacgaggacgagatggacctggagcccaacgaggttcggctggagcagcagagcgtgccagccgcagtgtttgggagcctgaaggaagactgacccgtccctcccccatcccccctccccaccccctccccaatacagctacgtttgtacatca

SEQ ID NO: 27325 - protein, 243 aa, Homo sapiens
MAVYERATRAVEPAQQYDMFNIYIKRAAEIYGVTHTRGIYQKAIEVLSDEHAREMCLRFADMECKLGEIDRARAIYSFCSQICDPRTTGAFWQTWKDFEVRHGNEDTIKEMLRIRRSVQATYNTQVNFMASQMLKVSGSATGTVSDLAPGQSGMDDMKLLEQRAEQLAAEAERDQPLRAQSKILFVRSDASREELAELAQQVNPEEIQLGEDEDEDEMDLEPNEVRLEQQSVPAAVFGSLKED

SEQ ID NO: 27326 - DNA, 2667 bp, Homo sapiens
agcgcgcgactctctcctgtacctgggcatccagaaaaatggtggtgatggcgcgactctcgcggcccgagcggccggaccttgtcttcgaggaagaggacctcccctatgaggaggaaatcatgcggaaccaattctctgtcaaatgctggcttcgctacatcgagttcaaacagggcgccccgaagcccaggctcaatcagctatacgagcgggcactcaagctgctgccctgcagctacaaactctggtaccgatacctgaaggcgcgtcgggcacaggtgaagcatcgctgtgtgaccgaccctgcctatgaagatgtcaacaactgtcatgagagggcctttgtgttcatgcacaagatgcctcgtctgtggctagattactgccagttcctcatggaccaggggcgcgtcacacacacccgccgcaccttcgaccgtgccctccgggcactgcccatcacgcagcactctcgaatttggcccctgtatctgcgcttcctgcgctcacacccactgcctgagacagctgtgcgaggctatcggcgcttcctcaagctgagtcctgagagtgcagaggagtacattgagtacctcaagtcaagtgaccggctggatgaggccgcccagcgcctggccaccgtggtgaacgacgagcgtttcgtgtctaaggccggcaagtccaactaccagctgtggcacgagctgtgcgacctcatctcccagaatccggacaaggtacagtccctcaatgtggacgccatcatccgcgggggcctcacccgcttcaccgaccagctgggcaagctctggtgttctctcgccgactactacatccgcagcggccatttcgagaaggctcgggacgtgtacgaggaggccatccggacagtgatgaccgtgcgggacttcacacaggtgtttgacagctacgcccagttcgaggagagcatgatcgctgcaaagatggagaccgcctcggagctggggcgcgaggaggaggatgatgtggacctggagctgcgcctggcccgcttcgagcagctcatcagccggcggcccctgctcctcaacagcgtcttgctgcgccaaaacccacaccacgtgcacgagtggcacaagcgtgtcgccctgcaccagggccgcccccgggagatcatcaacacctacacagaggctgtgcagacggtggaccccttcaaggccacaggcaagccccacactctgtgggtggcgtttgccaagttttatgaggacaacggacagctggacgatgcccgtgtcatcctggagaaggccaccaaggtgaacttcaagcaggtggatgacctggcaagcgtgtggtgtcagtgcggagagctggagctccgacacgagaactacgatgaggccttgcggctgctgcgaaaggccacggcgctgcctgcccgccgggccgagtactttgatggttcagagcccgtgcagaaccgcgtgtacaagtcactgaaggtctggtccatgctcgccgacctggaggagagcctcggcaccttccagtccaccaaggccgtgtacgaccgcatcctggacctgcgtatcgcaacaccccagatcgtcatcaactatgccatgttcctggaggagcacaagtacttcgaggagagcttcaaggcgtacgagcgcggcatctcgctgttcaagtggcccaacgtgtccgacatctggagcacctacctgaccaaattcattgcccgctatgggggccgcaagctggagcgggcacgggacctgtttgaacaggctctggacggctgccccccaaaatatgccaagaccttgtacctgctgtacgcacagctggaggaggagtggggcctggcccggcatgccatggccgtgtacgagcgtgccaccagggccgtggagcccgcccagcagtatgacatgttcaacatctacatcaagcgggcggccgagatctatggggtcacccacacccgcggcatctaccagaaggccattgaggtgctgtcggacgagcacgcgcgtgagatgtgcctgcggtttgcagacatggagtgcaagctcggggagattgaccgcgcccgggccatctacagcttctgctcccagatctgtgacccccggacgaccggcgcgttctggcagacgtggaaggactttgaggtccggcatggcaatgaggacaccatcaaggaaatgctgcgtatccggcgcagcgtgcaggccacgtacaacacgcaggtcaacttcatggcctcgcagatgctcaaggtctcgggcagtgccacgggcaccgtgtctgacctggcccctgggcagagtggcatggacgacatgaagctgctggaacagcgggcagagcagctggcggctgaggcggagcgtgaccagcccttgcgcgcccagagcaagatcctgttcgtgaggagtgacgcctcccgggaggagctggcagagctggcacagcaggtcaaccccgaggagatccagctgggcgaggacgaggacgaggacgagatggacctggagcccaacgaggttcggctggagcagcagagcgtgccagccgcagtgtttgggagcctgaaggaagactgacccgtccctcccccatcccccctccccaccccctccccaatacagctacgtttgtacatca

SEQ ID NO: 27327 - protein, 855 aa, Homo sapiens; identical to SEQ ID NO: 3707

SEQ ID NO: 27328 - DNA, 4555 bp, Homo sapiens
aaatcatgcggaaccaattctctgtcaaatgctggcttcgctacatcgagttcaaacagggcgccccgaagcccaggctcaatcagctatacgagcgggcactcaagctgctgccctgcaggtgggaatggctccagctgccctgcccaccagcccccaccccacctggtccagttataacaaaactgccaagtgggtcccgggtcccgggtgattgcttcgtgtttcatcactgacctgtacatcccttgatgggtcagcacaccttctctgatgtcccagtctgtccctgtcattgctgagacatgtcacccctcccacaccccttcttcccacatttgccaactggggcagggcaaatggttctgggggtgtccataaagctgaccgatcagcatctgtcccctcctattccccagctacaaactctggtaccgatacctgaaggcgcgtcgggcacaggtgaagcatcgctgtgtgaccgaccctgcctatgaagatgtcaacaactgtcatgagagggcctttgtgttcatgcacaaggtttggggctcggcgaggggatgaatcgggaagtggagctcagtccatggtggtgggtggggcggggacaggggctgggctcagcatgttagggatgggggcttggattcctgttgcttctttgcatgggaagttgggctggactcagtcctggagctgggggtttctgggtcccgccgcatttatgtggtggccccaggtgtggctcagccacaggacatcgagtgtctgtggccaggccatggagtccgtggcttagccccagccgcctctccccacacccccagatgcctcgtctgtggctagattactgccagttcctcatggaccaggggcgcgtcacacacacccgccgcaccttcgaccgtgccctccgggcactgcccatcacgcagcactctcgaatttggcccctgtatctgcgcttcctgcgctcacacccactgcctgagacagctgtgcgaggctatcggcgcttcctcaagctgagtcctgagagtgcagaggagtacattgagtacctcaagtcaagtgaccggctggatgaggccgcccagcgcctggccaccgtggtgaacgacgagcgtttcgtgtctaaggccggcaagtccaactaccaggtgggcctgccgggagccggcaactgggtgggagggccaccccctccatgactgagcctgagactctcccccactgccccatgccctgcagctgtggcacgagctgtgcgacctcatctcccagaatccggacaaggtacagtccctcaatgtggacgccatcatccgcgggggcctcacccgcttcaccgaccagctgggcaagctctggtgttctctcgccgactactacatccgcagcggccatttcgagaaggctcgggacgtgtacgaggaggccatccggacagtgatgaccgtgcgggacttcacacaggtgtttgacagctacgcccagttcgaggagagcatgatcgctgcaaagatggagaccgcctcggagctggggcgcgaggaggaggatgatgtggacctggagctgcgcctggcccgcttcgagcagctcatcagccggcggcccctgctcctcaacagcgtcttgctgcgccaaaacccacaccacgtgcacgagtggcacaagcgtgtcgccctgcaccagggccgcccccgggagatcatcaacacctacacagaggctgtgcagacggtggaccccttcaaggccacaggcaagccccacactctgtgggtggcgtttgccaagttttatgaggacaacggacagctggacgatgcccgtgtcatcctggagaaggccaccaaggtgaacttcaagcaggtggatgacctggcaagcgtgtggtgtcagtgcggagagctggagctccgacacgagaactacgatgaggccttgcggctgctgcgaaaggccacggcgctgcctgcccgccgggccgagtactttgatggttcagagcccgtgcagaaccgcgtgtacaagtcactgaaggtctggtccatgctcgccgacctggaggagagcctcggcaccttccagtccaccaaggccgtgtacgaccgcatcctggacctgcgtatcgcaacaccccagatcgtcatcaactatgccatgttcctggaggagcacaagtacttcgaggagagcttcaaggtgaggggctagggtggacccagaggcccctgatggcagtgtcccctccccaggggtcctcagcaacttacgaatctgctggggcttgtgtgacacagtatacagactgggtgacttaaacaacaaagatttagcttctccccgtcctggaggctggaagtccaggatcgaggcatgggcagggctggttcctcctgaggcctctctccttagcttacagacagccgccttctccctatgtctttgtgtggccttctctttgtgtgtgtcacttttgaaatttcctcttcttataaaggacatcagtcataatggattaggtggcccctaacgacctcagtttaacttagtgatctcatcttcaaacgaatctactttctgaggtactgggggttaagatttgagcatatgaatgttttgaggggggcacagttcattccatagcaggcacagaatcctacttccacgtgcacccatgactcatggggagggtgttggtgccagtgtgtgcgggctctccctgccccgctgctcaggagacgggttgtggggtccagggggtgggttgcgtgtccgtgggaaggccatgtcccgcggccggagcagtcatgtttgagtgtgtgtttctatggatcgtgtgggcattatacagatacacaaatggggaggtcgtacatgcatacgcgtgctactgcctgcccctctgtcagggggtgcggccttctccctggggacaggcagccagcgtcagcggagctggggagccacccaccttcacccatcatgtcacctcctatggggccagactgtgcttagcaggtcccattgcacccctgttcttggggttctcacagagggagacagtgcagaggacagacccccacaactgccattagggacagggaggcgtggacagggaagggccccaagggagttcctggcaggctccctacagacgccacccaaggacatcccgggtgcctggtggtctctatctgcagactctcacatgtgactctccctctggtaacaggcgtacgagcgcggcatctcgctgttcaagtggcccaacgtgtccgacatctggagcacctacctgaccaaattcattgcccgctatgggggccgcaagctggagcgggcacgggacctgtttgaacaggctctggacggctgccccccaaaatatgccaagagtgaggcgggcagagggcatggggggggtggcgggcgggctgggtttctgactggccccggctgaccgtgctcccctctccccgcctaccccgcccagccttgtacctgctgtacgcacagctggaggaggagtggggcctggcccggcatgccatggccgtgtacgagcgtgccaccagggccgtggagcccgcccagcagtatgacatgttcaacatctacatcaagcgggcggccgagatctatggggtcacccacacccgcggcatctaccagaaggccattgaggtgctgtcggacgagcacgcgcgtgagatgtgcctgcggtttgcagacatggagtgcaagctcggggagattgaccgcgcccgggccatctacagcttctgctcccagatctgtgacccccgggtagggctgtggggagggacgggtatcagggttgggggctgcggcggagtcagccagctcacgggcacacacacccacccctgccctgccccccacgcagacgaccggcgcgttctggcagacgtggaaggactttgaggtccggcatggcaatgaggacaccatcaaggaaatgctgcgtatccggcgcagcgtgcaggccacgtacaacacgcaggtcaacttcatggcctcgcagatgctcaaggtctcgggcagtgccacgggcaccgtgtctgacctggcccctgggcagagtggcatggacgacatgaagctgctggaacagcgggcagagcagctggcggctgaggcggagcgtgaccagcccttgcgcgcccagagcaagatcctgttcgtgaggagtgacgcctcccgggaggagctggcagagctggcacagcaggtcaaccccgaggagatccagctgggcgaggacgaggacgaggacgagatggacctggagcccaacggtgagggcccggctggggcggggacggtggcattaccagggtgggcctcgggggacaggccaacgccaggagggtgactggctcccgccttccccacagaggttcggctggagcagcagagcgtgccagccgcagtgtttgggagcctgaaggaagactgacccgtccctcccccatcccccctccccaccccctccccaatacagctacgtttgtacatc

SEQ ID NO: 27329 - protein, 256 aa, Homo sapiens
MTVRDFTQVFDSYAQFEESMIAAKMETASELGREEEDDVDLELRLARFEQLISRRPLLLNSVLLRQNPHHVHEWHKRVALHQGRPREIINTYTEAVQTVDPFKATGKPHTLWVAFAKFYEDNGQLDDARVILEKATKVNFKQVDDLASVWCQCGELELRHENYDEALRLLRKATALPARRAEYFDGSEPVQNRVYKSLKVWSMLADLEESLGTFQSTKAVYDRILDLRIATPQIVINYAMFLEEHKYFEESFKVRG

SEQ ID NO: 27330 - DNA, 813 bp, Homo sapiens
cagaaaaatggtggtgatggcgcgactctcgcggcccgagcggccggaccttgtcttcgaggaagaggacctcccctatgaggaggaaatcatgcggaaccaattctctgtcaaatgctggcttcgctacatcgagttcaaacagggcgccccgaagcccaggctcaatcagctatacgagcgggcactcaagctgctgccctgcagctacaaactctggtaccgatacctgaaggcgcgtcgggcacaggtgaagcatcgctgtgtgaccgaccctgcctatgaagatgtcaacaactgtcatgagagggcctttgtgttcatgcacaaggtttggggctcggcgaggggatgaatcgggaagtggagctcagtccatggtggtgggtggggcggggacaggggctgggctcagcatgttagggatgggggcttggattcctgttgcttctttgcatgggaagttgggctggactcagtcctggagctgggggtttctgggtcccgccgcatttatgtggtggccccaggtgtggctcagccacaggacatcgagtgtctgtggccaggccatggagtccgtggcttagccccagccgcctctccccacacccccagatgcctcgtctgtggctagattactgccagttcctcatggaccaggggcgcgtcacacacacccgccgcaccttcgaccgtgccctccgggcactgcccatcacgcagcactctcgaatttggcccctgtatctgcgcttcctgcgctcacacccactgcctgagacagctgtgcgaggctatcggcgcttcctc

SEQ ID NO: 27331 - protein, 115 aa, Homo sapiens
MVVMARLSRPERPDLVFEEEDLPYEEEIMRNQFSVKCWLRYIEFKQGAPKPRLNQLYERALKLLPCSYKLWYRYLKARRAQVKHRCVTDPAYEDVNNCHERAFVFMHKVWGSARG

SEQ ID NO: 27332 - DNA, 707 bp, Homo sapiens
gcggccgccgcctgccgggcctcccctcgccgcggccggccgccgcgctcccgcccgggcgcccagctatgtactccccgtactgcctcacccaggatgagttccacccgttcatcgaggcactgctgcctcacgtccgcgctttctcctacacctggttcaacctgcaggcgcggaagcgcaagtacttcaagaagcatgaaaagcggatgtcgaaggacgaggagcgggcggtgaaggacgagctgctgggcgagaagcccgagatcaagcagaagtgggcatcccggctgctggccaagctgcgcaaggacatccggcccgagttccgcgaggacttcgtgctgaccatcacgggcaagaagcccccctgctgcgtgctctccaaccccgaccagaagggcaagatccggcggattgactgcctgcgccaggctgacaaggtgtggcggctggacctggtcatggtgattttgtttaaggggatccccctggaaagtactgatggggagcggctctacaagtcgcctcagtgctcgaaccccggcctgtgcgtccagccacatcacattggagtcacaatcaaagaactggatctttatctggcttactttgtccacactccgggtaggtcgttctcaaccatttttccctctcattttattttccttgctggcatttgttctgtttattgttcctctaatttc

SEQ ID NO: 27333 - protein, 212 aa, Homo sapiens
MYSPYCLTQDEFHPFIEALLPHVRAFSYTWFNLQARKRKYFKKHEKRMSKDEERAVKDELLGEKPEIKQKWASRLLAKLRKDIRPEFREDFVLTITGKKPPCCVLSNPDQKGKIRRIDCLRQADKVWRLDLVMVILFKGIPLESTDGERLYKSPQCSNPGLCVQPHHIGVTIKELDLYLAYFVHTPGRSFSTIFPSHFIFLAGICSVYCSSN

SEQ ID NO: 27334 - DNA, 431 bp, Homo sapiens
gcggccgccgcctgccgggcctcccctcgccgcggccggccgccgcgctcccgcccgggcgcccagctatgtactccccgtactgcctcacccaggatgagttccacccgttcatcgaggcactgctgcctcacgtccgcgctttctcctacacctggttcaacctgcaggcgcggaagcgcaagtacttcaagaagcatgaaaagcggatgtcgaaggacgaggagcgggcggtgaaggacgagctgctgggcgagaagcccgagatcaagcagaagtgggcagccagcccgtctgttccctctccgccccgccccgccccgcccccgtcactgcgcttctgttataccatctttgcctgactctctccggcttctccattgaatggctaatgtgtatgtgaaataaagaaataaagaaaaacaaacgcg

SEQ ID NO: 27335 - protein, 97 aa, Homo sapiens
MYSPYCLTQDEFHPFIEALLPHVRAFSYTWFNLQARKRKYFKKHEKRMSKDEERAVKDELLGEKPEIKQKWAASPSVPSPPRPAPPPSLRFCYTIFA

SEQ ID NO: 27336 - DNA, 524 bp, Homo sapiens
gggagaggatgcagagtaggcagcgaagctgcttccccacacccgggtttgactctcccaccagcccgccgcctgggaaacgcgccctcggctggcatcggggtaccagagcccggctcctttcttcctttctttcttttttaaacggctctagcgcaaaccaggcagtgggtcagggcccagaggcgggggagggaagaggagagggctgtctccaactcggggagaagaacggccggccgcaagtttcccggtttgtgccagtttggggatttgcgaatcagaccggagcggagggaacggcggcgccttttcagtggcggagatctcaggtgccccacgccagggtctactagagaatcggggcgaccgcaagctcagtcgcgggacaggcgaggctcgccagctccacgaagcgtcaccggcacgtatttttctttttttaacagcctgtttctaccattcagcctctgtctcacatgctttataaaaaaaaaagaagtaataaaactcctttaaattaa

SEQ ID NO: 27337 - protein, 115 aa, Homo sapiens
MQSRQRSCFPTPGFDSPTSPPPGKRALGWHRGTRARLLSSFLSFLNGSSANQAVGQGPEAGEGRGEGCLQLGEKNGRPQVSRFVPVWGFANQTGAEGTAAPFQWRRSQVPHARVY

SEQ ID NO: 27338 - DNA, 2012 bp, Homo sapiens
tcgataacaaagctgaaatcacatatttaggatttaggtctgattaaaaaatgttggggtggatgttccaactggatcaggagaaaagaaaatgaaaacagcctggggagagggaagcctgatctgtttcctcactcgcttgctcgtggatgtcattttctgtcttcttgggggcggccaaaaatcgaccggtgtcggggaccagaggcggccccgcacgcccccgcgtgtgcgtccacgggcgtctgtgcagacggacactgtgccggggcgagctgacaggagttcacggctgcgatagaacatggagatgtcatgggcgcgacagagcctggcggggataccagcagcgtgtgatgagttccacccgttcatcgaggcactgctgcctcacgtccgcgctttctcctacacctggttcaacctgcaggcgcggaagcgcaagtacttcaagaagcatgaaaagcggatgtcgaaggacgaggagcgggcggtgaaggacgagctgctgggcgagaagcccgagatcaagcagaagtgggcatcccggctgctggccaagctgcgcaaggacatccggcccgagttccgcgaggacttcgtgctgaccatcacgggcaagaagcccccctgctgcgtgctctccaaccccgaccagaagggcaagatccggcggattgactgcctgcgccaggctgacaaggtgtggcggctggacctggtcatggtgattttgtttaaggggatccccctggaaagtactgatggggagcggctctacaagtcgcctcagtgctcgaaccccggcctgtgcgtccagccacatcacattggagtcacaatcaaagaactggatctttatctggcttactttgtccacactccggaatccggacaatcagatagttcaaaccagcaaggagatgcggacatcaaaccactgcccaacgggcacttaagtttccaggactgttttgtgacttccggggtctggaatgtgacggagctggtgagagtatcacagactcctgttgcaacagcatcagggcccaacttctccctggcggacctggagagtcccagctactacaacatcaaccaggtgaccctggggcggcggtccatcacctcccctccttccaccagcaccaccaagcgccccaagtccatcgatgacagtgagatggagagccctgttgatgacgtgttctatcccgggacaggccgttccccagcagctggcagcagccagtccagcgggtggcccaacgatgtggatgcagggagcccccgggccacagcatcagccctgcacttcccctccacgtccatcatccagcagtcgagcccgtatttcacgcacccgaccatccgctaccaccaccaccacgggcaggactcactgaaggagtttgtgcagtttgtgtgctcggatggctcgggccaggccaccggacagcattcgcaacgacaggcgcctcctctgccaaccggtttgtcagcatcggaccccgggacggcaactttctgaacatcccacagcagtctcagtcctggttcctctgataagatcgacaaaagaaacaacaaaatgagaagaagaggttcctcgaaaggggggagaagaaattttgagaatggaaaaatcccccagcccagcccagccccaccgaaaagcaaaaattacacgtcgtcagccactcagcccttctctcctccagcccggggacccccgcgggccccagaagcagcccagttctcagagagcccttggaaggggtctcggtggagctgtgcaccagcagccaagcagaaagaaacacgcgacatggactctgtcaagtagaggacagaaagcaagaaaggatgcagaactgccttcctccccctgaccccccccgcccccgtcactgcgcttctgttataccatctttgcctgactctctccggcttctccattgaatggctaatgtgtatgtgaaataaagaaataaagaaaaacaaacgcgaga

SEQ ID NO: 27339 - protein, 408 aa, Homo sapiens
MEMSWARQSLAGIPAACDEFHPFIEALLPHVRAFSYTWFNLQARKRKYFKKHEKRMSKDEERAVKDELLGEKPEIKQKWASRLLAKLRKDIRPEFREDFVLTITGKKPPCCVLSNPDQKGKIRRIDCLRQADKVWRLDLVMVILFKGIPLESTDGERLYKSPQCSNPGLCVQPHHIGVTIKELDLYLAYFVHTPESGQSDSSNQQGDADIKPLPNGHLSFQDCFVTSGVWNVTELVRVSQTPVATASGPNFSLADLESPSYYNINQVTLGRRSITSPPSTSTTKRPKSIDDSEMESPVDDVFYPGTGRSPAAGSSQSSGWPNDVDAGSPRATASALHFPSTSIIQQSSPYFTHPTIRYHHHHGQDSLKEFVQFVCSDGSGQATGQHSQRQAPPLPTGLSASDPGTATF

SEQ ID NO: 27340 - DNA, 2014 bp, Homo sapiens
gctgaggctgagatgggagcaagtggctggcgaagctggtggtggcttcaaaccacactttcgtagaacaatcgcaagagaaaattgttggggggagggaggaggaggagaaggcggttttccttgtgcccccccttctaacgctgcttttctccttctctctttccccctcatcccgtcttcccctcctcccgtcctccctcgccccgcatgctcccggcttgccgcctgcaggatgagttccacccgttcatcgaggcactgctgcctcacgtccgcgctttctcctacacctggttcaacctgcaggcgcggaagcgcaagtacttcaagaagcatgaaaagcggatgtcgaaggacgaggagcgggcggtgaaggacgagctgctgggcgagaagcccgagatcaagcagaagtgggcatcccggctgctggccaagctgcgcaaggacatccggcccgagttccgcgaggacttcgtgctgaccatcacgggcaagaagcccccctgctgcgtgctctccaaccccgaccagaagggcaagatccggcggattgactgcctgcgccaggctgacaaggtgtggcggctggacctggtcatggtgattttgtttaaggggatccccctggaaagtactgatggggagcggctctacaagtcgcctcagtgctcgaaccccggcctgtgcgtccagccacatcacattggagtcacaatcaaagaactggatctttatctggcttactttgtccacactccggaatccggacaatcagatagttcaaaccagcaaggagatgcggacatcaaaccactgcccaacgggcacttaagtttccaggactgttttgtgacttccggggtctggaatgtgacggagctggtgagagtatcacagactcctgttgcaacagcatcagggcccaacttctccctggcggacctggagagtcccagctactacaacatcaaccaggtgaccctggggcggcggtccatcacctcccctccttccaccagcaccaccaagcgccccaagtccatcgatgacagtgagatggagagccctgttgatgacgtgttctatcccgggacaggccgttccccagcagctggcagcagccagtccagcgggtggcccaacgatgtggatgcaggcccggcttctctaaagaagtcaggaaagctggacttctgcagtgccctctcctctcagggcagctccccgcgcatggctttcacccaccacccgctgcctgtgcttgctggagtcagaccagggagcccccgggccacagcatcagccctgcacttcccctccacgtccatcatccagcagtcgagcccgtatttcacgcacccgaccatccgctaccaccaccaccacgggcaggactcactgaaggagtttgtgcagtttgtgtgctcggatggctcgggccaggccaccggacagcattcgcaacgacaggcgcctcctctgccaaccggtttgtcagcatcggaccccgggacggcaactttctgaacatcccacagcagtctcagtcctggttcctctgataagatcgacaaaagaaacaacaaaatgagaagaagaggttcctcgaaaggggggagaagaaattttgagaatggaaaaatcccccagcccagcccagccccaccgaaaagcaaaaattacacgtcgtcagccactcagcccttctctcctccagcccggggacccccgcgggccccagaagcagcccagttctcagagagcccttggaaggggtctcggtggagctgtgcaccagcagccaagcagaaagaaacacgcgacatggactctgtcaagtagaggacagaaagcaagaaaggatgcagaactgccttcctccccctgaccccccccgcccccgtcactgcgcttctgttataccatctttgcctgactctctccggcttctccattgaatggctaatgtgtatgtgaaataaagaaataaagaaaaacaaacgcgaga

SEQ ID NO: 27341 - protein, 440 aa, Homo sapiens
MLPACRLQDEFHPFIEALLPHVRAFSYTWFNLQARKRKYFKKHEKRMSKDEERAVKDELLGEKPEIKQKWASRLLAKLRKDIRPEFREDFVLTITGKKPPCCVLSNPDQKGKIRRIDCLRQADKVWRLDLVMVILFKGIPLESTDGERLYKSPQCSNPGLCVQPHHIGVTIKELDLYLAYFVHTPESGQSDSSNQQGDADIKPLPNGHLSFQDCFVTSGVWNVTELVRVSQTPVATASGPNFSLADLESPSYYNINQVTLGRRSITSPPSTSTTKRPKSIDDSEMESPVDDVFYPGTGRSPAAGSSQSSGWPNDVDAGPASLKKSGKLDFCSALSSQGSSPRMAFTHHPLPVLAGVRPGSPRATASALHFPSTSIIQQSSPYFTHPTIRYHHHHGQDSLKEFVQFVCSDGSGQATGQHSQRQAPPLPTGLSASDPGTATF

SEQ ID NO: 27342 - DNA, 697 bp, Homo sapiens
ctgctgggcgagaagcccgagatcaagcagaagtgggcatcccggctgctggccaagctgcgcaaggacatccggcccgagttccgcgaggacttcgtgctgaccatcacgggcaagaagcccccctgctgcgtgctctccaaccccgaccagaagggcaagatccggcggattgactgcctgcgccaggctgacaaggtgtggcggctggacctggtcatggtgattttgtttaaggggatccccctggaaagtactgatggggagcggctctacaagtcgcctcagtgctcgaaccccggcctgtgcgtccagccacatcacattggagtcacaatcaaagaactggatctttatctggcttactttgtccacactccgggtaggtcgttctcaaccatttttccctctcattttattttcctctctatgtattaattccctgaattctcaccctgattctagttttaagcctgtgctcctggctgggtgtgtgtgcactcaggtgatgtgcataatatgtgtagtgaggaatcagcaaaccagacctggggaccagggaggcttcctagaagacgacctacttgacctgcaccttgaaagacagtgaggaattagctcgttttgtcagctgcctgagccttctcagtgtgcctggagctgattccctcctcacaatggttgagtgatatagaca

SEQ ID NO: 27343 - protein, 116 aa, Homo sapiens
MGSGSTSRLSARTPACASSHITLESQSKNWIFIWLTLSTLRVGRSQPFFPLILFSSLCINSLNSHPDSSFKPVLLAGCVCTQVMCIICVVRNQQTRPGDQGGFLEDDLLDLHLERQ

SEQ ID NO: 27344 - DNA, 2370 bp, Homo sapiens
cagtcctggttcctctgataagatcgacaaaagaaacaacaaaatgagaagaagaggttcctcgaaaggggggagaagaaattttgagaatggaaaaatcccccagcccagcccagccccaccgaaaagcaaaaattacacgtcgtcagccactcagcccttctctcctccagcccggggacccccgcgggccccagaagcagcccagttctcagagagcccttggaaggggtctcggtggagctgtgcaccagcagccaagcagaaagaaacacgcgacatggactctgtcaagtagaggacagaaagcaagaaaggatgcagaactgccttcctccccctgaccccgccccggccttctggggaaggaacaaagtccccaaacaaagcaaccagcacaattctgaaggggcctggcctccaccctcaccccttcctaggggaaccccacctgctcctttcccaagtggtgttgtgaggggcaatgagggcaacaggagatgtggggacgtgttaggagagaaaaaaaaaaaaacaaaaatatatatgggggaaattaacttttttttttcattgaaccaagtgcaatgcatcagagagttttcctatctttgtatgttaagagattaagaaaaaaaaattctatttttgttgtaatgtcctcgcggctctggggacgctaaaagaaccgggcctgccccgccctgcgcggggataacgaaagctgagtgtttttcccttttttttgttcgtttttagtttttttttttttaagtcgttttcctgcgttgacgaggatgatctggggtttttatttgtttcgtcgttcgttctgtttcggtgggagggctgaaggaaacgttcacattttagagtttaaaaaaaacacctcgacatttaaaaaatcaaccaacacaagatcaaaaaggaaaaggacgagagaaaaattatttttaagataattaaacataaaaccctggtgcttcttacattataaagtacgttttaaagaacccacaaactattatacataagtttatgaatcaattaaatatcctgcacttgttaggaatacgcatatcccttctttgttgagtttaacggaacgggacagcggcgtgcccccggcggctggactgctccggccgcgggtctccccgggcgcccctccctggggcccagcacccctcctcgccccatccccgtccgggtacgggggcgcggcaggggtccccggcccctcccccgcagaggtcaatgccaacgaacaaacgtcccctccctccctccctctccgccccgagcgcccttctttgagccagacgccaacttgaccctcaccagcattatcaggagcgcgctcagcaagttggtagtttcctcccccctttcccggcgcccctcccgcccccattcaacatctctcatcctatccccgaccccctccggggaacaccgggaaggctcgacgctccaggacaggaccagccacgcagacaggtcgatttgcccaggcccgcgcccgcacgcacgcacgcacacggccccgcacacagccccgccccaccccgcaaccagccctgtcgactgccttatacacccgcccccgcgctggccggccgacctagtgccttgttctcacccccgtgctggcggagcggacgccgcgctctgggtcccagaggggccgggtggctcagacgacccaccactcccccaccctgaccgtgctgaacagacccccccacacgagagaaaataaaggagcaataaagtcacgagaactttcgtcccccaatcgagagcccgaggggcaccccagccccgcctctgctcccccccaccccacccaccctcggggcgcccccctccccccgcaagccagcctgggccagccccgcttcggcccctcccgggagatccgtgcgcccgaccagcaccagcatcgcggaccgcaaaggccgcccgtcccgtcaaacaagtttcttcttaggctaagaaacgcagtatatacgagtatctctatatatagtactaatggatttggtgtgcttcccccttagcgtccccctccctctgctcctcctccttcagcctggtctccccctcttctctgccctccacccccgtctctgcactgagatacataagaaacaagggtagtttactgtctgttttgttttctgggttttcagtgtcctagcggaatgcaagtaggcagccagcccgtctgttccctctccgccccgccccgccccgcccccgtcactgcgcttctgttataccatctttgcctgactctctccggcttctccattgaatggctaatgtgtatgtgaaataaagaaataaagaaaaacaaacgcgaga

SEQ ID NO: 27345 - protein, 103 aa, Homo sapiens
MQNCLPPPDPAPAFWGRNKVPKQSNQHNSEGAWPPPSPLPRGTPPAPFPSGVVRGNEGNRRCGDVLGEKKKKTKIYMGEINFFFSLNQVQCIREFSYLCMLRD

SEQ ID NO: 27346 - DNA, 2570 bp, Homo sapiens
aggttcctcgaaaggggggagaagaaattttgagaatggaaaaatcccccagcccagcccagccccaccgaaaagcaaaaattacacgtcgtcagccactcagcccttctctcctccagcccggggacccccgcgggccccagaagcagcccagttctcagagagcccttggaaggggtctcggtggagctgtgcaccagcagccaagcagaaagaaacacgcgacatggactctgtcaagtagaggacagaaagcaagaaaggatgcagaactgccttcctccccctgaccccgccccggccttctggggaaggaacaaagtccccaaacaaagcaaccagcacaattctgaaggggcctggcctccaccctcaccccttcctagggccgggcgtgacgcgcggtcaaagtgcaatgatttttcagttcggttggctaaacagggtcagagctgagagcgaagcagaaggggctccctgtccggcccacgtgccctttccctcgacgacagtcgagggctcgggctctgtgggactgtgggagctagggtctgcggggcgcctgcccgggcgaggtcggaagctgcaggccagctgggcccgggccggagcgtgcccggcggggctgcccgggcgggcagggggtgggggctgctcctttcccaagtggtgttgtgaggggcaatgagggcaacaggagatgtggggacgtgttaggagagaaaaaaaaaaaaacaaaaatatatatgggggaaattaacttttttttttcattgaaccaagtgcaatgcatcagagagttttcctatctttgtatgttaagagattaagaaaaaaaaattctatttttgttgtaatgtcctcgcggctctggggacgctaaaagaaccgggcctgccccgccctgcgcggggataacgaaagctgagtgtttttcccttttttttgttcgtttttagtttttttttttttaagtcgttttcctgcgttgacgaggatgatctggggtttttatttgtttcgtcgttcgttctgtttcggtgggagggctgaaggaaacgttcacattttagagtttaaaaaaaacacctcgacatttaaaaaatcaaccaacacaagatcaaaaaggaaaaggacgagagaaaaattatttttaagataattaaacataaaaccctggtgcttcttacattataaagtacgttttaaagaacccacaaactattatacataagtttatgaatcaattaaatatcctgcacttgttaggaatacgcatatcccttctttgttgagtttaacggaacgggacagcggcgtgcccccggcggctggactgctccggccgcgggtctccccgggcgcccctccctggggcccagcacccctcctcgccccatccccgtccgggtacgggggcgcggcaggggtccccggcccctcccccgcagaggtcaatgccaacgaacaaacgtcccctccctccctccctctccgccccgagcgcccttctttgagccagacgccaacttgaccctcaccagcattatcaggagcgcgctcagcaagttggtagtttcctcccccctttcccggcgcccctcccgcccccattcaacatctctcatcctatccccgaccccctccggggaacaccgggaaggctcgacgctccaggacaggaccagccacgcagacaggtcgatttgcccaggcccgcgcccgcacgcacgcacgcacacggccccgcacacagccccgccccaccccgcaaccagccctgtcgactgccttatacacccgcccccgcgctggccggccgacctagtgccttgttctcacccccgtgctggcggagcggacgccgcgctctgggtcccagaggggccgggtggctcagacgacccaccactcccccaccctgaccgtgctgaacagacccccccacacgagagaaaataaaggagcaataaagtcacgagaactttcgtcccccaatcgagagcccgaggggcaccccagccccgcctctgctcccccccaccccacccaccctcggggcgcccccctccccccgcaagccagcctgggccagccccgcttcggcccctcccgggagatccgtgcgcccgaccagcaccagcatcgcggaccgcaaaggccgcccgtcccgtcaaacaagtttcttcttaggctaagaaacgcagtatatacgagtatctctatatatagtactaatggatttggtgtgcttcccccttagcgtccccctccctctgctcctcctccttcagcctggtctccccctcttctctgccctccacccccgtctctgcactgagatacataagaaacaagggtagtttactgtctgttttgttttctgggttttcagtgtcctagcggaatgcaagtaggcagccagcccgtctgttccctctccgccccgccccgccccgcccccgtcactgcgcttctgttataccatctttgcctgactctctccggcttctccattgaatggctaatgtgtatgtgaaataaagaaataaagaaaaacaaacgcgaga

SEQ ID NO: 27347 - protein, 63 aa, Homo sapiens
MQNCLPPPDPAPAFWGRNKVPKQSNQHNSEGAWPPPSPLPRAGRDARSKCNDFSVRLAKQGQS

SEQ ID NO: 27348 - DNA, 3848 bp, Homo sapiens
cgcgggccccagaagcagcccagttctcagagagcccttggaaggggtctcggtggagctgtgcaccagcagccaagcagaaagaaacacgcgacatggactctgtcaagtagaggacagaaagcaagaaaggatgcagaactgccttcctccccctgaccccgccccggccttctggggaaggaacaaagtccccaaacaaagcaaccagcacaattctgaaggggcctggcctccaccctcaccccttcctaggggaaccccaccctccacacagccggagctgccctagggagcctggagggccagcttgtaaagatgatggggtttagatccctcaggctctcccctccagactccgcccttccctccctccctccctccctccctctctgccaaggctccagcttcttcccccagctgctcccgaccaggagggggagagcagcctccacttaccccaccccacccttgggctaaaagcccccaggcgggcagggggtgacccctggagctagttgcgtgtcccagaatggagggtgttctgacaccccaccctgagccgcaagagcagtcctggggccctggacccctctgtacagtccgtaggaaaaagtcggaatgctctcgacggcctcgtcccagcctgggacaggccccctttcccctctctctgcaggccaggagggcctccttcctgccacgagggaggggagtcgggccccaggtcgcccccgcccccagccctgcatgcaggtgccctcgctccgccccatcagttcctgcccctgcccctcatgcagactgccctgctggggccgggccggagggtggagcagaaaggggaccccggagccgagcgaggaggaccaggcagccgccgctgccgcgctaagccaccacctgcgcttaggtaggcgtcctgctcgccgactttcagttccttgggagggtgttgggtgtcgtccttttcaaaagtgttttggagctttctgtgccccccgactttcccccgcctccccgccccccacgtggccacttttctctggattttagctgtaatgtctttactctttatttaggggtggggcattcattgtttggggtcttcagaagcccccctgggagggaggggaggatgagcacgcccagctcccctccagggtgtgacttggcccctctggcttgtctttctgtgccttactcctcctcctgcgtctcccgttcctggccccttcttgagtccttgtgcctctctctttctctctctttcttaattgtatgaaaacacaaagcacaggtcaggatcctctgagagaaaatcaacattgcaccacgtaggggtgggctatgggctgtatttattgtgaatctagtttgtgaggctgtggccccgagctggcggagggagggaagaggagggagtgacgggaggggaggaggtcagcgacctggggccgtagcggcaggcgaacggtgcctgctacccagctggaagccacaaggtggctggctccaggggcggcttttgttggaagttgagtgaagccctccccctgtcctcagcgtgcagccctagaggaccccagggctgaggggcagtggatcctgcgggagtctcccggggcgtggggagtaaggccccgggggtggggggccgggtgggccgggcgtgacgcgcggtcaaagtgcaatgatttttcagttcggttggctaaacagggtcagagctgagagcgaagcagaaggggctccctgtccggcccacgtgccctttccctcgacgacagtcgagggctcgggctctgtgggactgtgggagctagggtctgcggggcgcctgcccgggcgaggtcggaagctgcaggccagctgggcccgggccggagcgtgcccggcggggctgcccgggcgggcagggggtgggggctgctcctttcccaagtggtgttgtgaggggcaatgagggcaacaggagatgtggggacgtgttaggagagaaaaaaaaaaaaacaaaaatatatatgggggaaattaacttttttttttcattgaaccaagtgcaatgcatcagagagttttcctatctttgtatgttaagagattaagaaaaaaaaattctatttttgttgtaatgtcctcgcggctctggggacgctaaaagaaccgggcctgccccgccctgcgcggggataacgaaagctgagtgtttttcccttttttttgttcgtttttagtttttttttttttaagtcgttttcctgcgttgacgaggatgatctggggtttttatttgtttcgtcgttcgttctgtttcggtgggagggctgaaggaaacgttcacattttagagtttaaaaaaaacacctcgacatttaaaaaatcaaccaacacaagatcaaaaaggaaaaggacgagagaaaaattatttttaagataattaaacataaaaccctggtgcttcttacattataaagtacgttttaaagaacccacaaactattatacataagtttatgaatcaattaaatatcctgcacttgttaggaatacgcatatcccttctttgttgagtttaacggaacgggacagcggcgtgcccccggcggctggactgctccggccgcgggtctccccgggcgcccctccctggggcccagcacccctcctcgccccatccccgtccgggtacgggggcgcggcaggggtccccggcccctcccccgcagaggtcaatgccaacgaacaaacgtcccctccctccctccctctccgccccgagcgcccttctttgagccagacgccaacttgaccctcaccagcattatcaggagcgcgctcagcaagttggtagtttcctcccccctttcccggcgcccctcccgcccccattcaacatctctcatcctatccccgaccccctccggggaacaccgggaaggctcgacgctccaggacaggaccagccacgcagacaggtcgatttgcccaggcccgcgcccgcacgcacgcacgcacacggccccgcacacagccccgccccaccccgcaaccagccctgtcgactgccttatacacccgcccccgcgctggccggccgacctagtgccttgttctcacccccgtgctggcggagcggacgccgcgctctgggtcccagaggggccgggtggctcagacgacccaccactcccccaccctgaccgtgctgaacagacccccccacacgagagaaaataaaggagcaataaagtcacgagaactttcgtcccccaatcgagagcccgaggggcaccccagccccgcctctgctcccccccaccccacccaccctcggggcgcccccctccccccgcaagccagcctgggccagccccgcttcggcccctcccgggagatccgtgcgcccgaccagcaccagcatcgcggaccgcaaaggccgcccgtcccgtcaaacaagtttcttcttaggctaagaaacgcagtatatacgagtatctctatatatagtactaatggatttggtgtgcttcccccttagcgtccccctccctctgctcctcctccttcagcctggtctccccctcttctctgccctccacccccgtctctgcactgagatacataagaaacaagggtagtttactgtctgttttgttttctgggttttcagtgtcctagcggaatgcaagtaggcagccagcccgtctgttccctctccgccccgccccgccccgcccccgtcactgcgcttctgttataccatctttgcctgactctctccggcttctccattgaatggctaatgtgtatgtgaaataaagaaataaagaaaaacaaacgcgaga

SEQ ID NO: 27349 - protein, 144 aa, Homo sapiens [sequence omitted]

SEQ ID NO: 27350 - DNA, 738 bp, Homo sapiens
ccaaggctccagcttcttcccccagctgctcccgaccaggagggggagagcagcctccacttaccccaccccacccttgggctaaaagcccccaggcgggcagggggtgacccctggagctagttgcgtgtcccagaatggagggtgttctgacaccccaccctgagccgcaagagcagtcctggggccctggacccctctgtacagtccgtaggaaaaagtcggaatgctctcgacggcctcgtcccagcctgggacaggccccctttcccctctctctgcaggccaggagggcctccttcctgccacgagggaggggagtcgggccccaggtcgcccccgcccccagccctgcatgcaggtgccctcgctccgccccatcagttcctgcccctgcccctcatgcagactgccctgctggggccgggccggagggtggagcagaaaggggaccccggagccgagcgaggaggaccaggcagccgccgctgccgcgctaagccaccacctgcgcttaggtaggcgtcctgctcgccgactttcagttccttgggagggtgttgggtgtcgtccttttcaaaagtgttttggagctttctgtgccccccgactttcccccgccccgccccgcccccgtcactgcgcttctgttataccatctttgcctgactctctccggcttctccattgaatggctaatgtgtatgtgaaataaagaaataaagaaaaacaaacgcg

SEQ ID NO: 27351 - protein, 154 aa, Homo sapiens
MLSTASSQPGTGPLSPLSAGQEGLLPATREGSRAPGRPRPQPCMQVPSLRPISSCPCPSCRLPCWGRAGGWSRKGTPEPSEEDQAAAAAALSHHLRLGRRPARRLSVPWEGVGCRPFQKCFGAFCAPRLSPAPPRPRHCASVIPSLPDSLRLLH

SEQ ID NO: 27352 - DNA, 1107 bp, Homo sapiens
gagtccttgtgcctctctctttctctctctttcttaattgtatgaaaacacaaagcacaggtcaggatcctctgagagaaaatcaacattgcaccacgtaggggtgggctatgggctgtatttattgtgaatctagtttgtgaggctgtggccccgagctggcggagggagggaagaggagggagtgacgggaggggaggaggtcagcgacctggggccgtagcggcaggcgaacggtgcctgctacccagctggaagccacaaggtggctggctccaggggcggcttttgttggaagttgagtgaagccctccccctgtcctcagcgtgcagccctagaggaccccagggctgaggggcagtggatcctgcgggagtctcccggggcgtggggagtaaggccccgggggtggggggccgggtgggccgggcgtgacgcgcggtcaaagtgcaatgatttttcagttcggttggctaaacagggtcagagctgagagcgaagcagaaggggctccctgtccggcccacgtgccctttccctcgacgacagtcgagggctcgggctctgtgggactgtgggagctagggtctgcggggcgcctgcccgggcgaggtcggaagctgcaggccagccccgcttcggcccctcccgggagatccgtgcgcccgaccagcaccagcatcgcggaccgcaaaggccgcccgtcccgtcaaacaagtttcttcttaggctaagaaacgcagtatatacgagtatctctatatatagtactaatggatttggtgtgcttcccccttagcgtccccctccctctgctcctcctccttcagcctggtctccccctcttctctgccctccacccccgtctctgcactgagatacataagaaacaagggtagtttactgtctgttttgttttctgggttttcagtgtcctagcggaatgcaagtaggcagccagcccgtctgttccctctccgccccgccccgccccgcccccgtcactgcgcttctgttataccatctttgcctgactctctccggcttctccattgaatggctaatgtgtatgtgaaataaagaaataaagaaaaacaaacgcgaga

SEQ ID NO: 27353 - protein, 93 aa, Homo sapiens
MIFQFGWLNRVRAESEAEGAPCPAHVPFPSTTVEGSGSVGLWELGSAGRLPGRGRKLQASPASAPPGRSVRPTSTSIADRKGRPSRQTSFFLG

SEQ ID NO: 27354 - DNA, 1022 bp, Homo sapiens
tgttggaagttgagtgaagccctccccctgtcctcagcgtgcagccctagaggaccccagggctgaggggcagtggatcctgcgggagtctcccggggcgtggggagtaaggccccgggggtggggggccgggtgggccgggcgtgacgcgcggtcaaagtgcaatgatttttcagttcggttggctaaacagggtcagagctgagagcgaagcagaaggggctccctgtccggcccacgtgccctttccctcgacgacagtcgagggctcgggctctgtgggactgtgggagctagggtctgcggggcgcctgcccgggcgaggtcggaagctgcaggccagctgggcccgggccggagcgtgcccggcggggctgcccgggcgggcagggggtgggggctgctcctttcccaagtggtgttgtgaggggcaatgagggcaacaggagatgtggggacgtgttaggagagaaaaaaaaaaaaacaaaaatatatatgggggaaattaacttttttttttcattgaaccaagtgcaatgcatcagagagttttcctatctttgtatgttaagagatccgtgcgcccgaccagcaccagcatcgcggaccgcaaaggccgcccgtcccgtcaaacaagtttcttcttaggctaagaaacgcagtatatacgagtatctctatatatagtactaatggatttggtgtgcttcccccttagcgtccccctccctctgctcctcctccttcagcctggtctccccctcttctctgccctccacccccgtctctgcactgagatacataagaaacaagggtagtttactgtctgttttgttttctgggttttcagtgtcctagcggaatgcaagtaggcagccagcccgtctgttccctctccgccccgccccgccccgcccccgtcactgcgcttctgttataccatctttgcctgactctctccggcttctccattgaatggctaatgtgtatgtgaaataaagaaataaagaaaaacaaacgcg

SEQ ID NO: 27355 - protein, 50 aa, Homo sapiens
MGEINFFFSLNQVQCIREFSYLCMLRDPCARPAPASRTAKAARPVKQVSS

SEQ ID NO: 27356 - DNA, 763 bp, Homo sapiens
gggcaacaggagatgtggggacgtgttaggagagaaaaaaaaaaaaacaaaaatatatatgggggaaattaacttttttttttcattgaaccaagtgcaatgcatcagagagttttcctatctttgtatgttaagagattaagaaaaaaaaattctatttttgttgtaatgtcctcgcggctctggggacgctaaaagaaccgggcctgccccgccctgcgcggggataacgaaagctgagtgtttttcccttttttttgttcgtttttagtttttttttttttaagtcgttttcctgcgttgacgaggatgatctggggtttttatttgtttcgtcgttcgttctgtttcggtgggagggctgaaggaaacgttcacattttagagtttaaaaaaaacacctcgacatttaaaaaatcaaccaacacaagatcaaaaaggaaaaggacgagagaaaaattatttttaagataattaaacataaaaccctggtgcttcttacattataaagtacgttttaaagaacccacaaactattatacataagaaacaagggtagtttactgtctgttttgttttctgggttttcagtgtcctagcggaatgcaagtaggcagccagcccgtctgttccctctccgccccgccccgccccgcccccgtcactgcgcttctgttataccatctttgcctgactctctccggcttctccattgaatggctaatgtgtatgtgaaataaagaaataaagaaaaacaaacgcg

SEQ ID NO: 27357 - protein, 54 aa, Homo sapiens
MIWGFYLFRRSFCFGGRAEGNVHILEFKKNTSTFKKSTNTRSKRKRTREKLFLR

SEQ ID NO: 27358 - DNA, 778 bp, Homo sapiens
cattgaaccaagtgcaatgcatcagagagttttcctatctttgtatgttaagagattaagaaaaaaaaattctatttttgttgtaatgtcctcgcggctctggggacgctaaaagaaccgggcctgccccgccctgcgcggggataacgaaagctgagtgtttttcccttttttttgttcgtttttagtttttttttttttaagtcgttttcctgcgttgacgaggatgatctggggtttttatttgtttcgtcgttcgttctgtttcggtgggagggctgaaggaaacgttcacattttagagtttaaaaaaaacacctcgacatttaaaaaatcaaccaacacaagatcaaaaaggaaaaggacgagagaaaaattatttttaagataattaaacataaaaccctggtgcttcttacattataaagtacgttttaaagaacccacaaactattatacataagtttatgaatcaattaaatatcctgcacttgttaggaatacgcatatcccttctttgttgagtttaacggaacgggacagcggcgtgcccccggcggctggactgctccggccgcgggtctccccgggcgcccctccctggggcccagcacccctcctcgccccatccccgtccgggtacgggggcgcggcaggggtccccggcccctcccccgcagagcgcttctgttataccatctttgcctgactctctccggcttctccattgaatggctaatgtgtatgtgaaataaagaaataaagaaaaacaaacgcg

SEQ ID NO: 27359 - protein, 54 aa, Homo sapiens; identical to SEQ ID NO: 27357

SEQ ID NO: 27360 - DNA, 1461 bp, Homo sapiens
cattgaaccaagtgcaatgcatcagagagttttcctatctttgtatgttaagagattaagaaaaaaaaattctatttttgttgtaatgtcctcgcggctctggggacgctaaaagaaccgggcctgccccgccctgcgcggggataacgaaagctgagtgtttttcccttttttttgttcgtttttagtttttttttttttaagtcgttttcctgcgttgacgaggatgatctggggtttttatttgtttcgtcgttcgttctgtttcggtgggagggctgaaggaaacgttcacattttagagtttaaaaaaaacacctcgacatttaaaaaatcaaccaacacaagatcaaaaaggaaaaggacgagagaaaaattatttttaagataattaaacataaaaccctggtgcttcttacattataaagtacgttttaaagaacccacaaactattatacataagtttatgaatcaattaaatatcctgcacttgttaggaatacgcatatcccttctttgttgagtttaacggaacgggacagcggcgtgcccccggcggctggactgctccggccgcgggtctccccgggcgcccctccctggggcccagcacccctcctcgccccatccccgtccgggtacgggggcgcggcaggggtccccggcccctcccccgcagaggtcaatgccaacgaacaaacgtcccctccctccctccctctccgccccgagcgcccttctttgagccagacggccgcgctctgggtcccagaggggccgggtggctcagacgacccaccactcccccaccctgaccgtgctgaacagacccccccacacgagagaaaataaaggagcaataaagtcacgagaactttcgtcccccaatcgagagcccgaggggcaccccagccccgcctctgctcccccccaccccacccaccctcggggcgcccccctccccccgcaagccagcctgggccagccccgcttcggcccctcccgggagatccgtgcgcccgaccagcaccagcatcgcggaccgcaaaggccgcccgtcccgtcaaacaagtttcttcttaggctaagaaacgcagtatatacgagtatctctatatatagtactaatggatttggtgtgcttcccccttagcgtccccctccctctgctcctcctccttcagcctggtctccccctcttctctgccctccacccccgtctctgcactgagatacataagaaacaagggtagtttactgtctgttttgttttctgggttttcagtgtcctagcggaatgcaagtaggcagccagcccgtctgttccctctccgccccgccccgccccgcccccgtcactgcgcttctgttataccatctttgcctgactctctccggcttctccattgaatggctaatgtgtatgtgaaataaagaaataaagaaaaacaaacgcgaga

SEQ ID NO: 27361 - protein, 54 aa, Homo sapiens; identical to SEQ ID NO: 27357

SEQ ID NO: 27362 - DNA, 1172 bp, Homo sapiens
aatgcatcagagagttttcctatctttgtatgttaagagattaagaaaaaaaaattctatttttgttgtaatgtcctcgcggctctggggacgctaaaagaaccgggcctgccccgccctgcgcggggataacgaaagctgagtgtttttcccttttttttgttcgtttttagtttttttttttttaagtcgttttcctgcgttgacgaggatgatctggggtttttatttgtttcgtcgttcgttctgtttcggtgggagggctgaaggaaacgttcacattttagagtttaaaaaaaacacctcgacatttaaaaaatcaaccaacacaagatcaaaaaggaaaaggacgagagaaaaattatttttaagataattaaacataaaaccctggtgcttcttacattataaagtacgttttaaagaacccacaaactattatacataagtttatgaatcaattaaatatcctgcacttgttaggaatacgcatatcccttctttgttgagtttaacggaacgggacagcggcgtgcccccggcggctggactgctccggccgcgggtctccccgggcgcccctccctggggcccagcacccctcctcgccccatccccgtccgggtacgggggcgcggcaggggtccccggcccctcccccgcagaggtcaatgccaacgaacaaacgtcccctccctccctccctctccgccccgagcgcccttctttgagccagacgccaacttgaccctcaccagcattatcaggagcgcgctcagcaagttggtagtttcctcccccctttcccggcgcccctcccgcccccattcaacatctctcatcctatccccgaccccctccggggaacaccgggaaggctcgacgtcctcctccttcagcctggtctccccctcttctctgccctccacccccgtctctgcactgagatacataagaaacaagggtagtttactgtctgttttgttttctgggttttcagtgtcctagcggaatgcaagtaggcagccagcccgtctgttccctctccgccccgccccgccccgcccccgtcactgcgcttctgttataccatctttgcctgactctctccggcttctccattgaatggctaatgtgtatgtgaaataaagaaataaagaaaaacaaacgcg

SEQ ID NO: 27363 - protein, 54 aa, Homo sapiens; identical to SEQ ID NO: 27357

SEQ ID NO: 27364 - DNA, 974 bp, Homo sapiens
tgcttcttacattataaagtacgttttaaagaacccacaaactattatacataagtttatgaatcaattaaatatcctgcacttgttaggaatacgcatatcccttctttgttgagtttaacggaacgggacagcggcgtgcccccggcggctggactgctccggccgcgggtctccccgggcgcccctccctggggcccagcacccctcctcgccccatccccgtccgggtacgggggcgcggcaggggtccccggcccctcccccgcagaggtcaatgccaacgaacaaacgtcccctccctccctccctctccgccccgagcgcccttctttgagccagacgccaacttgaccctcaccagcattatcaggagcgcgctcagcaagttggtagtttcctcccccctttcccggcgcccctcccgcccccattcaacatctctcatcctatccccgaccccctccggggaacaccgggaaggctcgacgctccaggacaggaccagccacgcagacaggtcgatttgcccaggcccgcgcccgcacgcacgcacgcacacggccccgcacacagccccgccccaccccgcaaccagccctgtcgactgccttatacacccgcccccgcgctggccggccgacctagtgccttgttctcacccccgtgctggcggagcggacgccgcgctctgggtcccagaggggccgggtggctcagacgacccaccaccccgtctctgcactgagatacataagaaacaagggtagtttactgtctgttttgttttctgggttttcagtgtcctagcggaatgcaagtaggcagccagcccgtctgttccctctccgccccgccccgccccgcccccgtcactgcgcttctgttataccatctttgcctgactctctccggcttctccattgaatggctaatgtgtatgtgaaataaagaaataaagaaaaacaaacgcg

SEQ ID NO: 27365 - protein, 43 aa, Homo sapiens
MQVGSQPVCSLSAPPRPAPVTALLLYHLCLTLSGFSIEWLMCM

SEQ ID NO: 27366 - DNA, 1788 bp, Homo sapiens
ggagtgtgcaaagccaaagggcagactcggacataagaggaggcagcttccctgcctcagtttaccccctgcgtgcatccaggcacctccctccccggctgccctggggcccgggtccccagaggcccggggtccctacagtggctgggggagcggaaggcgaagccctgaggggtggcggaccgagtcctgccagcgccggctgggggcggggccgggaggcccgcgctgctaggtccccgcccgctggtttcctccggggtcagccaggctccttatcaggcgcggccaggcagcctggcccttatctgcactgggccagcatcctccggccgctgcgccgccaggggtgagagggaggaaaccgggccgccgggggcggggagaaggcgggccggcccgggagccgctcactttccctgggggggacctacgcggagacctcggctatcctggccttccgaggcccacgaggaggcgcggcccaacgccggggcctggagcattgaggccggaccctcgcgagacagcagagcctggcctgacgctggaaaccacaccctggcccagactgccagccctgacgggacagagccagggcactcaccaggctgcaagaacagtgctggggtgagtacccccacgtcggggtccatgtgcccgcctcaggcacaggcagaggtgggccccaccatgactgagaaggcagagatggtgtgtgcccccagcccagcgcctgccccaccccctaagcctgcctcgcctgggcccccgcaggtggaggaggtgggccaccgaggaggctcctcgccccccaggctgccacctggtgtaccagtgatcagcctgggccacagcaggcccccaggggtagccatgcccaccacagagctgggcactctgcggcccccgctgctgcaactctccaccctgggaactgccccgcccactttggccctgcactaccaccctcaccccttcctcaacagtgtctacattgggccagcaggaccttttagcatcttccctagcagccggttgaagcggagaccaagccactgtgagctggacctggctgaggggcaccagccccagaaggtggcccggcgcgtgttcaccaacagccgggagcgctggcggcagcagaacgttaacggcgccttcgccgagctgaggaagctgctgccgacgcacccgcccgaccggaagctgagcaagaacgaggtgctccgcctagccatgaagtacatcggcttcctggtgcggctgctgcgcgaccaagccgcagctctggccgcaggccccacccctcccgggcctcgcaaacggccggtgcaccgggtcccagacgacggcgcccgccggggatccggacgcagggccgaggcggcagcgcgctcgcagcccgcgcccccggccgaccccgacggcagccccggtggagcggcccggcccatcaagatggagcaaaccgctttgagcccagaggtgcggtgaccgcacgcggcagcacctctgagccggagggcaccagggactcggcccagggccgtcaaggaaagggcagtggacgtgctgcgcatgttcgggagcgaactcccccgaagaaggaccagtgaagacgtcaggggcaaggtctcgggggtccggaagggtgatcatcgacccccaagggacccgcagacccttaaaaaaatcacccacaaccctctggaagtggccttgcccggtccccttcccaggggcgaggtcggcaaagcaacatggcagagcagtcataggacccaa

SEQ ID NO: 27367 - protein, 280 aa, Homo sapiens; identical to SEQ ID NO: 3711

SEQ ID NO: 27368 - DNA, 1642 bp, Homo sapiens
gggagtgtgcaaagccaaagggcagactcggacataagaggaggcagcttccctgcctcagtttaccccctgcgtgcatccaggcacctccctccccggctgccctggggcccgggtccccagaggcccggggtccctacagtggctgggggagcggaaggcgaagccctgaggggtggcggaccgagtcctgccagcgccggctgggggcggggccgggaggcccgcgctgctaggtccccgcccgctggtttcctccggggtcagccaggctccttatcaggcgcggccaggcagcctggcccttatctgcactgggccagcatcctccggccgctgcgccgccaggggtgagagggaggaaaccgggccgccgggggcggggagaaggcgggccggcccgggagccgctcactttccctgggggggacctacgcggagacctcggctatcctggccttccgaggcccacgaggaggcgcggcccaacgccggggcctggagcattgaggccggaccctcgcgagacagcagagcctggcctgacgctggaaaccacaccctggcccagactgccagccctgacgggacagagccagggcactcaccaggctgcaagaacagtgctggggtggaggaggtgggccaccgaggaggctcctcgccccccaggctgccacctggtgtaccagtgatcagcctgggccacagcaggcccccaggggtagccatgcccaccacagagctgggcactctgcggcccccgctgctgcaactctccaccctgggaactgccccgcccactttggccctgcactaccaccctcaccccttcctcaacagtgtctacattgggccagcaggaccttttagcatcttccctagcagccggttgaagcggagaccaagccactgtgagctggacctggctgaggggcaccagccccagaaggtggcccggcgcgtgttcaccaacagccgggagcgctggcggcagcagaacgttaacggcgccttcgccgagctgaggaagctgctgccgacgcacccgcccgaccggaagctgagcaagaacgaggtgctccgcctagccatgaagtacatcggcttcctggtgcggctgctgcgcgaccaagccgcagctctggccgcaggccccacccctcccgggcctcgcaaacggccggtgcaccgggtcccagacgacggcgcccgccggggatccggacgcagggccgaggcggcagcgcgctcgcagcccgcgcccccggccgaccccgacggcagccccggtggagcggcccggcccatcaagatggagcaaaccgctttgagcccagaggtgcggtgaccgcacgcggcagcacctctgagccggagggcaccagggactcggcccagggccgtcaaggaaagggcagtggacgtgctgcgcatgttcgggagcgaactcccccgaagaaggaccagtgaagacgtcaggggcaaggtctcgggggtccggaagggtgatcatcgacccccaagggacccgcagacccttaaaaaaatcacccacaaccctctggaagtggccttgcccggtccccttcccaggggcgaggtcggcaaagcaacatggcagagcagtcataggacccaa

SEQ ID NO: 27369 - protein, 206 aa, Homo sapiens
MPTTELGTLRPPLLQLSTLGTAPPTLALHYHPHPFLNSVYIGPAGPFSIFPSSRLKRRPSHCELDLAEGHQPQKVARRVFTNSRERWRQQNVNGAFAELRKLLPTHPPDRKLSKNEVLRLAMKYIGFLVRLLRDQAAALAAGPTPPGPRKRPVHRVPDDGARRGSGRRAEAAARSQPAPPADPDGSPGGAARPIKMEQTALSPEVR

SEQ ID NO: 27370 - DNA, 541 bp, Homo sapiens
agctgaggaagctgctgccgacgcacccgcccgaccggaagctgagcaagaacgaggtgctccgcctagccatgaagtacatcggcttcctggtgcggctgctgcgcgaccaagccgcagctctggccgcaggccccacccctcccgggcctcgcaaacggccggtgcaccgggtcccagacgacggcccccggtggagcggcccggcccatcaagatggagcaaaccgctttgagcccagaggtgcggtgaccgcacgcggcagcacctctgagccggagggcaccagggactcggcccagggccgtcaaggaaagggcagtggacgtgctgcgcatgttcgggagcgaactcccccgaagaaggaccagtgaagacgtcaggggcaaggtctcgggggtccggaagggtgatcatcgacccccaagggacccgcagacccttaaaaaaatcacccacaaccctctggaagtggccttgcccggtccccttcccaggggcgaggtcggcaaagcaacatggcagagcagtcataggaccc

SEQ ID NO: 27371 - protein, 100 aa, Homo sapiens
MKYIGFLVRLLRDQAAALAAGPTPPGPRKRPVHRVPDDGPRWSGPAHQDGANRFEPRGAVTARGSTSEPEGTRDSAQGRQGKGSGRAAHVRERTPPKKDQ

SEQ ID NO: 27372 - DNA, 2262 bp, Homo sapiens
ggacgggctaggcagcgcggggagggattcggactcggggcgggcctgcacgagggcatcggctccacagggaccagtcatccccaaaacgaggggatatcagcttaccgaggccgcaggttttcctagtccctacctcatagatatgtaggacatccccgggcccggaatgcggctctctgaccctctctgtgccctcccccgccccccgaaccaggcttggcgggcggaggcgccagcggatgtctcatgcaaggatcgtctctgtggctaagcctcactttccgctccgcccgggtgctctctagagcccggtttttcgagtggcagtctccagggctgccgaatacagcagcgatggagaacggcaccgggccctacggagaagaacgtccacgtgaagtccaggagacgacagtcaccgagggggctgccaaaatcgcctttcccagtgccaacgaggtcttttataacccggtgcaggaattcaatcgggacctgacatgtgctgtgatcaccgagtttgctcgcattcagcttggggccaaaggaatccagatcaaggttccaggagagaaggacacgcaaaaagtggtcgtggacttgtcagagcaagaggaggaaaaggttgaactgaaagagagtgaaaacctggcctcaggagaccaacctcgcacagcggccgtgggggagatctgtgaggaaggcctgcatgtgctggaaggcctggcagcttcaggcctacgttccattcgatttgccctagaggtgcctgggctcagatctgtggttgcaaacgatgcctccacccgggctgtggatctcatacgccggaatgtccagctcaatgacgtggcccacctggtacagccgagccaagcagatgcccggatgctgatgtaccagcaccagagggtgtcggagaggtttgacgtcatcgatctggacccctatggcagcccagccaccttcctggatgcagctgtgcaggctgtgagtgaaggagggttgctgtgtgtgacctgcacagacatggcggtgttggcggggaacagcggggagacgtgctacagcaagtacggggccatggccctcaagagccgggcctgccacgagatggccctgagaatcgtcctgcacagcctggacctccgcgccaactgctaccagcgcttcgtggtgccgctgctcagcatcagcgctgacttctacgtgcgtgtttttgtccgtgtcttcaccggccaggccaaggtcaaggcctcagccagcaagcaggcgctggtgttccagtgtgtgggctgcggggccttccaccttcagcgtctcggcaaagcgtcaggagtccccagcggccgggccaagttctctgcagcctgtggtccccctgtgacccccgagtgtgaacactgtgggcaacgacaccagcttggtggccccatgtgggcagagcccatccatgacctggattttgtgggccgtgtcctggaggctgtgagcgctaaccccggccgcttccacacctcggagcggatccgaggggtcctgagcgtcatcactgaggagctcccggacgtgcctctgtactacaccctggaccagctgagcagcaccatccactgcaacacaccaagcctcctgcagttgcggtcggccctcctccacgctgacttccgggtctcactctcccacgcctgtaagaacgctgtgaagacggatgcccctgcctctgccctctgggacatcatgcgttgctgggagaaggaatgtccggtgaaacgggagcgactatcagagactagcccagcgttccgcattctcagtgtggagcccaggctgcaggccaacttcaccatccgggaagatgccaaccccagctcccgacagcgaggactcaagcgcttccaggctaacccggaggccaactggggtccccggcctcgtgcccggccagggggcaaggcggccgacgaagctatggaggagagacgcaggctgcttcagaacaagcggaaggagccgccggaagatgtggcccagcgggctgcccggctcaagacatttccttgcaagaggtttaaggagggcacctgtcaacgcggggaccagtgctgctactcccacagccccccgacacccagggtttctgctgatgctgcccctgactgtccagagacctccaaccagaccccccctggacctggggctgccgctgggccaggcatagactgaaccaataaagagatgtcacgtcaccttctcccg

SEQ ID NO: 27373 - protein, 659 aa, Homo sapiens; identical to SEQ ID NO: 3713

SEQ ID NO: 27374 - DNA, 2175 bp, Homo sapiens
ggacgggctaggcagcgcggggagggattcggactcggggcgggcctgcacgagggcatcggctccacagggaccagtcatccccaaaacgaggggatatcagcttaccgaggccgcaggttttcctagtccctacctcatagatatgtaggacatccccgggcccggaatgcggctctctgaccctctctgtgccctcccccgccccccgaaccaggcttggcgggcggaggcgccagcggatgtctcatgcaaggatcgtctctgtggctaagcctcactttccgctccgcccgggtgctctctagagcccggtttttcgagtggcagtctccagggctgccgaatacagcagcgatggagaacggcaccgggccctacggagaagaacgtccacgtgaagtccaggagacgacagtcaccgagggggctgccaaaatcgcctttcccagtgccaacgaggtcttttataacccggtgcaggaattcaatcgggacctgacatgtgctgtgatcaccgagtttgctcgcattcagcttggggccaaaggaatccagatcaaggttccaggagagaaggacacgcaaaaagtggtcgtggacttgtcagagcaagaggaggaaaaggttgaactgaaagagagtgaaaacctggcctcaggagaccaacctcgcacagcggccgtgggggagatctgtgaggaaggcctgcatgtgctggaaggcctggcagcttcaggcctacgttccattcgatttgccctagaggtgcctgggctcagatctgtggttgcaaacgatgcctccacccgggctgtggatctcatacgccggaatgtccagctcaatgacgtggcccacctggtacagccgagccaagcagatgcccggatgctgatgtaccagcaccagagggtgtcggagaggtttgacgtcatcgatctggacccctatggcagcccagccaccttcctggatgcagctgtgcaggctgtgagtgaaggagggttgctgtgtgtgacctgcacagacatggcggtgttggcggggaacagcggggagacgtgctacagcaagtacggggccatggccctcaagagccgggcctgccacgagatggccctgagaatcgtcctgcacagcctggacctccgcgccaactgctaccagcgcttcgtggtgccgctgctcagcatcagcgctgacttctacgtgcgtgtttttgtccgtgtcttcaccggccaggccaaggtcaaggcctcagccagggccaagttctctgcagcctgtggtccccctgtgacccccgagtgtgaacactgtgggcaacgacaccagcttggtggccccatgtgggcagagcccatccatgacctggattttgtgggccgtgtcctggaggctgtgagcgctaaccccggccgcttccacacctcggagcggatccgaggggtcctgagcgtcatcactgaggagctcccggacgtgcctctgtactacaccctggaccagctgagcagcaccatccactgcaacacaccaagcctcctgcagttgcggtcggccctcctccacgctgacttccgggtctcactctcccacgcctgtaagaacgctgtgaagacggatgcccctgcctctgccctctgggacatcatgcgttgctgggagaaggaatgtccggtgaaacgggagcgactatcagagactagcccagcgttccgcattctcagtgtggagcccaggctgcaggccaacttcaccatccgggaagatgccaaccccagctcccgacagcgaggactcaagcgcttccaggctaacccggaggccaactggggtccccggcctcgtgcccggccagggggcaaggcggccgacgaagctatggaggagagacgcaggctgcttcagaacaagcggaaggagccgccggaagatgtggcccagcgggctgcccggctcaagacatttccttgcaagaggtttaaggagggcacctgtcaacgcggggaccagtgctgctactcccacagccccccgacacccagggtttctgctgatgctgcccctgactgtccagagacctccaaccagaccccccctggacctggggctgccgctgggccaggcatagactgaaccaataaagagatgtcacgtcaccttctcccg

SEQ ID NO: 27375 - protein, 630 aa, Homo sapiens
MQGSSLWLSLTFRSARVLSRARFFEWQSPGLPNTAAMENGTGPYGEERPREVQETTVTEGAAKIAFPSANEVFYNPVQEFNRDLTCAVITEFARIQLGAKGIQIKVPGEKDTQKVVVDLSEQEEEKVELKESENLASGDQPRTAAVGEICEEGLHVLEGLAASGLRSIRFALEVPGLRSVVANDASTRAVDLIRRNVQLNDVAHLVQPSQADARMLMYQHQRVSERFDVIDLDPYGSPATFLDAAVQAVSEGGLLCVTCTDMAVLAGNSGETCYSKYGAMALKSRACHEMALRIVLHSLDLRANCYQRFVVPLLSISADFYVRVFVRVFTGQAKVKASARAKFSAACGPPVTPECEHCGQRHQLGGPMWAEPIHDLDFVGRVLEAVSANPGRFHTSERIRGVLSVITEELPDVPLYYTLDQLSSTIHCNTPSLLQLRSALLHADFRVSLSHACKNAVKTDAPASALWDIMRCWEKECPVKRERLSETSPAFRILSVEPRLQANFTIREDANPSSRQRGLKRFQANPEANWGPRPRARPGGKAADEAMEERRRLLQNKRKEPPEDVAQRAARLKTFPCKRFKEGTCQRGDQCCYSHSPPTPRVSADAAPDCPETSNQTPPGPGAAAGPGID

SEQ ID NO: 27376 - DNA, 2149 bp, Homo sapiens
atcatgtgattcgcccacccactgtgccaacatggcggcgcccaggtcctaattcgggaaacgtgcaccttgactaattcggttttctgtggctacgagagcaggcttggcgggcggaggcgccagcggatgtctcatgcaaggatcgtctctgtggctaagcctcactttccgctccgcccgggtgctctctagagcccggtttttcgagtggcagtctccagggctgccgaatacagcagcgatggagaacggcaccgggccctacggagaagaacgtccacgtgaagtccaggagacgacagtcaccgagggggctgccaaaatcgcctttcccagtgccaacgaggtcttttataacccggtgcaggaattcaatcgggacctgacatgtgctgtgatcaccgagtttgctcgcattcagcttggggccaaaggaatccagatcaaggttccaggagagaaggacacgcaaaaagtggtcgtggacttgtcagagcaagaggaggaaaaggttgaactgaaagagagtgaaaacctggcctcaggagaccaacctcgcacagcggccgtgggggagatctgtgaggaaggcctgcatgtgctggaaggcctggcagcttcaggcctacgttccattcgatttgccctagaggtgcctgggctcagatctgtggttgcaaacgatgcctccacccgggctgtggatctcatacgccggaatgtccagctcaatgacgtggcccacctggtacagccgagccaagcagatgcccggatgctgatgtaccagcaccagagggtgtcggagaggtttgacgtcatcgatctggacccctatggcagcccagccaccttcctggatgcagctgtgcaggctgtgagtgaaggagggttgctgtgtgtgacctgcacagacatggcggtgttggcggggaacagcggggagacgtgctacagcaagtacggggccatggccctcaagagccgggcctgccacgagatggccctgagaatcgtcctgcacagcctggacctccgcgccaactgctaccagcgcttcgtggtgccgctgctcagcatcagcgctgacttctacgtgcgtgtttttgtccgtgtcttcaccggccaggccaaggtcaaggcctcagccagcaagcaggcgctggtgttccagtgtgtgggctgcggggccttccaccttcagcgtctcggcaaagcgtcaggagtccccagcggccgggccaagttctctgcagcctgtggtccccctgtgacccccgagtgtgaacactgtgggcaacgacaccagcttggtggccccatgtgggcagagcccatccatgacctggattttgtgggccgtgtcctggaggctgtgagcgctaaccccggccgcttccacacctcggagcggatccgaggggtcctgagcgtcatcactgaggagctcccggacgtgcctctgtactacaccctggaccagctgagcagcaccatccactgcaacacaccaagcctcctgcagttgcggtcggccctcctccacgctgacttccgggtctcactctcccacgcctgtaagaacgctgtgaagacggatgcccctgcctctgccctctgggacatcatgcgttgctgggagaaggaatgtccggtgaaacgggagcgactatcagagactagcccagcgttccgcattctcagtgtggagcccaggctgcaggccaacttcaccatccgggaagatgccaaccccagctcccgacagcgaggactcaagcgcttccaggctaacccggaggccaactggggtccccggcctcgtgcccggccagggggcaaggcggccgacgaagctatggaggagagacgcaggctgcttcagaacaagcggaaggagccgccggaagatgtggcccagcgggctgcccggctcaagacatttccttgcaagaggtttaaggagggcacctgtcaacgcggggaccagtgctgctactcccacagccccccgacacccagggtttctgctgatgctgcccctgactgtccagagacctccaaccagaccccccctggacctggggctgccgctgggccaggcatagactgaaccaataaagagatgtcacgtcaccttctcccg

SEQ ID NO: 27377 - protein, 659 aa, Homo sapiens; identical to SEQ ID NO: 3713

SEQ ID NO: 27378 - DNA, 365 bp, Homo sapiens
agcggatgtctcatgcaaggatcgtctctgtggctaagcctcactttccgctccgcccgggtgctctctagagcccggtttttcgagtggcagtctccagggctgccgaatacagcagcgatggagaacggcaccgggccctacggagaagaacgtccacgtgaagtccaggagacgacagtcaccgagggggctgccaaaatcgcctttcccatgctgctactcccacagccccccgacacccagggtttctgctgatgctgcccctgactgtccagagacctccaaccagaccccccctggacctggggctgccgctgggccaggcatagactgaaccaataaagagatgtcacgtcaccttc

SEQ ID NO: 27379 - protein, 81 aa, Homo sapiens
MQGSSLWLSLTFRSARVLSRARFFEWQSPGLPNTAAMENGTGPYGEERPREVQETTVTEGAAKIAFPMLLLPQPPDTQGFC

SEQ ID NO: 27380 - DNA, 404 bp, Homo sapiens
tgactaattcggttttctgtggctacgagagcaggcttggcgggcggaggcgccagcggatgtctcatgcaaggatcgtctctgtggctaagcctcactttccgctccgcccgggtgctctctagagcccggtttttcgagtggcagtctccagggctgccgaatacagcagcgatggagaacggcaccgggccctacggagaagaacgtccacgtgaagtccaggagacgacagtcaccgagggggctgccaaaatcgcctttcccagtgccaacgaggtcttttataacccggtgcaggaattcaatcgggacctgacgtgagcaggggtcagacaccccccctggacctggggctgccgctgggccaggcatagactgaaccaataaagagatgtcacgtc

SEQ ID NO: 27381 - protein, 85 aa, Homo sapiens
MQGSSLWLSLTFRSARVLSRARFFEWQSPGLPNTAAMENGTGPYGEERPREVQETTVTEGAAKIAFPSANEVFYNPVQEFNRDLT

SEQ ID NO: 27382 - DNA, 1029 bp, Homo sapiens
atcatgtgattcgcccacccactgtgccaacatggcggcgcccaggtcctaattcgggaaacgtgcaccttgactaattcggttttctgtggctacgagagcaggcttggcgggcggaggcgccagcggatgtctcatgcaaggatcgtctctgtggctaagcctcactttccgctccgcccgggtgctctctagagcccggtttttcgagtggcagtctccagggctgccgaatacagcagcgatggagaacggcaccgggccctacggagaagaacgtccacgtgaagtccaggagacgacagtcaccgagggggctgccaaaatcgcctttcccagtgccaacgaggtcttttataacccggtgcaggaattcaatcgggacctgacatgtgctgtgatcaccgagtttgctcgcattcagcttggggccaaaggaatccagatcaaggttccaggagagaaggacacgcaaaaagtggtcgtggacttgtcagagcaagaggaggaaaaggttgaactgaaagagagtgaaaacctggcctcaggagaccaacctcgcacagcggccgtgggggagatctgtgaggaaggcctgcatgtgctggaaggcctggcagcttcaggcctacgttccattcgatttgccctagaggtgcctgggctcagatctgtggttgcaaacgatgcctccacccgggctgtggatctcatacgccggaatgtccagctcaatgacgtggcccacctggtacagccgagccaagcagatgcccggatgctgatgtaccagcaccagagggtgtcggagaggtttgacgtcatcgatctggacccctatggcagcccagccaccttcctggatgcagctgtgcaggctgccctgagaatcgtcctgcacagcctggacctccgcgccaactgctaccagcgcttcgtggtgccgctgctcagcatcagcgctgacttctacgtgcgtgtttttgtccgtgtcttcaccggccaggccaaggtcaaggcctcagccag

SEQ ID NO: 27383 - protein, 296 aa, Homo sapiens
MQGSSLWLSLTFRSARVLSRARFFEWQSPGLPNTAAMENGTGPYGEERPREVQETTVTEGAAKIAFPSANEVFYNPVQEFNRDLTCAVITEFARIQLGAKGIQIKVPGEKDTQKVVVDLSEQEEEKVELKESENLASGDQPRTAAVGEICEEGLHVLEGLAASGLRSIRFALEVPGLRSVVANDASTRAVDLIRRNVQLNDVAHLVQPSQADARMLMYQHQRVSERFDVIDLDPYGSPATFLDAAVQAALRIVLHSLDLRANCYQRFVVPLLSISADFYVRVFVRVFTGQAKVKAS

SEQ ID NO: 27384 - DNA, 816 bp, Homo sapiens
attcgcccacccactgtgccaacatggcggcgcccaggtcctaattcgggaaacgtgcaccttgactaattcggttttctgtggctacgagagcaggcttggcgggcggaggcgccagcggatgtctcatgcaaggatcgtctctgtggctaagcctcactttccgctccgcccgggtgctctctagagcccggtttttcgagtggcagtctccagggctgccgaatacagcagcgatggagaacggcaccgggccctacggagaagaacgtccacgtgaagtccaggagacgacagtcaccgagggggctgccaaaatcgcctttcccagtgccaacgagatgtgctgtgatcaccgagtttgctcgcattcagcttggggccaaaggaatccagatcaaggttccaggagagaaggacacgcaaaaagtggtcgtggacttgtcagagcaagaggaggaaaaggttgaactgaaagagagtgaaaacctggcctcaggagaccaacctcgcacagcggccgtgggggagatctgtgaggaaggcctgcatgtgctggaaggcctggcagcttcaggcctacgttccattcgatttgccctagaggtgcctgggctcagatctgtggttgcaaacgatgcctccacccgggctgtggatctcatacgccggaatgtccagctcaatgacgtggcccacctggtacagccgagccaagcagatgcccggatgctgatgtaccagcaccagagggtgtcggagaggtttgacgtcatcgatctggacccctatggcagcccagccaccttcctggat

SEQ ID NO: 27385 - protein, 113 aa, Homo sapiens
MQGSSLWLSLTFRSARVLSRARFFEWQSPGLPNTAAMENGTGPYGEERPREVQETTVTEGAAKIAFPSANEMCCDHRVCSHSAWGQRNPDQGSRREGHAKSGRGLVRARGGKG

SEQ ID NO: 27386 - DNA, 716 bp, Homo sapiens
ggcggcgcccaggtcctaattcgggaaacgtgcaccttgactaattcggttttctgtggctacgagagcagagcccggtttttcgagtggcagtctccagggctgccgaatacagcagcgatggagaacggcaccgggccctacggagaagaacgtccacgtgaagtccaggagacgacagtcaccgagggggctgccaaaatcgcctttcccagtgccaacgaggtcttttataacccggtgcaggaattcaatcgggacctgacatgtgctgtgatcaccgagtttgctcgcattcagcttggggccaaaggaatccagatcaaggttccaggagagaaggacacgcaaaaagtggtcgtggacttgtcagagcaagaggaggaaaaggttgaactgaaagagagtgaaaacctggcctcaggagaccaacctcgcacagcggccgtgggggagatctgtgaggaaggcctgcatgtgctggaaggcctggcagcttcaggcctacgttccattcgatttgccctagaggtgcctgggctcagatctgtggttgcaaacgatgcctccacccgggctgtggatctcatacgccggaatgtccagctcaatgacgtggcccacctggtacagccgagccaagcagatgcccggatgctgatgtaccagcaccagagggtgtcggagaggtttgacgtcatcgatctggaccccta

SEQ ID NO: 27387 - protein, 197 aa, Homo sapiens
MENGTGPYGEERPREVQETTVTEGAAKIAFPSANEVFYNPVQEFNRDLTCAVITEFARIQLGAKGIQIKVPGEKDTQKVVVDLSEQEEEKVELKESENLASGDQPRTAAVGEICEEGLHVLEGLAASGLRSIRFALEVPGLRSVVANDASTRAVDLIRRNVQLNDVAHLVQPSQADARMLMYQHQRVSERFDVIDLD

SEQ ID NO: 27388 - DNA, 862 bp, Homo sapiens
cggcgcccaggtcctaattcgggaaacgtgcaccttgactaattcggttttctgtggctacgagagcaggcttggcgggcggaggcgccagcggatgtctcatgcaaggatcgtctctgtggctaagcctcactttccgctccgcccgggtgctctctagagcccggtttttcgagtggcagtctccagggctgccgaatacagcagcgatggagaacggcaccgggccctacggagaagaacgtccacgtgaagtccaggagacgacagtcaccgagggggctgccaaaatcgcctttcccagtgccaacgaggtcttttataacccggtgcaggaattcaatcgggacctgacgtgagcaggggtcagacgttagcctggcatcggctagtgggtcagtgtggatggcgggggcggggtatgagctagtcctctgtctcccaccagatgtgctgtgatcaccgagtttgctcgcattcagcttggggccaaaggaatccagagtgagtggaggtccaggcttctggtgggcgggggtcacacaagtttatctccctgcctgggctcttctgccgcccaaatccagaggggcttcagccacatagcaggccctgggttctgctccttcagcctttccgcagggatttcagggacgatattttggagattaaggggaggtttctcagaggggaccttgttattctctgacttgtgcctctgggtggctgcagtcaaggttccaggagagaaggacacgcaaaaagtggtcgtggacttgtcagagcaagaggaggaaaaggttgaactgaaagagagtgaaaacctggcctcaggagaccaacctcgcacagcggccgtggg

SEQ ID NO: 27389 - protein, 85 aa, Homo sapiens; identical to SEQ ID NO: 27381

SEQ ID NO: 27390 - DNA, 4500 bp, Homo sapiens
caatgaatggccgccgcggctgccgctgctgctgaggcggaggccgcggaggccgcggaggcggaggccgaggccccggcgcagcggggcgcgccccgggcccaggcccggccccagccgccgctgcggagcccgccgggaccccccggagcgcggccacggcgcagccgctgccatggcccagacactgcagatggagatcccgaacttcggcaacagcatcctggagtgcctcaatgaacagcggctgcagggcctgtactgtgacgtgtcagtggtggtcaagggccatgccttcaaggcccaccgggccgtgcttgctgccagcagctcctacttccgggacctgttcaacaacagccgcagcgccgtggtggagctgccggcggctgtgcagccccagtctttccagcagatcctcagcttctgctacacgggccggctgagcatgaacgtgggcgaccagttcctgctcatgtacacggctggcttcctgcagatccaggagatcatggagaagggcaccgagttcttcctcaaggtgagctccccgagctgcgactcccagggcctgcatgcggaggaggccccatcgtcggagccccagagccccgtggcgcagacatcgggctggccagcctgtagcaccccgctgcccctcgtgtcgcgggtgaagacggagcagcaggagtcggactccgtgcagtgcatgcccgtggccaagcggctgtgggacagtggccagaaggaggctgggggcggcggcaatggcagccgcaagatggccaagttctccacgccggacctggctgccaaccggcctcaccagcccccgccaccccaacaggctccggtggtggcagcagcccagcccgccgtggctgcgggagcagggcagccagccggtggggtggcagcagcagggggtgtggtgagtgggcccagcacgtcggagcggaccagcccaggcacctcaagcgcctacaccagcgacagccctggctcctaccacaatgaggaggacgaggaggaggatggtggcgaggagggcatggatgagcagtaccggcagatctgcaacatgtacaccatgtacagcatgatgaacgtcggccagacagccgagaaggtggaggccctcccggagcaggtagcccccgagtcccgaaatcgcatccgggttcggcaagacctggcgtctctcccggctgaacttatcaaccagattgggaaccgctgccaccccaagctctacgacgagggcgacccctctgagaagctggagctggtgacaggcaccaacgtgtacatcacaagggcgcagctgatgaactgccacgtcagcgcaggcacgcggcacaaggtcctactgcggcggctcctggcctccttctttgaccggaacacgctggccaacagctgcggcaccggcatccgctcttctaccaacgatccccgtcggaagcccctggacagccgcgtgctccacgctgtcaagtactactgccagaacttcgcccccaacttcaaggagagcgagatgaatgccatcgcggccgacatgtgcaccaacgcccgccgcgtcgtgcgcaagagctggatgcccaaggtcaaggtgctcaaggctgaggatgacgcctacaccaccttcatcagtgaaacgggcaagatcgagccggacatgatgggtgtggagcatggcttcgagaccgccagccacgagggcgaggcgggtccctcggctgaagccctgcagtaacccgcccagcctcccgcggggccacacacttcccctcccaacacacacacacacctgccatcttggtcatgagctactgtctgtccctccccaggacccgcggtgggtgctgcatgttcccggccctctgcccctcctgtcctaccccctttccccaccgagagctgggccgggagaggaccgcagggcaggtggcgtgaggtccgtgttgccttctttaacacacactcgtgcagtgggggagttctggctccccaacctaacccctagccgtcatctccacactcaccaggcccaccaggggagggggctggcctgggggtcttgggaaggcccctccccaggccctaggccacctcgcggaagccttcagcctccgcccctcactgcagccccttgggacttgaggggggccccaggggttctcaggacccctcccaccacctcccagtgcttccacgtctccaaaagcgccttcctgtcaccctcgtctatccctgcgcctgggggctggggtaggcgaggccgtggggactacccattttatagctggggaaacaggctccgagaaattgcacaaccgacctcaggtggccggcagtggcgtgcctggtgccctttctcctcttccgcctctgttgctccctttggtcctctggggcctcagagaggcaggtcctaaaggagggggggtctcctgggggcagaccgagggtctcggaggatagaatgagaggtttccagggctggcagagtgtgtgcgtgtgtgtgtgcagaagttttgctttcaaacaaatgaagatacaagaggcagtaggacctgggttggaacccaggggagcagactggggggctgttgcccctccctccatctccccacacccaccccaccccacagcagggctcctggcccccacccccctgtacataatttttaaaacctttttttagcgaatgaaatattgaagtataagattccttttatttttcaaaccaatggggctgtgtctattgtccccctcggtccccaggggtggggggccttggaaggcagggcggtgttggggggctggggggcaggctgaatgtgtgtgtgtgggtgtgtatgtgtggagtgtgtgtgtgtgtttccatggtaggactccagtcccagctgctgcctaggctcctgtgggtcctgtgggtccccctcccctgttcaccttccccaacagggctatagtttaagggtgtcccaggccttggctggttggctgggcccagctcctgggggctgggcagggcagggcagggccgggtccacttccattgttagcagttgtttgcagaattttctcttttaccattcctctctttttgttctcgcccagagtgggtggttttttgttgttgttttagattttcatgtgaaggcagttttttttcttttttaactccccatccccctatgcagggtgtcatttcaccatccacatccacatccttgtttgtgtttctggccctcgtcctccctgcctctcatctgcctccccaacccccacctacccactgctcccaggggtctctccaggggcagggggattttaggagatggggtgggggccagcccctactggacccttgtaatctgatttggagaccatccccccgatgggaccagcagccccgccggcccactgggggtccctcttaacatctgcttgttgcgggggtcagtcatgagtgccagggtctggctggggtcttggcactgtcttcctggccggggcctgaaaccttagcccccagccggcctgagtgggggatattgacacccccagctaaagcacaagcaccttagtcacccctcctctccccccgcctcctggcctgccaccccaccccagcgtttaccccaaagcacaatgccctggtcacttggcaagcggctgggcctgacggaggccgaggggcagaccggggctccagccagacccctgaaaggaaggtgctcccccacttccaggccttagttggggtgggggggccagctcctgggcctggggtcttctcacccccacccccttgtcctgggtaggcccctgcctgcccctctctgccttttcctcgggtgtccctcctcgagcccctgtggcattggcttgggtggcagagcccacttgtttcagggaccccaggaggtgccccctggctcccaggactgtgtgtgggtccggggggtgggggggtggggagaagggtcgggcagggggtgcaggggaggaaactcctcaccaggagagccaaagacagggttgtgccttaccccaggagccacccctgtaccccccttgccctgccattcaccctccacccctacccctgggcggcctgctgctttttccttctcttcctcccctgccctgagctgcatggttcccccaccctgggcagccaggaaggaatctgaatggagaatcaccaaccaccagagaaaaaagactgtggggccctcccctgccaactccccttccctggccgcccactcaacccacacctctttcacgcaggacaggctgcccaccctgtccacgtgaagtgccaacgccctccccaccctgggccgagcccccacccctccctgggcccccaagtgagattgcacatttaactactgtaaggagaggagcggcgttggcaaatgtgaaccatgagaatatcagtgatactgatgagaataaactaaacgcctttgtaacagc

SEQ ID NO: 27391 - protein, 527 aa, Homo sapiens; identical to SEQ ID NO: 3715

SEQ ID NO: 27392 - DNA, 1565 bp, Homo sapiens
gccgcggctgccgctgctgctgaggcggaggccgcggaggccgcggaggcggaggccgaggccccggcgcagcggggcgcgccccgggcccaggcccggccccagccgccgctgcggagcccgccgggaccccccggagcgcggccacggcgcagccgctgccatggcccagacactgcagatggagatcccgaacttcggcaacagcatcctggagtgcctcaatgaacagcggctgcagggcctgtactgtgacgtgtcagtggtggtcaagggccatgccttcaaggcccaccgggccgtgcttgctgccagcagctcctacttccgggacctgttcaacaacagccgcagcgccgtggtggagctgccggcggctgtgcagccccagtctttccagcagatcctcagcttctgctacacgggccagcccctactggacccttgtaatctgatttggagaccatccccccgatgggaccagcagccccgccggcccactgggggtccctcttaacatctgcttgttgcgggggtcagtcatgagtgccagggtctggctggggtcttggcactgtcttcctggccggggcctgaaaccttagcccccagccggcctgagtgggggatattgacacccccagctaaagcacaagcaccttagtcacccctcctctccccccgcctcctggcctgccaccccaccccagcgtttaccccaaagcacaatgccctggtcacttggcaagcggctgggcctgacggaggccgaggggcagaccggggctccagccagacccctgaaaggaaggtgctcccccacttccaggccttagttggggtgggggggccagctcctgggcctggggtcttctcacccccacccccttgtcctgggtaggcccctgcctgcccctctctgccttttcctcgggtgtccctcctcgagcccctgtggcattggcttgggtggcagagcccacttgtttcagggaccccaggaggtgccccctggctcccaggactgtgtgtgggtccggggggtgggggggtggggagaagggtcgggcagggggtgcaggggaggaaactcctcaccaggagagccaaagacagggttgtgccttaccccaggagccacccctgtaccccccttgccctgccattcaccctccacccctacccctgggcggcctgctgctttttccttctcttcctcccctgccctgagctgcatggttcccccaccctgggcagccaggaaggaatctgaatggagaatcaccaaccaccagagaaaaaagactgtggggccctcccctgccaactccccttccctggccgcccactcaacccacacctctttcacgcaggacaggctgcccaccctgtccacgtgaagtgccaacgccctccccaccctgggccgagcccccacccctccctgggcccccaagtgagattgcacatttaactactgtaaggagaggagcggcgttggcaaatgtgaaccatgagaatatcagtgatactgatgagaataaactaaacgcctttgtaacagc

SEQ ID NO: 27393 - protein, 117 aa, Homo sapiens
MAQTLQMEIPNFGNSILECLNEQRLQGLYCDVSVVVKGHAFKAHRAVLAASSSYFRDLFNNSRSAVVELPAAVQPQSFQQILSFCYTGQPLLDPCNLIWRPSPRWDQQPRRPTGGPS

SEQ ID NO: 27394 - DNA, 340 bp, Homo sapiens
tgagtttgagctcctgggcggagatttttgttgccttgtaactgggattcctagatccagcctccaccctctgattgccctaaggaggttttggggttttgttttgttttgtttgtgttttcgtaggatggtggcagtgattttgaggaggggaagaggaaggaagatacaagcaagggaagtcacaggctgtggtgcctaggcagaccctggtttgaatcttggccttaccactttttgcatgtaagtggtaggggcagcagatagctcaggacatatcttgggtttttttgtttgtttttgttttgagacatagtctcactctgttgcagtgagccga

SEQ ID NO: 27395 - protein, 46 aa, Homo sapiens
DGGSDFEEGKRKEDTSKGSHRLWCLGRPWFESWPYHFLHVSGRGSR

SEQ ID NO: 27396 - DNA, 1246 bp, Homo sapiens
ttctcaggacccctcccaccacctcccagtgcttccacgtctccaaaagcgccttcctgtcaccctcgtctatccctgcgcctgggggctggggtaggcgaggccgtggggactacccattttatagctggggaaacaggctccgagaaattgcacaaccgacctcaggtggccggcagtggcgtgcctggtgccctttctcctcttccgcctctgttgctccctttggtcctctggggcctcagagaggcaggtcctaaaggagggggggtctcctgggggcagaccgagggtctcggaggatagaatgagaggtttccagggctggcagagtgtgtgcgtgtgtgtgtgcagaagttttgctttcaaacaaatgaagatacaagaggcagtaggacctgggttggaacccaggggagcagactggggggctgttgcccctccctccatctccccacacccaccccaccccacagcagggctcctggcccccacccccctgtacataatttttaaaacctttttttagcgaatgaaatattgaagtataagattccttttatttttcaaaccaatggggctgtgtctattgtccccctcggtccccaggggtggggggccttggaaggcagggcggtgttggggggctggggggcaggctgaatgtgtgtgtgtgggtgtgtatgtgtggagtgtgtgtgtgtgtttccatggtaggactccagtcccagctgctgcctaggctcctgtgggtcctgtgggtccccctcccctgttcaccttccccaacagggctatagtttaagggtgtcccaggccttggctggttggctgggcccagctcctgggggctgggcagggcagggcagggccgggtccacttccattgttagcagttgtttgcagaattttctcttttaccattcctctctttttgttctcgcccagagtgggtggttttttgttgttgttttagattttcatgtgaaggcagttttttttcttttttaactccccatccccctatgcagggtgtcatttcaccatccacatccacatccttgtttgtgtttctggccctcgtcctccctgcctctcatctgcctccccaacccccacccctccctgggcccccaagtgagattgcacatttaactactgtaaggagaggagcggcgttggcaaatgtgaaccatgagaatatcagtgatactgatgagaataaactaaacgcctttgtaacagc

SEQ ID NO: 27397 - protein, 72 aa, Homo sapiens
MQGVISPSTSTSLFVFLALVLPASHLPPQPPPLPGPPSEIAHLTTVRRGAALANVNHENISDTDENKLNAFV

SEQ ID NO: 27398 - DNA, 1584 bp, Homo sapiens
ccccctgtacataatttttaaaacctttttttagcgaatgaaatattgaagtataagattccttttatttttcaaaccaatggggctgtgtctattgtccccctcggtccccaggggtggggggccttggaaggcagggcggtgttggggggctggggggcaggctgaatgtgtgtgtgtgggtgtgtatgtgtggagtgtgtgtgtgtgtttccatggtaggactccagtcccagctgctgcctaggctcctgtgggtcctgtgggtccccctcccctgttcaccttccccaacagggctatagtttaagggtgtcccaggccttggctggttggctgggcccagctcctgggggctgggcagggcagggcagggccgggtccacttccattgttagcagttgtttgcagaattttctcttttaccattcctctctttttgttctcgcccagagtgggtggttttttgttgttgttttagattttcatgtgaaggcagttttttttcttttttaactccccatccccctatgcagggtgtcatttcaccatccacatccacatccttgtttgtgtttctggccctcgtcctccctgcctctcatctgcctccccaacccccacctacccactgctcccaggggtctctccaggggcagggggattttaggagatggggtgggggccagcccctactggacccttgtaatctgatttggagaccatccccccgatgggaccagcagccccgccggcccactgggggtccctcttaacatctgcttgttgcgggggtcagtcatgagtgccagggtctggctggggtcttggcactgtcttcctggccggggcctgaaaccttagcccccagccggcctgagtgggggatattgacacccccagccccttgtcctgggtaggcccctgcctgcccctctctgccttttcctcgggtgtccctcctcgagcccctgtggcattggcttgggtggcagagcccacttgtttcagggaccccaggaggtgccccctggctcccaggactgtgtgtgggtccggggggtgggggggtggggagaagggtcgggcagggggtgcaggggaggaaactcctcaccaggagagccaaagacagggttgtgccttaccccaggagccacccctgtaccccccttgccctgccattcaccctccacccctacccctgggcggcctgctgctttttccttctcttcctcccctgccctgagctgcatggttcccccaccctgggcagccaggaaggaatctgaatggagaatcaccaaccaccagagaaaaaagactgtggggccctcccctgccaactccccttccctggccgcccactcaacccacacctctttcacgcaggacaggctgcccaccctgtccacgtgaagtgccaacgccctccccaccctgggccgagcccccacccctccctgggcccccaagtgagattgcacatttaactactgtaaggagaggagcggcgttggcaaatgtgaaccatgagaatatcagtgatactgatgagaataaactaaacgcctttgtaacagc

SEQ ID NO: 27399 - protein, 81 aa, Homo sapiens
MQGVISPSTSTSLFVFLALVLPASHLPPQPPPTHCSQGSLQGQGDFRRWGGGQPLLDPCNLIWRPSPRWDQQPRRPTGGPS

SEQ ID NO: 27400 - DNA, 1630 bp, Homo sapiens
ccccctgtacataatttttaaaacctttttttagcgaatgaaatattgaagtataagattccttttatttttcaaaccaatggggctgtgtctattgtccccctcggtccccaggggtggggggccttggaaggcagggcggtgttggggggctggggggcaggctgaatgtgtgtgtgtgggtgtgtatgtgtggagtgtgtgtgtgtgtttccatggtaggactccagtcccagctgctgcctaggctcctgtgggtcctgtgggtccccctcccctgttcaccttccccaacagggctatagtttaagggtgtcccaggccttggctggttggctgggcccagctcctgggggctgggcagggcagggcagggccgggtccacttccattgttagcagttgtttgcagaattttctcttttaccattcctctctttttgttctcgcccagagtgggtggttttttgttgttgttttagattttcatgtgaaggcagttttttttcttttttaactccccatccccctatgcagggtgtcatttcaccatccacatccacatccttgtttgtgtttctggccctcgtcctccctgcctctcatctgcctccccaacccccacctacccactgctcccaggggtctctccaggggcagggggattttaggagatggggtgggggccagcccctactggacccttgtaatctgatttggagaccatccccccgatgggaccagcagccccgccggcccactgggggtccctcttaacatctgcttgttgcgggggtcagtcatgagtgccagggtctggctggggtcttggcactgtcttcctgaccggggctccagccagacccctgaaaggaaggtgctcccccacttccaggccttagttggggtgggggggccagctcctgggcctggggtcttctcacccccacccccttgtcctgggtaggcccctgcctgcccctctctgccttttcctcgggtgtccctcctcgagcccctgtggcattggcttgggtggcagagcccacttgtttcagggaccccaggaggtgccccctggctcccaggactgtgtgtgggtccggggggtgggggggtggggagaagggtcgggcagggggtgcaggggaggaaactcctcaccaggagagccaaagacagggttgtgccttaccccaggagccacccctgtaccccccttgccctgccattcaccctccacccctacccctgggcggcctgctgctttttccttctcttcctcccctgccctgagctgcatggttcccccaccctgggcagccaggaaggaatctgaatggagaatcaccaaccaccagagaaaaaagactgtggggccctcccctgccaactccccttccctggccgcccactcaacccacacctctttcacgcaggacaggctgcccaccctgtccacgtgaagtgccaacgccctccccaccctgggccgagcccccacccctccctgggcccccaagtgagattgcacatttaactactgtaaggagaggagcggcgttggcaaatgtgaaccatgagaatatcagtgatactgatgagaataaactaaacgcctttgtaacagc

SEQ ID NO: 27401 - protein, 54 aa, Homo sapiens
MSARVWLGSWHCLPDRGSSQTPERKVLPHFQALVGVGGPAPGPGVFSPPPPCPG

SEQ ID NO: 27402 - DNA, 1055 bp, Homo sapiens
ccccctgtacataatttttaaaacctttttttagcgaatgaaatattgaagtataagattccttttatttttcaaaccaatggggctgtgtctattgtccccctcggtccccaggggtggggggccttggaaggcagggcggtgttggggggctggggggcaggctgaatgtgtgtgtgtgggtgtgtatgtgtggagtgtgtgtgtgtgtttccatggtaggactccagtcccagctgctgcctaggctcctgtgggtcctgtgggtccccctcccctgttcaccttccccaacagggctatagtttaagggtgtcccaggccttggctggttggctgggcccagctcctgggggctgggcagggcagggcagggccgggtccacttccattgttagcagttgtttgcagaattttctcttttaccattcctctctttttgttctcgcccagagtgggtggttttttgttgttgttttagattttcatgtgaaggcagttttttttcttttttaactccccatccccctatgcagggtgtcatttcaccatccacatccacatccttgtttgtgtttctggccctcgtcctccctgcctctcatctgcctccccaacccccacctacccactgctcccaggggtctctccaggggcagggggattttaggagatggggtgggggccagcccctactggacccttgtaatctgatttggagaccatccccccgatgggaccagcagccccgccggcccactgggggtccctcttaacatctgcttgttgcgggggtcagtcatgagtgccagggtctggctggggtcttggcactgtcttcctggccggggcctgaaaccttagcccccagccggcctgagtgggggatattgacacccccagctaaagcacaagcaccttagtcacccctcctctccccccgcaagtgagattgcacatttaactactgtaaggagaggagcggcgttggcaaatgtgaaccatgagaatatcagtgatactgatgagaataaactaaacgcctttgtaacagc

SEQ ID NO: 27403 - protein, 81 aa, Homo sapiens; identical to SEQ ID NO: 27399

SEQ ID NO: 27404 - DNA, 1526 bp, Homo sapiens
tgtctattgtccccctcggtccccaggggtggggggccttggaaggcagggcggtgttggggggctggggggcaggctgaatgtgtgtgtgtgggtgtgtatgtgtggagtgtgtgtgtgtgtttccatggtaggactccagtcccagctgctgcctaggctcctgtgggtcctgtgggtccccctcccctgttcaccttccccaacagggctatagtttaagggtgtcccaggccttggctggttggctgggcccagctcctgggggctgggcagggcagggcagggccgggtccacttccattgttagcagttgtttgcagaattttctcttttaccattcctctctttttgttctcgcccagagtgggtggttttttgttgttgttttagattttcatgtgaaggcagttttttttcttttttaactccccatccccctatgcagggtgtcatttcaccatccacatccacatccttgtttgtgtttctggccctcgtcctccctgcctctcatctgcctccccaacccccacctacccactgctcccaggggtctctccaggggcagggggattttaggagatggggtgggggccagcccctactggacccttgtaatctgatttggagaccatccccccgatgggaccagcagccccgccggcccactgggggtccctcttaacatctgcttgttgcgggggtcagtcatgagtgccagggtctggctggggtcttggcactgtcttcctggccggggcctgaaaccttagcccccagccggcctgagtgggggatattgacacccccagctaaagcacaagcaccttagtcacccctcctctccccccgcctcctggcccctgcctgcccctctctgccttttcctcgggtgtccctcctcgagcccctgtggcattggcttgggtggcagagcccacttgtttcagggaccccaggaggtgccccctggctcccaggactgtgtgtgggtccggggggtgggggggtggggagaagggtcgggcagggggtgcaggggaggaaactcctcaccaggagagccaaagacagggttgtgccttaccccaggagccacccctgtaccccccttgccctgccattcaccctccacccctacccctgggcggcctgctgctttttccttctcttcctcccctgccctgagctgcatggttcccccaccctgggcagccaggaaggaatctgaatggagaatcaccaaccaccagagaaaaaagactgtggggccctcccctgccaactccccttccctggccgcccactcaacccacacctctttcacgcaggacaggctgcccaccctgtccacgtgaagtgccaacgccctccccaccctgggccgagcccccacccctccctgggcccccaagtgagattgcacatttaactactgtaaggagaggagcggcgttggcaaatgtgaaccatgagaatatcagtgatactgatgagaataaactaaacgcctttgtaacagc

SEQ ID NO: 27405 - protein, 81 aa, Homo sapiens; identical to SEQ ID NO: 27399

SEQ ID NO: 27406 - DNA, 426 bp, Homo sapiens
caatccgaggaactgggccttgaaccgaaattccgaactcggacccgaataggcccagacagaactccgacaccgccccctacggtgcggcacgagagggctaaggggcgggggcatgtgcaccggaagctgcctctgcccacaaccaagatggctgaggagagggcggaagtgtccgcacgtcgggcctccgaggcttctcttttgtccccatggctctcccctagagccagtgggacccttcaggaccctgggctggaaccaccaccactggtcctgtctcaagtgcacttagggggtggtggaggcagggacacctgagacacacctgtctccatttccagttccaggaccccaaagccatttgcccctgtgccttatacacgtgccaacctggaaataaaatgtcagccttttttatacgta

SEQ ID NO: 27407 - protein, 59 aa, Homo sapiens
MCTGSCLCPQPRWLRRGRKCPHVGPPRLLFCPHGSPLEPVGPFRTLGWNHHHWSCLKCT

SEQ ID NO: 27408 - DNA, 1801 bp, Homo sapiens
ggcagaactccccggaggagcaggcccgctcctcaccgcgcccccgcagggagaagggaggaccacctctcccccagaccctagccaaacctgacactcgggaccctgggatgggacgatctcccaggtgccagctcagggagtccatgaaaagcttcaacgaatcgaatgagccccttccccagccataatacccagccgccagagatgagggaggctatcattatttacattgcccgtgcctggaagggaaactgaagttgcgcaggaacaatccgaggaactgggccttgaaccgaaattccgaactcggacccgaataggcccagacagaactccgacaccgccccctacggtgcggcacgagagggctaaggggcgggggcatgtgcaccggaagctgcctctgcccacaaccaagatggctgaggagagggcggaagtgtccgcacgtcgggcctccgaggcttctctttctcccctggcggtccggctctcgatggtggcgtgacgggggcgggggtggcggcgcgttctcctcggttgggagggaaccagcccgcgaacccaggccgggaggggggttcggcctgggggggaagggactgacatgtctctcgaagaccccttttttgtagtccgaggcgaggtgcagaaggcggtgaacacggcccgcgggctgtaccagcgctggtgcgagctcctgcaggaaagcgcggcggtcggacgcgaggagctggactggacgaccaatgagctgcggaatggcctgcgcagcatcgagtgggacctcgaggacctggaagagaccatcgatatctggaagccaacccaggcaagttcaagctcccagccggggacctgcaggagagaaaggtgttcgtggagcggatgcgagaggcagtccaggaaatgaaggaccatatggtcagcccaacagccgtagcatttttggagaggaataacagagagatactcgcaggcaagccagctgcccagaagtcacccagcgacctgctggatgccagcgcagtctcggccacatctcgctacatcgaggagcagcaggccacacagcagctgatcatggatgaacaggatcaacagctggagatggtgtctgggagcatccaggttctgaagcacatgtccggccgcgttggagaagagctggacgagcagggcatcatgctggatgccttcgcccaagagatggaccacacccagtcccgcatggacggggtcctcaggaagttggccaaagtatcccacatgacgagtggtgagtcccctcaggggaggggtcagtcctggtgggggcaggttgtaggtggtaccctctccccgtgacccctgaccttctcgttcccagaccgccgacagtggtgtgccatcgccgtgctagtgggggtgcttctcctcgttctcatcttactattctctctctgaccccagccctccctggcaggctggtcccttaagcctggggagccaccaagcactttggagctggcctcgccccctaggaggagagggtccctcctgggtagctggagagtagagggtcccgcctggggagctgtccccatggctctcccctagagccagtgggacccttcaggaccctgggctggaaccaccaccactggtcctgtctcaagtgcacttagggggtggtggaggcagggacacctgagacacacctgtctccatttccagttccaggaccccaaagccatttgcccctgtgccttatacacgtgccaacctggaaataaaatgtcagccttttttatacgta

SEQ ID NO: 27409 - protein, 152 aa, Homo sapiens
MREAVQEMKDHMVSPTAVAFLERNNREILAGKPAAQKSPSDLLDASAVSATSRYIEEQQATQQLIMDEQDQQLEMVSGSIQVLKHMSGRVGEELDEQGIMLDAFAQEMDHTQSRMDGVLRKLAKVSHMTSGESPQGRGQSWWGQVVGGTLSP

SEQ ID NO: 27410 - DNA, 1564 bp, Homo sapiens
ggcagaactccccggaggagcaggcccgctcctcaccgcgcccccgcagggagaagggaggaccacctctcccccagaccctagccaaacctgacactcgggaccctgggatgggacgatctcccaggtgccagctcagggagtccatgaaaagcttcaacgaatcgaatgagccccttccccagccataatacccagccgccagagatgagggaggctatcattatttacattgcccgtgcctggaagggaaactgaagttgcgcaggaacaatccgaggaactgggccttgaaccgaaattccgaactcggacccgaataggcccagacagaactccgacaccgccccctacggtgcggcacgagagggctaaggggcgggggcatgtgcaccggaagctgcctctgcccacaaccaagatggctgaggagagggcggaagtgtccgcacgtcgggcctccgaggcttctctttctcccctggcggtccggctctcgatggtggcgtgacgggggcgggggtggcggcgcgttctcctcggttgggagggaaccagcccgcgaacccaggccgggaggggggttcggcctgggggggaagggactgacatgtctctcgaagaccccttttttgtagtccgaggcgaggtgcagaaggcggtgaacacggcccgcgggctgtaccagcgctggtgcgagctcctgcaggaaagcgcggcggtcggacgcgaggagctggactggacgaccaatgagctgcggaatggcctgcgcagcatcgagtgggacctcgaggacctggaagagaccatcgatatctggaagccaacccaggcaagccagctgcccagaagtcacccagcgacctgctggatgccagcgcagtctcggccacatctcgctacatcgaggagcagcaggccacacagcagctgatcatggatgaacaggatcaacagctggagatggtgtctgggagcatccaggttctgaagcacatgtccggccgcgttggagaagagctggacgagcagggcatcatgctggatgccttcgcccaagagatggaccacacccagtcccgcatggacggggtcctcaggaagttggccaaagtatcccacatgacgagtgaccgccgacagtggtgtgccatcgccgtgctagtgggggtgcttctcctcgttctcatcttactattctctctctgaccccagccctccctggcaggctggtcccttaagcctggggagccaccaagcactttggagctggcctcgccccctaggaggagagggtccctcctgggtagctggagagtagagggtcccgcctggggagctgtccccatggctctcccctagagccagtgggacccttcaggaccctgggctggaaccaccaccactggtcctgtctcaagtgcacttagggggtggtggaggcagggacacctgagacacacctgtctccatttccagttccaggaccccaaagccatttgcccctgtgccttatacacgtgccaacctggaaataaaatgtcagccttttttatacgta

SEQ ID NO: 27411 - protein, 108 aa, Homo sapiens
MSLEDPFFVVRGEVQKAVNTARGLYQRWCELLQESAAVGREELDWTTNELRNGLRSIEWDLEDLEETIDIWKPTQASQLPRSHPATCWMPAQSRPHLATSRSSRPHSS

SEQ ID NO: 27412 - DNA, 2042 bp, Homo sapiens
ggcagaactccccggaggagcaggcccgctcctcaccgcgcccccgcagggagaagggaggaccacctctcccccagaccctagccaaacctgacactcgggaccctgggatgggacgatctcccaggtgccagctcagggagtccatgaaaagcttcaacgaatcgaatgagccccttccccagccataatacccagccgccagagatgagggaggctatcattatttacattgcccgtgcctggaagggaaactgaagttgcgcaggaacaatccgaggaactgggccttgaaccgaaattccgaactcggacccgaataggcccagacagaactccgacaccgccccctacggtgcggcacgagagggctaaggggcgggggcatgtgcaccggaagctgcctctgcccacaaccaagatggctgaggagagggcggaagtgtccgcacgtcgggcctccgaggcttctctttctcccctggcggtccggctctcgatggtggcgtgacgggggcgggggtggcggcgcgttctcctcggttgggagggaaccagcccgcgaacccaggccgggaggggggttcggcctgggggggaagggactgacatgtctctcgaagaccccttttttgtagtccgagggtgagtgacaacgacgggggagggcggagggtgctctgtacccaagccagccagtgcccgggtgccggccccagcgtgcccggcgggctgggcaaggccgtcggggtgcagagtgggaggcgcacgcaggggtatataggggtctccggagtcccccatgcgtttgggtttgcagtcgggggcagaggcaggcgggaggaccgcctgcccccagccgcgcccgccgtgcccctgcccgcagcgaggtgcagaaggcggtgaacacggcccgcgggctgtaccagcgctggtgcgagctcctgcaggaaagcgcggcggtcggacgcgaggagctggactggacgaccaatgagctgcggaatggcctgcgcagcatcgagtgggacctcgaggacctggaagagaccatcgatatctggaagccaacccaggcaagttcaagctcccagccggggacctgcaggagagaaaggtgttcgtggagcggatgcgagaggcagtccaggaaatgaaggaccatatggtcagcccaacagccgtagcatttttggagaggaataacagagagatactcgcaggcaagccagctgcccagaagtcacccagcgacctgctggatgccagcgcagtctcggccacatctcgctacatcgaggagcagcaggccacacagcagctgatcatggatgaacaggatcaacagctggagatggtgtctgggagcatccaggttctgaagcacatgtccggccgcgttggagaagagctggacgagcagggcatcatgctggatgccttcgcccaagagatggaccacacccagtcccgcatggacggggtcctcaggaagttggccaaagtatcccacatgacgagtggtgagtcccctcaggggaggggtcagtcctggtgggggcaggttgtaggtggtaccctctccccgtgacccctgaccttctcgttcccagaccgccgacagtggtgtgccatcgccgtgctagtgggggtgcttctcctcgttctcatcttactattctctctctgaccccagccctccctggcaggctggtcccttaagcctggggagccaccaagcactttggagctggcctcgccccctaggaggagagggtccctcctgggtagctggagagtagagggtcccgcctggggagctgtccccatggctctcccctagagccagtgggacccttcaggaccctgggctggaaccaccaccactggtcctgtctcaagtgcacttagggggtggtggaggcagggacacctgagacacacctgtctccatttccagttccaggaccccaaagccatttgcccctgtgccttatacacgtgccaacctggaaataaaatgtcagccttttttatacgta

SEQ ID NO: 27413 - protein, 152 aa, Homo sapiens; identical to SEQ ID NO: 27409

SEQ ID NO: 27414 - DNA, 1711 bp, Homo sapiens
ggcagaactccccggaggagcaggcccgctcctcaccgcgcccccgcagggagaagggaggaccacctctcccccagaccctagccaaacctgacactcgggaccctgggatgggacgatctcccaggtgccagctcagggagtccatgaaaagcttcaacgaatcgaatgagccccttccccagccataatacccagccgccagagatgagggaggctatcattatttacattgcccgtgcctggaagggaaactgaagttgcgcaggaacaatccgaggaactgggccttgaaccgaaattccgaactcggacccgaataggcccagacagaactccgacaccgccccctacggtgcggcacgagagggctaaggggcgggggcatgtgcaccggaagctgcctctgcccacaaccaagatggctgaggagagggcggaagtgtccgcacgtcgggcctccgaggcttctctttctcccctggcggtccggctctcgatggtggcgtgacgggggcgggggtggcggcgcgttctcctcggttgggagggaaccagcccgcgaacccaggccgggaggggggttcggcctgggggggaagggactgacatgtctctcgaagaccccttttttgtagtccgaggcgaggtgcagaaggcggtgaacacggcccgcgggctgtaccagcgctggtgcgagctcctgcaggaaagcgcggcggtcggacgcgaggagctggactggacgaccaatgagctgcggaatggcctgcgcagcatcgagtgggacctcgaggacctggaagagaccatcgatatctggaagccaacccaggcaagttcaagctcccagccggggacctgcaggagagaaaggtgttcgtggagcggatgcgagaggcagtccaggaaatgaaggaccatatggtcagcccaacagccgtagcatttttggagaggaataacagagagatactcgcaggcaagccagctgcccagaagtcacccagcgacctgctggatgccagcgcagtctcggccacatctcgctacatcgaggagcagcaggccacacagcagctgatcatggatgaacaggatcaacagctggagatggtgtctgggagcatccaggttctgaagcacatgtccggccgcgttggagaagagctggacgagcagggcatcatgctggatgccttcgcccaagagatggaccacacccagtcccgcatggacggggtcctcaggaagttggccaaagtatcccacatgacgagtgaccgccgacagtggtgtgccatcgccgtgctagtgggggtgcttctcctcgttctcatcttactattctctctctgaccccagccctccctggcaggctggtcccttaagcctggggagccaccaagcactttggagctggcctcgccccctaggaggagagggtccctcctgggtagctggagagtagagggtcccgcctggggagctgtccccatggctctcccctagagccagtgggacccttcaggaccctgggctggaaccaccaccactggtcctgtctcaagtgcacttagggggtggtggaggcagggacacctgagacacacctgtctccatttccagttccaggaccccaaagccatttgcccctgtgccttatacacgtgccaacctggaaataaaatgtcagccttttttatacgta

SEQ ID NO: 27415 - protein, 155 aa, Homo sapiens
MREAVQEMKDHMVSPTAVAFLERNNREILAGKPAAQKSPSDLLDASAVSATSRYIEEQQATQQLIMDEQDQQLEMVSGSIQVLKHMSGRVGEELDEQGIMLDAFAQEMDHTQSRMDGVLRKLAKVSHMTSDRRQWCAIAVLVGVLLLVLILLFSL

SEQ ID NO: 27416 - DNA, 1952 bp, Homo sapiens
ggcagaactccccggaggagcaggcccgctcctcaccgcgcccccgcagggagaagggaggaccacctctcccccagaccctagccaaacctgacactcgggaccctgggatgggacgatctcccaggtgccagctcagggagtccatgaaaagcttcaacgaatcgaatgagccccttccccagccataatacccagccgccagagatgagggaggctatcattatttacattgcccgtgcctggaagggaaactgaagttgcgcaggaacaatccgaggaactgggccttgaaccgaaattccgaactcggacccgaataggcccagacagaactccgacaccgccccctacggtgcggcacgagagggctaaggggcgggggcatgtgcaccggaagctgcctctgcccacaaccaagatggctgaggagagggcggaagtgtccgcacgtcgggcctccgaggcttctctttctcccctggcggtccggctctcgatggtggcgtgacgggggcgggggtggcggcgcgttctcctcggttgggagggaaccagcccgcgaacccaggccgggaggggggttcggcctgggggggaagggactgacatgtctctcgaagaccccttttttgtagtccgagggtgagtgacaacgacgggggagggcggagggtgctctgtacccaagccagccagtgcccgggtgccggccccagcgtgcccggcgggctgggcaaggccgtcggggtgcagagtgggaggcgcacgcaggggtatataggggtctccggagtcccccatgcgtttgggtttgcagtcgggggcagaggcaggcgggaggaccgcctgcccccagccgcgcccgccgtgcccctgcccgcagcgaggtgcagaaggcggtgaacacggcccgcgggctgtaccagcgctggtgcgagctcctgcaggaaagcgcggcggtcggacgcgaggagctggactggacgaccaatgagctgcggaatggcctgcgcagcatcgagtgggacctcgaggacctggaagagaccatcgatatctggaagccaacccaggcaagttcaagctcccagccggggacctgcaggagagaaaggtgttcgtggagcggatgcgagaggcagtccaggaaatgaaggaccatatggtcagcccaacagccgtagcatttttggagaggaataacagagagatactcgcaggcaagccagctgcccagaagtcacccagcgacctgctggatgccagcgcagtctcggccacatctcgctacatcgaggagcagcaggccacacagcagctgatcatggatgaacaggatcaacagctggagatggtgtctgggagcatccaggttctgaagcacatgtccggccgcgttggagaagagctggacgagcagggcatcatgctggatgccttcgcccaagagatggaccacacccagtcccgcatggacggggtcctcaggaagttggccaaagtatcccacatgacgagtgaccgccgacagtggtgtgccatcgccgtgctagtgggggtgcttctcctcgttctcatcttactattctctctctgaccccagccctccctggcaggctggtcccttaagcctggggagccaccaagcactttggagctggcctcgccccctaggaggagagggtccctcctgggtagctggagagtagagggtcccgcctggggagctgtccccatggctctcccctagagccagtgggacccttcaggaccctgggctggaaccaccaccactggtcctgtctcaagtgcacttagggggtggtggaggcagggacacctgagacacacctgtctccatttccagttccaggaccccaaagccatttgcccctgtgccttatacacgtgccaacctggaaataaaatgtcagccttttttatacgta

SEQ ID NO: 27417 - protein, 155 aa, Homo sapiens; identical to SEQ ID NO: 27415

SEQ ID NO: 27418 - DNA, 369 bp, Homo sapiens
acacacacacggcaggcacattacagaggaaactagcagatattaggatatgaggggggaaaatgcagatacactcagaggccaagtgcacgcacccaaataggttaggtgcatgcacagatgaaaaggcgggggcggatcacctgaggtagggagtttgagaccagcctggccaacatggggaaaccctgtctctactaaaaacacaaaaattagctgggcatggtggcacactcctgttgtcccagctacccaggaggctgaggcaggagaattgcttgaacccggaaggtggaggtttcagtgagtcaagattgcaccactgcaccccagcctgggcgacagagcaacactccgtctcaaaaaaaa

SEQ ID NO: 27419 - protein, 68 aa, Homo sapiens
DQPGQHGETLSLLKTQKLAGHGGTLLLSQLPRRLRQENCLNPEGGGFSESRLHHCTPAWATEQHSVSK

SEQ ID NO: 27420 - DNA, 1953 bp, Homo sapiens
ctctcgtgccgcaccgtagggggcggtgtcggagttctgtctgggcctattcgggtccgagttcggaatttcggttcaaggcccagttcctcggattgttcctgcgcaacttcagtttcccttccaggcacgggcaatagaggcgtgagcgagcccgttgtccggagtgcacctgctgcctgttctgtccctcccgggagcccccgccgctgtcgccgtcgagtcgccatggaagtgcagaaagaggcacagcgcatcatgaccctgtcggtgtggaagatgtatcactcccgcatgcagcgcggtggcctgcggctgcaccggagtctgcagctgtcgctggtcatgcgcagcgcccgggagctctacctctcggccaaggtggaggccctcgagcccgaggtgtcgttgccggccgccctcccctctgaccctcgcctgcacccgccccgagaagccgagtccacggccgagacagcgacccccgacggtgagcacccgtttccggagccaatggacacgcaggaggcgccgacagccgaggagacctccgcctgctgtgccccgcgccccgccaaagtcagccgcaaacgacgcagcagcagcctgagcgacggcggggacgctggactggtcccgagcaagaaagcccgtctggaagaaaaggaagaagaggagggagcgtcatccgaagtcgccgatcgcctgcagccccctccggcgcaagcggagggcgcctttcccaacctggcccgcgtcctgcagaggcgcttctccggcctcctgaactgcagccccgcggcccctccgacggcgccgcccgcgtgcgaggcaaagcccgcttgccgcccggcggacagcatgctcaacgtgctcgtgcgggccgtggtggccttctgaggaccccgagcggcgctgccggagcccagagcgcgcgtcgaaccgtcggcccgagggcgcagacctgaggcgaggccacccccctccatcctgggggaagcgcccgcgaaaaccgtggagagaagccgccgcccgggctgctgagaggcccggagagggactctgtccccggggagccatcgccttcagtgtgcagggacggcaccgaggagtctgagccgggggcgcgggcgccttccgcagagacctgcgcccacaggtgctgtcttagtggactgggacgtgaacctttcgctctccttctggactgggagaagggaggcttgggtgttgtgttttttgttttgtttgtttgtttgtttttaaagatctcctcagggtcggacttcattttgtactgtgggctgtgctggccctttcaaggtttttcaagagttggttttgcgtttccaacctcggagaattccaggcactccccttccccctccgctgacatacttgtataagcggtcatcgttgcgtcatggggcaggcgtggggagcttcctgtcgccttgcgtgggtgtggggcctgggaggaggtcctggggcgtgcacccgccctgggcagtggggaggagagtggcctgagttacttcacccccgcgtgctgctggttaatgtcccgcgtctctgcaccttcgggtgggagcggggactgatctactttcacattctcaagtttttctcatctgcattagaggtgcccagtaggttcccaggttccagcgtgcccctccctcagacacacggacacaatcagccgagaagttcctggtctgaatcacgagaatgtggaggggtggggggtgtcagtggaaaggcataaggctgagctgagaccagttgctggtgaaactgggccaatctggggaggggaacatccttgccagggagtttctgagggtctgctttgtttacctttcgtgcggtggattctttttaactccgtctacctggcgttttgttagaaatgtcagataggaaaataaaaaccatttgagtaaaaaagcc

SEQ ID NO: 27421 - protein, 223 aa, Homo sapiens; identical to SEQ ID NO: 3719

SEQ ID NO: 27422 - DNA, 2093 bp, Homo sapiens
ccgtagggggcggtgtcggagttctgtctgggcctattcgggtccgagttcggaatttcggttcaaggcccagttcctcggattgttcctgcgcaacttcagtttcccttccaggcacgggcaatgagtgtttggccgcgacgagttggaaagcccggatgcgtccttcggttgggcggggtgtctcagtgacgtcactgggggtataaaagggcctgggtggcgggcgcctgggcagagcgtcctagcagtgtcactgcgtgggttggtttgtgtagagaggcgtgagcgagcccgttgtccggagtgcacctgctgcctgttctgtccctcccgggagcccccgccgctgtcgccgtcgagtcgccatggaagtgcagaaagaggcacagcgcatcatgaccctgtcggtgtggaagatgtatcactcccgcatgcagcgcggtggcctgcggctgcaccggagtctgcagctgtcgctggtcatgcgcagcgcccgggagctctacctctcggccaaggtggaggccctcgagcccgaggtgtcgttgccggccgccctcccctctgaccctcgcctgcacccgccccgagaagccgagtccacggccgagacagcgacccccgacggtgagcacccgtttccggagccaatggacacgcaggaggcgccgacagccgaggagacctccgcctgctgtgccccgcgccccgccaaagtcagccgcaaacgacgcagcagcagcctgagcgacggcggggacgctggactggtcccgagcaagaaagcccgtctggaagaaaaggaagaagaggagggagcgtcatccgaagtcgccgatcgcctgcagccccctccggcgcaagcggagggcgcctttcccaacctggcccgcgtcctgcagaggcgcttctccggcctcctgaactgcagccccgcggcccctccgacggcgccgcccgcgtgcgaggcaaagcccgcttgccgcccggcggacagcatgctcaacgtgctcgtgcgggccgtggtggccttctgaggaccccgagcggcgctgccggagcccagagcgcgcgtcgaaccgtcggcccgagggcgcagacctgaggcgaggccacccccctccatcctgggggaagcgcccgcgaaaaccgtggagagaagccgccgcccgggctgctgagaggcccggagagggactctgtccccggggagccatcgccttcagtgtgcagggacggcaccgaggagtctgagccgggggcgcgggcgccttccgcagagacctgcgcccacaggtgctgtcttagtggactgggacgtgaacctttcgctctccttctggactgggagaagggaggcttgggtgttgtgttttttgttttgtttgtttgtttgtttttaaagatctcctcagggtcggacttcattttgtactgtgggctgtgctggccctttcaaggtttttcaagagttggttttgcgtttccaacctcggagaattccaggcactccccttccccctccgctgacatacttgtataagcggtcatcgttgcgtcatggggcaggcgtggggagcttcctgtcgccttgcgtgggtgtggggcctgggaggaggtcctggggcgtgcacccgccctgggcagtggggaggagagtggcctgagttacttcacccccgcgtgctgctggttaatgtcccgcgtctctgcaccttcgggtgggagcggggactgatctactttcacattctcaagtttttctcatctgcattagaggtgcccagtaggttcccaggttccagcgtgcccctccctcagacacacggacacaatcagccgagaagttcctggtctgaatcacgagaatgtggaggggtggggggtgtcagtggaaaggcataaggctgagctgagaccagttgctggtgaaactgggccaatctggggaggggaacatccttgccagggagtttctgagggtctgctttgtttacctttcgtgcggtggattctttttaactccgtctacctggcgttttgttagaaatgtcagataggaaaataaaaaccatttgagtaaaaaagcc

SEQ ID NO: 27423 - protein, 223 aa, Homo sapiens; identical to SEQ ID NO: 3719

SEQ ID NO: 27424 - DNA, 1943 bp, Homo sapiens
gctcttaacctagcctggcacgttgtaagcgctgttagcatgattattggtgcagaaaacactcattagacacacctggtaaatgctaagaacagtggccacaggggatgttcaggctggaaccagggtcttcccctgtgtgaagggaaacttgctgcccacgacccactggggcctccagacgggagcatgtgggtaggccgtgagctccacccccggcccccctcccttgggccaaggcgctgatgcatcggcggggctcagagaaaggagcccacccagaaagctcagcgtggagtcgggggacgctcctcctcgccagggttcccgtcccctttccctgctgggtaaatcgcattctgtctctttaaggagtgtttggccgcgacgagttggaaagcccggatgcgtccttcggttgggcggggtgtctcagtgacgtcactgggggtataaaagggcctgggtggcgggcgcctgggcagagcgtcctagcagtgtcactgcgtgggttggtttgtgtagagaggcgtgagcgagcccgttgtccggagtgcacctgctgcctgttctgtccctcccgggagcccccgccgctgtcgccgtcgagtcgccatggaagtgcagaaagaggcacagcgcatcatgaccctgtcggtgtggaagatgtatcactcccgcatgcagcgcggtggcctgcggctgcaccggagtctgcagctgtcgctggtcatgcgcagcgcccgggagctctacctctcggccaaggtggaggccctcgagcccgaggtgtcgttgccggccgccctcccctctgaccctcgcctgcacccgccccgagaagccgagtccacggccgagacagcgacccccgacggtgagcacccgtttccggagccaatggacacgcaggaggcgccgacagccgaggagacctccgcctgctgtgccccgcgccccgccaaagtcagccgcaaacgacgcagcagcagcctgagcgacggcggggacgctggactggtcccgagcaagaaagcccgtctggaagaaaaggaagaagaggagggagcgtcatccgaagtcgccgatcgcctgcagccccctccggcgcaagcggagggcgccttccgcagagacctgcgcccacaggtgctgtcttagtggactgggacgtgaacctttcgctctccttctggactgggagaagggaggcttgggtgttgtgttttttgttttgtttgtttgtttgtttttaaagatctcctcagggtcggacttcattttgtactgtgggctgtgctggccctttcaaggtttttcaagagttggttttgcgtttccaacctcggagaattccaggcactccccttccccctccgctgacatacttgtataagcggtcatcgttgcgtcatggggcaggcgtggggagcttcctgtcgccttgcgtgggtgtggggcctgggaggaggtcctggggcgtgcacccgccctgggcagtggggaggagagtggcctgagttacttcacccccgcgtgctgctggttaatgtcccgcgtctctgcaccttcgggtgggagcggggactgatctactttcacattctcaagtttttctcatctgcattagaggtgcccagtaggttcccaggttccagcgtgcccctccctcagacacacggacacaatcagccgagaagttcctggtctgaatcacgagaatgtggaggggtggggggtgtcagtggaaaggcataaggctgagctgagaccagttgctggtgaaactgggccaatctggggaggggaacatccttgccagggagtttctgagggtctgctttgtttacctttcgtgcggtggattctttttaactccgtctacctggcgttttgttagaaatgtcagataggaaaataaaaaccatttgagtaaaaaagcc

SEQ ID NO: 27425 - protein, 181 aa, Homo sapiens
MEVQKEAQRIMTLSVWKMYHSRMQRGGLRLHRSLQLSLVMRSARELYLSAKVEALEPEVSLPAALPSDPRLHPPREAESTAETATPDGEHPFPEPMDTQEAPTAEETSACCAPRPAKVSRKRRSSSLSDGGDAGLVPSKKARLEEKEEEEGASSEVADRLQPPPAQAEGAFRRDLRPQVLS

SEQ ID NO: 27426 - DNA, 1844 bp, Homo sapiens
agcagtgtcactgcgtgggttggtttgtgtagagaggcgtgagcgagcccgttgtccggagtgcacctgctgcctgttctgtccctcccgggagcccccgccgctgtcgccgtcgagtcgccatggaagtgcagaaagaggcacagcgcatcatgaccctgtcggtgtggaagatgtatcactcccgcatgcagcgcggtggcctgcggctgcaccggagtctgcagctgtcgctggtcatgcgcagcgcccgggagctctacctctcggccaaggtggaggccctcgagcccgaggtgtcgttgccggccgccctcccctctgaccctcgcctgcacccgccccgagaagccgagtccacggccgagacagcgacccccgacggtgagcacccgtttccggagccaatggacacgcaggaggcgccgacagccgaggagacctccgcctgctgtgccccgcgccccgccaaagtcagccgcaaacgacgcagcagcagcctgagcgacggcggggacgctggactggtcccgagcaagaaagcccgtctggaagaaaaggaagaagaggagggagcgtcatccgaagtcgccgatcgcctgcagccccctccggcgcaagcggagggcgcctttcccaacctggcccgcgtcctgcagaggcgcttctccggcctcctgaactgcagccccgcggcccctccgacggcgccgcccgcgtgcgaggcaaagcccgcttgccgcccggcggacagcatgctcaacgtgctcgtgcgggccgtggtggccttctgaggaccccgagcggcgctgccggagcccagagcgcgcgtcgaaccgtcggcccgagggcgcagacctgaggcgaggccacccccctccatcctgggggaagcgcccgcgaaaaccgtggagagaagccgccgcccgggctgctgagaggcccggagagggactctgtccccggggagccatcgccttcagtgtgcagggacggcaccgaggagtctgagccgggggcgcgggcgccttccgcagagacctgcgcccacaggtgctgtcttagtggactgggacgtgaacctttcgctctccttctggactgggagaagggaggcttgggtgttgtgttttttgttttgtttgtttgtttgtttttaaagatctcctcagggtcggacttcattttgtactgtgggctgtgctggccctttcaaggtttttcaagagttggttttgcgtttccaacctcggagaattccaggcactccccttccccctccgctgacatacttgtataagcggtcatcgttgcgtcatggggcaggcgtggggagcttcctgtcgccttgcgtgggtgtggggcctgggaggaggtcctggggcgtgcacccgccctgggcagtggggaggagagtggcctgagttacttcacccccgcgtgctgctggttaatgtcccgcgtctctgcaccttcgggtgggagcggggactgatctactttcacattctcaagtttttctcatctgcattagaggtgcccagtaggttcccaggttccagcgtgcccctccctcagacacacggacacaatcagccgagaagttcctggtctgaatcacgagaatgtggaggggtggggggtgtcagtggaaaggcataaggctgagctgagaccagttgctggtgaaactgggccaatctggggaggggaacatccttgccagggagtttctgagggtctgctttgtttacctttcgtgcggtggattctttttaactccgtctacctggcgttttgttagaaatgtcagataggaaaataaaaaccatttgagtaaaaaa

SEQ ID NO: 27427 - protein, 223 aa, Homo sapiens; identical to SEQ ID NO: 3719

SEQ ID NO: 27428 - DNA, 461 bp, Homo sapiens
atgaccttgccaaggcaatggggtgactggaagggcctgaggattacagtgaaactgaccattcagaacagacaggcccagattgaggtggtgccttctgcctctgccctgatcattaaagccctcaaggaaccaccaagagacagaaagaaacagaaaaacattagacacaatgggaatatcacttttgatgagatcgtcaacattactcgacagatgtggcaccgatctttagccagagaactctctggaaccatcaaagagatcctggggactgcccagtctgtaggccgtaatgttgatggccgccaccctcgtgacatcatagatgacatcaacagtggccccctcccttcgccctggggcaacgcccacaaccccactcttaaacctacgtggggtatattgaaagggctttctcgtttcggggtggttattctagagctggggagtgacccaag

SEQ ID NO: 27429 - protein, 152 aa, Homo sapiens
MTLPRQWGDWKGLRITVKLTIQNRQAQIEVVPSASALIIKALKEPPRDRKKQKNIRHNGNITFDEIVNITRQMWHRSLARELSGTIKEILGTAQSVGRNVDGRHPRDIIDDINSGPLPSPWGNAHNPTLKPTWGILKGLSRFGVVILELGSD

SEQ ID NO: 27430 - DNA, 719 bp, Homo sapiens
gaaactttggtttctcacgacccggaaggcttgaagcaaacctgcaattactcactgcctggtctgtgcgggctgcagctctcagactcaggatgaggtggcggtaggtggggtggggctcttgggacccttttaccccttcgtgctgctggctgggggaggccactaaagtctgcgcgctgccttccacgcgttctccagacactttccaaatccctgcggacactaccttataaacagatactggaattttcaaagtactgtcatgctgtttgggaccagaaattccctcccatgagggttggatatgaagccagtttggagggggaagctgagggtgcatgcccctggatctaccaaagccttctcttcagtctgggaggttttttttctttttctttttcttttttgagacagagtctcactctgtcgcccaggctggagtgcagtggtgtgatctcagctcactacaacctccacctcccaggttcgaatgattctcctgcctcagcctcccgagtagctggacgacaggcgtgcgccaccacacctggctactttttgtatttatggtgaaaccctgactctactagaaatacaaaaattagctggtggtggtggcatgcacctgtagccccagctactcaggaggctgactcaggataatcaggaacccgggaggaggaggtttcattgctccagactttgagactccatct

SEQ ID NO: 27431 - protein, 93 aa, Homo sapiens [sequence omitted]

SEQ ID NO: 27432 - DNA, 4414 bp, Homo sapiens
ctcgacttcatagtggtcagtggggccctggtagcctttgccttcactggcaatagcaaaggaaaagacatcaacacgattaaatccctccgagtcctccgggtgctacgacctcttaaaaccatcaagcggctgccaaagctcaaggctgtgtttgactgtgtggtgaactcacttaaaaacgtcttcaacatcctcatcgtctacatgctattcatgttcatcttcgccgtggtggctgtgcagctcttcaaggggaaattcttccactgcactgacgagtccaaagagtttgagaaagattgtcgaggcaaatacctcctctacgagaagaatgaggtgaaggcgcgagaccgggagtggaagaagtatgaattccattacgacaatgtgctgtgggctctgctgaccctcttcaccgtgtccacgggagaaggctggccacaggtcctcaagcattcggtggacgccacctttgagaaccagggccccagccccgggtaccgcatggagatgtccattttctacgtcgtctactttgtggtgttccccttcttctttgtcaatatctttgtggccttgatcatcatcaccttccaggagcaaggggacaagatgatggaggaatacagcctggagaaaaatgagagggcctgcattgatttcgccatcagcgccaagccgctgacccgacacatgccgcagaacaagcagagcttccagtaccgcatgtggcagttcgtggtgtctccgcctttcgagtacacgatcatggccatgatcgccctcaacaccatcgtgcttatgatgaagttctatggggcttctgttgcttatgaaaatgccctgcgggtgttcaacatcgtcttcacctccctcttctctctggaatgtgtgctgaaagtcatggcttttgggattctgaattatttccgcgatgcctggaacatcttcgactttgtgactgttctgggcagcatcaccgatatcctcgtgactgagtttgggaataacttcatcaacctgagctttctccgcctcttccgagctgcccggctcatcaaacttctccgtcagggttacaccatccgcattcttctctggacctttgtgcagtccttcaaggccctgccttatgtctgtctgctgatcgccatgctcttcttcatctatgccatcattgggatgcaggtgtttggtaacattggcatcgacgtggaggacgaggacagtgatgaagatgagttccaaatcactgagcacaataacttccggaccttcttccaggccctcatgcttctcttccggagtgccaccggggaagcttggcacaacatcatgctttcctgcctcagcgggaaaccgtgtgataagaactctggcatcctgactcgagagtgtggcaatgaatttgcttatttttactttgtttccttcatcttcctctgctcgtttctgatgctgaatctctttgtcgccgtcatcatggacaactttgagtacctcacccgagactcctccatcctgggcccccaccacctggatgagtacgtgcgtgtctgggccgagtatgaccccgcagcttggggccgcatgccttacctggacatgtatcagatgctgagacacatgtctccgcccctgggtctggggaagaagtgtccggccagagtggcttacaagcggcttctgcggatggacctgcccgtcgcagatgacaacaccgtccacttcaattccaccctcatggctctgatccgcacagccctggacatcaagattgccaagggaggagccgacaaacagcagatggacgctgagctgcggaaggagatgatggcgatttggcccaatctgtcccagaagacgctagacctgctggtcacacctcacaagtccacggacctcaccgtggggaagatctacgcagccatgatgatcatggagtactaccggcagagcaaggccaagaagctgcaggccatgcgcgaggagcaggaccggacacccctcatgttccagcgcatggagcccccgtccccaacgcaggaagggggacctggccagaacgccctcccctccacccagctggacccaggaggagccctgatggctcacgaaagcggcctcaaggagagcccgtcctgggtgacccagcgtgcccaggagatgttccagaagacgggcacatggagtccggaacaaggcccccctaccgacatgcccaacagccagcctaactctcagtccgtggagatgcgagagatgggcagagatggctactccgacagcgagcactacctccccatggaaggccagggccgggctgcctccatgccccgcctccctgcagagaaccagaccatctcagacaccagccccatgaagcgttcagcctccgtgctgggccccaaggcccgacgcctggacgattactcgctggagcgggtcccgcccgaggagaaccagcggcaccaccagcggcgccgcgaccgcagccaccgcgcctctgagcgctccctgggccgctacaccgatgtggacacaggcttggggacagacctgagcatgaccacccaatccggggacctgccgtcgaaggagcgggaccaggagcggggccggcccaaggatcggaagcatcgacagcaccaccaccaccaccaccaccaccaccatcccccgccccccgacaaggaccgctatgcccaggaacggccggaccacggccgggcacgggctcgggaccagcgctggtcccgctcgcccagcgagggccgagagcacatggcgcaccggcagggcagtagttccgtaagtggaagcccagccccctcaacatctggtaccagcactccgcggcggggccgccgccagctcccccagaccccctccaccccccggccacacgtgtcctattcccctgtgatccgtaaggccggcggctcggggcccccgcagcagcagcagcagcagcagcagcagcagcagcagcaggcggtggccaggccgggccgggcggccaccagcggccctcggaggtacccaggccccacggccgagcctctggccggagatcggccgcccacggggggccacagcagcggccgctcgcccaggatggagaggcgggtcccaggcccggcccggagcgagtcccccagggcctgtcgacacggcggggcccggtggccggcatctggcccgcacgtgtccgaggggcccccgggtccccggcaccatggctactaccggggctccgactacgacgaggccgatggcccgggcagcgggggcggcgaggaggccatggccggggcctacgacgcgccaccccccgtacgacacgcgtcctcgggcgccaccgggcgctcgcccaggactccccgggcctcgggcccggcctgcgcctcgccttctcggcacggccggcgactccccaacggctactacccggcgcacggactggccaggccccgcgggccgggctccaggaagggcctgcacgaaccctacagcgagagtgacgatgattggtgctaagcccgggcgaggtggcgcccgcccggccccccacgcaccccacgcacacaccccacccgaggagccgcgcagaggccgcgggggcccagcacagagggcccgggagagggccagccgggagaccccagactctggagaggccagggctgggccacaagggtgtcccgcagagaccctcggccaaaagagaccctcctgggcagccacggcgccccccaaccagccccgatccccccacccacgacaggggctctcgggtgggaggcagggagcagacaaaccacacagccaagggatttgaattaactcagccatttttggagaactttggggaacatgaaaaaaaaaaaaaaaaaaaaaaaaaaaaacatttttaaaagaaaaaacggggagaaaaaaatagcttctattgatgagttttatcatctcaattgaatctttcctttccctgatgaagacagctggtggccgagtgcggcaaagaagccagaaggaaccagaatcccagtgccctacacccaccaccagacacactcacacccacacacgttctcagacacacacaagagtgcttgccggttataccaaaccctactattactgcctgcagaaatcaatttaaaaaaataataataacaataaacaattttaaaaaggacaaaaaaattaatgattgagaaaagaggcatttttttctgacatttggtcctgcttgaaacaacaaaagaagaagaaaaacccaccatcaccaccgattcctttgcttcttttttccttttttcctaccttgtttgaaaaccgtgggcttgggactgtgaattattgcatgacattcaaaaagaaaaaaaaaataaaaaaaagttgaatcaaa

SEQ ID NO: 27433 - protein, 1111 aa, Homo sapiens
MLFMFIFAVVAVQLFKGKFFHCTDESKEFEKDCRGKYLLYEKNEVKARDREWKKYEFHYDNVLWALLTLFTVSTGEGWPQVLKHSVDATFENQGPSPGYRMEMSIFYVVYFVVFPFFFVNIFVALIIITFQEQGDKMMEEYSLEKNERACIDFAISAKPLTRHMPQNKQSFQYRMWQFVVSPPFEYTIMAMIALNTIVLMMKFYGASVAYENALRVFNIVFTSLFSLECVLKVMAFGILNYFRDAWNIFDFVTVLGSITDILVTEFGNNFINLSFLRLFRAARLIKLLRQGYTIRILLWTFVQSFKALPYVCLLIAMLFFIYAIIGMQVFGNIGIDVEDEDSDEDEFQITEHNNFRTFFQALMLLFRSATGEAWHNIMLSCLSGKPCDKNSGILTRECGNEFAYFYFVSFIFLCSFLMLNLFVAVIMDNFEYLTRDSSILGPHHLDEYVRVWAEYDPAAWGRMPYLDMYQMLRHMSPPLGLGKKCPARVAYKRLLRMDLPVADDNTVHFNSTLMALIRTALDIKIAKGGADKQQMDAELRKEMMAIWPNLSQKTLDLLVTPHKSTDLTVGKIYAAMMIMEYYRQSKAKKLQAMREEQDRTPLMFQRMEPPSPTQEGGPGQNALPSTQLDPGGALMAHESGLKESPSWVTQRAQEMFQKTGTWSPEQGPPTDMPNSQPNSQSVEMREMGRDGYSDSEHYLPMEGQGRAASMPRLPAENQTISDTSPMKRSASVLGPKARRLDDYSLERVPPEENQRHHQRRRDRSHRASERSLGRYTDVDTGLGTDLSMTTQSGDLPSKERDQERGRPKDRKHRQHHHHHHHHHHPPPPDKDRYAQERPDHGRARARDQRWSRSPSEGREHMAHRQGSSSVSGSPAPSTSGTSTPRRGRRQLPQTPSTPRPHVSYSPVIRKAGGSGPPQQQQQQQQQQQQQAVARPGRAATSGPRRYPGPTAEPLAGDRPPTGGHSSGRSPRMERRVPGPARSESPRACRHGGARWPASGPHVSEGPPGPRHHGYYRGSDYDEADGPGSGGGEEAMAGAYDAPPPVRHASSGATGRSPRTPRASGPACASPSRHGRRLPNGYYPAHGLARPRGPGSRKGLHEPYSESDDDWC

SEQ ID NO: 27434 - DNA, 8192 bp, Homo sapiens
gatgtcccgagctgctatccccggctcggcccgggcagccgccttctgagcccccgacccgaggcgccgagccgccgccgcccgatgggctgggccgtggagcgtctccgcagtcgtagctccagccgccgcgctcccagccccggcagcctcagcatcagcggcggcggcggcggcggcggcgtcttccgcatcgttcgccgcagcgtaacccggagccctttgctctttgcagaatggcccgcttcggagacgagatgccggcccgctacgggggaggaggctccggggcagccgccggggtggtcgtgggcagcggaggcgggcgaggagccgggggcagccggcagggcgggcagcccggggcgcaaaggatgtacaagcagtcaatggcgcagagagcgcggaccatggcactctacaaccccatccccgtccgacagaactgcctcacggttaaccggtctctcttcctcttcagcgaagacaacgtggtgagaaaatacgccaaaaagatcaccgaatggcctccctttgaatatatgattttagccaccatcatagcgaattgcatcgtcctcgcactggagcagcatctgcctgatgatgacaagaccccgatgtctgaacggctggatgacacagaaccatacttcattggaattttttgtttcgaggctggaattaaaatcattgcccttgggtttgccttccacaaaggctcctacttgaggaatggctggaatgtcatggactttgtggtggtgctaacgggcatcttggcgacagttgggacggagtttgacctacggacgctgagggcagttcgagtgctgcggccgctcaagctggtgtctggaatcccaagtttacaagtcgtcctgaagtcgatcatgaaggcgatgatccctttgctgcagatcggcctcctcctattttttgcaatccttatttttgcaatcatagggttagaattttatatgggaaaatttcataccacctgctttgaagaggggacagatgacattcagggtgagtctccggctccatgtgggacagaagagcccgcccgcacctgccccaatgggaccaaatgtcagccctactgggaagggcccaacaacgggatcactcagttcgacaacatcctgtttgcagtgctgactgttttccagtgcataaccatggaagggtggactgatctcctctacaatagcaacgatgcctcagggaacacttggaactggttgtacttcatccccctcatcatcatcggctccttttttatgctgaaccttgtgctgggtgtgctgtcaggggagtttgccaaagaaagggaacgggtggagaaccggcgggcttttctgaagctgaggcggcaacaacagattgaacgtgagctcaatgggtacatggagtggatctcaaaagcagaagaggtgatcctcgccgaggatgaaactgacggggagcagaggcatccctttgatgctctgcggagaaccaccataaagaaaagcaagacagatttgctcaaccccgaagaggctgaggatcagctggctgatatagcctctgtgggttctcccttcgcccgagccagcattaaaagtgccaagctggagaactcgaccttttttcacaaaaaggagaggaggatgcgtttctacatccgccgcatggtcaaaactcaggccttctactggactgtactcagtttggtagctctcaacacgctgtgtgttgctattgttcactacaaccagcccgagtggctctccgacttcctttactatgcagaattcattttcttaggactctttatgtccgaaatgtttataaaaatgtacgggcttgggacgcggccttacttccactcttccttcaactgctttgactgtggggttatcattgggagcatcttcgaggtcatctgggctgtcataaaacctggcacatcctttggaatcagcgtgttacgagccctcaggttattgcgtattttcaaagtcacaaagtactgggcatctctcagaaacctggtcgtctctctcctcaactccatgaagtccatcatcagcctgttgtttctccttttcctgttcattgtcgtcttcgcccttttgggaatgcaactcttcggcggccagtttaatttcgatgaagggactcctcccaccaacttcgatacttttccagcagcaataatgacggtgtttcagatcctgacgggcgaagactggaacgaggtcatgtacgacgggatcaagtctcaggggggcgtgcagggcggcatggtgttctccatctatttcattgtactgacgctctttgggaactacaccctcctgaatgtgttcttggccatcgctgtggacaatctggccaacgcccaggagctcaccaaggacgagcaagaggaagaagaagcagcgaaccagaaacttgccctacagaaagccaaggaggtggcagaagtgagtcctctgtccgcggccaacatgtctatagctgtgaaagagcaacagaagaatcaaaagccagccaagtccgtgtgggagcagcggaccagtgagatgcgaaagcagaacttgctggccagccgggaggccctgtataacgaaatggacccggacgagcgctggaaggctgcctacacgcggcacctgcggccagacatgaagacgcacttggaccggccgctggtggtggacccgcaggagaaccgcaacaacaacaccaacaagagccgggcggccgagcccaccgtggaccagcgcctcggccagcagcgcgccgaggacttcctcaggaaacaggcccgctaccacgatcgggcccgggaccccagcggctcggcgggcctggacgcacggaggccctgggcgggaagccaggaggccgagctgagccgggagggaccctacggccgcgagtcggaccaccacgcccgggagggcagcctggagcaacccgggttctgggagggcgaggccgagcgaggcaaggccggggacccccaccggaggcacgtgcaccggcaggggggcagcagggagagccgcagcgggtccccgcgcacgggcgcggacggggagcatcgacgtcatcgcgcgcaccgcaggcccggggaggagggtccggaggacaaggcggagcggagggcgcggcaccgcgagggcagccggccggcccggggcggcgagggcgagggcgagggccccgacgggggcgagcgcaggagaaggcaccggcatggcgctccagccacgtacgagggggacgcgcggagggaggacaaggagcggaggcatcggaggaggaaagagaaccagggctccggggtccctgtgtcgggccccaacctgtcaaccacccggccaatccagcaggacctgggccgccaagacccacccctggcagaggatattgacaacatgaagaacaacaagctggccaccgcggagtcggccgctccccacggcagccttggccacgccggcctgccccagagcccagccaagatgggaaacagcaccgaccccggccccatgctggccatccctgccatggccaccaacccccagaacgccgccagccgccggacgcccaacaacccggggaacccatccaatcccggcccccccaagacccccgagaatagccttatcgtcaccaaccccagcggcacccagaccaattcagctaagactgccaggaaacccgaccacaccacagtggacatccccccagcctgcccaccccccctcaaccacaccgtcgtacaagtgaacaaaaacgccaacccagacccactgccaaaaaaagaggaagagaagaaggaggaggaggaagacgaccgtggggaagacggccctaagccaatgcctccctatagctccatgttcatcctgtccacgaccaacccccttcgccgcctgtgccattacatcctgaacctgcgctactttgagatgtgcatcctcatggtcattgccatgagcagcatcgccctggccgccgaggaccctgtgcagcccaacgcacctcggaacaacgtgctgcgatactttgactacgtttttacaggcgtctttacctttgagatggtgatcaagatgattgacctggggctcgtcctgcatcagggtgcctacttccgtgacctctggaatattctcgacttcatagtggtcagtggggccctggtagcctttgccttcactggcaatagcaaaggaaaagacatcaacacgattaaatccctccgagtcctccgggtgctacgacctcttaaaaccatcaagcggctgccaaagctcaaggctgtgtttgactgtgtggtgaactcacttaaaaacgtcttcaacatcctcatcgtctacatgctattcatgttcatcttcgccgtggtggctgtgcagctcttcaaggggaaattcttccactgcactgacgagtccaaagagtttgagaaagattgtcgaggcaaatacctcctctacgagaagaatgaggtgaaggcgcgagaccgggagtggaagaagtatgaattccattacgacaatgtgctgtgggctctgctgaccctcttcaccgtgtccacgggagaaggctggccacaggtcctcaagcattcggtggacgccacctttgagaaccagggccccagccccgggtaccgcatggagatgtccattttctacgtcgtctactttgtggtgttccccttcttctttgtcaatatctttgtggccttgatcatcatcaccttccaggagcaaggggacaagatgatggaggaatacagcctggagaaaaatgagagggcctgcattgatttcgccatcagcgccaagccgctgacccgacacatgccgcagaacaagcagagcttccagtaccgcatgtggcagttcgtggtgtctccgcctttcgagtacacgatcatggccatgatcgccctcaacaccatcgtgcttatgatgaagttctatggggcttctgttgcttatgaaaatgccctgcgggtgttcaacatcgtcttcacctccctcttctctctggaatgtgtgctgaaagtcatggcttttgggattctgaattatttccgcgatgcctggaacatcttcgactttgtgactgttctgggcagcatcaccgatatcctcgtgactgagtttgggaataacttcatcaacctgagctttctccgcctcttccgagctgcccggctcatcaaacttctccgtcagggttacaccatccgcattcttctctggacctttgtgcagtccttcaaggccctgccttatgtctgtctgctgatcgccatgctcttcttcatctatgccatcattgggatgcaggtgtttggtaacattggcatcgacgtggaggacgaggacagtgatgaagatgagttccaaatcactgagcacaataacttccggaccttcttccaggccctcatgcttctcttccggagtgccaccggggaagcttggcacaacatcatgctttcctgcctcagcgggaaaccgtgtgataagaactctggcatcctgactcgagagtgtggcaatgaatttgcttatttttactttgtttccttcatcttcctctgctcgtttctgatgctgaatctctttgtcgccgtcatcatggacaactttgagtacctcacccgagactcctccatcctgggcccccaccacctggatgagtacgtgcgtgtctgggccgagtatgaccccgcagcttggggccgcatgccttacctggacatgtatcagatgctgagacacatgtctccgcccctgggtctggggaagaagtgtccggccagagtggcttacaagcggcttctgcggatggacctgcccgtcgcagatgacaacaccgtccacttcaattccaccctcatggctctgatccgcacagccctggacatcaagattgccaagggaggagccgacaaacagcagatggacgctgagctgcggaaggagatgatggcgatttggcccaatctgtcccagaagacgctagacctgctggtcacacctcacaagtccacggacctcaccgtggggaagatctacgcagccatgatgatcatggagtactaccggcagagcaaggccaagaagctgcaggccatgcgcgaggagcaggaccggacacccctcatgttccagcgcatggagcccccgtccccaacgcaggaagggggacctggccagaacgccctcccctccacccagctggacccaggaggagccctgatggctcacgaaagcggcctcaaggagagcccgtcctgggtgacccagcgtgcccaggagatgttccagaagacgggcacatggagtccggaacaaggcccccctaccgacatgcccaacagccagcctaactctcagtccgtggagatgcgagagatgggcagagatggctactccgacagcgagcactacctccccatggaaggccagggccgggctgcctccatgccccgcctccctgcagagaaccagaggagaaggggccggccacgtgggaataacctcagtaccatctcagacaccagccccatgaagcgttcagcctccgtgctgggccccaaggcccgacgcctggacgattactcgctggagcgggtcccgcccgaggagaaccagcggcaccaccagcggcgccgcgaccgcagccaccgcgcctctgagcgctccctgggccgctacaccgatgtggacacaggcttggggacagacctgagcatgaccacccaatccggggacctgccgtcgaaggagcgggaccaggagcggggccggcccaaggatcggaagcatcgacagcaccaccaccaccaccaccaccaccaccatcccccgccccccgacaaggaccgctatgcccaggaacggccggaccacggccgggcacgggctcgggaccagcgctggtcccgctcgcccagcgagggccgagagcacatggcgcaccggcagggcagtagttccgtaagtggaagcccagccccctcaacatctggtaccagcactccgcggcggggccgccgccagctcccccagaccccctccaccccccggccacacgtgtcctattcccctgtgatccgtaaggccggcggctcggggcccccgcagcagcagcagcagcagcagcagcagcagcagcagcaggcggtggccaggccgggccgggcggccaccagcggccctcggaggtacccaggccccacggccgagcctctggccggagatcggccgcccacggggggccacagcagcggccgctcgcccaggatggagaggcgggtcccaggcccggcccggagcgagtcccccagggcctgtcgacacggcggggcccggtggccggcatctggcccgcacgtgtccgaggggcccccgggtccccggcaccatggctactaccggggctccgactacgacgaggccgatggcccgggcagcgggggcggcgaggaggccatggccggggcctacgacgcgccaccccccgtacgacacgcgtcctcgggcgccaccgggcgctcgcccaggactccccgggcctcgggcccggcctgcgcctcgccttctcggcacggccggcgactccccaacggctactacccggcgcacggactggccaggccccgcgggccgggctccaggaagggcctgcacgaaccctacagcgagagtgacgatgattggtgctaagcccgggcgaggtggcgcccgcccggccccccacgcaccccacgcacacaccccacccgaggagccgcgcagaggccgcgggggcccagcacagagggcccgggagagggccagccgggagaccccagactctggagaggccagggctgggccacaagggtgtcccgcagagaccctcggccaaaagagaccctcctgggcagccacggcgccccccaaccagccccgatccccccacccacgacaggggctctcgggtgggaggcagggagcagacaaaccacacagccaagggatttgaattaactcagccatttttggagaactttggggaacatgaaaaaaaaaaaaaaaaaaaaaaaaaaaaacatttttaaaagaaaaaacggggagaaaaaaatagcttctattgatgagttttatcatctcaattga

SEQ ID NO: 27435 - protein, 2506 aa, Homo sapiens
MARFGDEMPARYGGGGSGAAAGVVVGSGGGRGAGGSRQGGQPGAQRMYKQSMAQRARTMALYNPIPVRQNCLTVNRSLFLFSEDNVVRKYAKKITEWPPFEYMILATIIANCIVLALEQHLPDDDKTPMSERLDDTEPYFIGIFCFEAGIKIIALGFAFHKGSYLRNGWNVMDFVVVLTGILATVGTEFDLRTLRAVRVLRPLKLVSGIPSLQVVLKSIMKAMIPLLQIGLLLFFAILIFAIIGLEFYMGKFHTTCFEEGTDDIQGESPAPCGTEEPARTCPNGTKCQPYWEGPNNGITQFDNILFAVLTVFQCITMEGWTDLLYNSNDASGNTWNWLYFIPLIIIGSFFMLNLVLGVLSGEFAKERERVENRRAFLKLRRQQQIERELNGYMEWISKAEEVILAEDETDGEQRHPFDALRRTTIKKSKTDLLNPEEAEDQLADIASVGSPFARASIKSAKLENSTFFHKKERRMRFYIRRMVKTQAFYWTVLSLVALNTLCVAIVHYNQPEWLSDFLYYAEFIFLGLFMSEMFIKMYGLGTRPYFHSSFNCFDCGVIIGSIFEVIWAVIKPGTSFGISVLRALRLLRIFKVTKYWASLRNLVVSLLNSMKSIISLLFLLFLFIVVFALLGMQLFGGQFNFDEGTPPTNFDTFPAAIMTVFQILTGEDWNEVMYDGIKSQGGVQGGMVFSIYFIVLTLFGNYTLLNVFLAIAVDNLANAQELTKDEQEEEEAANQKLALQKAKEVAEVSPLSAANMSIAVKEQQKNQKPAKSVWEQRTSEMRKQNLLASREALYNEMDPDERWKAAYTRHLRPDMKTHLDRPLVVDPQENRNNNTNKSRAAEPTVDQRLGQQRAEDFLRKQARYHDRARDPSGSAGLDARRPWAGSQEAELSREGPYGRESDHHAREGSLEQPGFWEGEAERGKAGDPHRRHVHRQGGSRESRSGSPRTGADGEHRRHRAHRRPGEEGPEDKAERRARHREGSRPARGGEGEGEGPDGGERRRRHRHGAPATYEGDARREDKERRHRRRKENQGSGVPVSGPNLSTTRPIQQDLGRQDPPLAEDIDNMKNNKLATAESAAPHGSLGHAGLPQSPAKMGNSTDPGPMLAIPAMATNPQNAASRRTPNNPGNPSNPGPPKTPENSLIVTNPSGTQTNSAKTARKPDHTTVDIPPACPPPLNHTVVQVNKNANPDPLPKKEEEKKEEEEDDRGEDGPKPMPPYSSMFILSTTNPLRRLCHYILNLRYFEMCILMVIAMSSIALAAEDPVQPNAPRNNVLRYFDYVFTGVFTFEMVIKMIDLGLVLHQGAYFRDLWNILDFIVVSGALVAFAFTGNSKGKDINTIKSLRVLRVLRPLKTIKRLPKLKAVFDCVVNSLKNVFNILIVYMLFMFIFAVVAVQLFKGKFFHCTDESKEFEKDCRGKYLLYEKNEVKARDREWKKYEFHYDNVLWALLTLFTVSTGEGWPQVLKHSVDATFENQGPSPGYRMEMSIFYVVYFVVFPFFFVNIFVALIIITFQEQGDKMMEEYSLEKNERACIDFAISAKPLTRHMPQNKQSFQYRMWQFVVSPPFEYTIMAMIALNTIVLMMKFYGASVAYENALRVFNIVFTSLFSLECVLKVMAFGILNYFRDAWNIFDFVTVLGSITDILVTEFGNNFINLSFLRLFRAARLIKLLRQGYTIRILLWTFVQSFKALPYVCLLIAMLFFIYAIIGMQVFGNIGIDVEDEDSDEDEFQITEHNNFRTFFQALMLLFRSATGEAWHNIMLSCLSGKPCDKNSGILTRECGNEFAYFYFVSFIFLCSFLMLNLFVAVIMDNFEYLTRDSSILGPHHLDEYVRVWAEYDPAAWGRMPYLDMYQMLRHMSPPLGLGKKCPARVAYKRLLRMDLPVADDNTVHFNSTLMALIRTALDIKIAKGGADKQQMDAELRKEMMAIWPNLSQKTLDLLVTPHKSTDLTVGKIYAAMMIMEYYRQSKAKKLQAMREEQDRTPLMFQRMEPPSPTQEGGPGQNALPSTQLDPGGALMAHESGLKESPSWVTQRAQEMFQKTGTWSPEQGPPTDMPNSQPNSQSVEMREMGRDGYSDSEHYLPMEGQGRAASMPRLPAENQRRRGRPRGNNLSTISDTSPMKRSASVLGPKARRLDDYSLERVPPEENQRHHQRRRDRSHRASERSLGRYTDVDTGLGTDLSMTTQSGDLPSKERDQERGRPKDRKHRQHHHHHHHHHHPPPPDKDRYAQERPDHGRARARDQRWSRSPSEGREHMAHRQGSSSVSGSPAPSTSGTSTPRRGRRQLPQTPSTPRPHVSYSPVIRKAGGSGPPQQQQQQQQQQQQQAVARPGRAATSGPRRYPGPTAEPLAGDRPPTGGHSSGRSPRMERRVPGPARSESPRACRHGGARWPASGPHVSEGPPGPRHHGYYRGSDYDEADGPGSGGGEEAMAGAYDAPPPVRHASSGATGRSPRTPRASGPACASPSRHGRRLPNGYYPAHGLARPRGPGSRKGLHEPYSESDDDWC

SEQ ID NO: 27436 - DNA, 8192 bp, Homo sapiens
cgcaccctcctcccgcccctccttctccggggtcagccaggaagatgtcccgagctgctatccccggctcggcccgggcagccgccttctgagcccccgacccgaggcgccgagccgccgccgcccgatgggctgggccgtggagcgtctccgcagtcgtagctccagccgccgcgctcccagccccggcagcctcagcatcagcggcggcggcggcggcggcggcgtcttccgcatcgttcgccgcagcgtaacccggagccctttgctctttgcagaatggcccgcttcggagacgagatgccggcccgctacgggggaggaggctccggggcagccgccggggtggtcgtgggcagcggaggcgggcgaggagccgggggcagccggcagggcgggcagcccggggcgcaaaggatgtacaagcagtcaatggcgcagagagcgcggaccatggcactctacaaccccatccccgtccgacagaactgcctcacggttaaccggtctctcttcctcttcagcgaagacaacgtggtgagaaaatacgccaaaaagatcaccgaatggcctccctttgaatatatgattttagccaccatcatagcgaattgcatcgtcctcgcactggagcagcatctgcctgatgatgacaagaccccgatgtctgaacggctggatgacacagaaccatacttcattggaattttttgtttcgaggctggaattaaaatcattgcccttgggtttgccttccacaaaggctcctacttgaggaatggctggaatgtcatggactttgtggtggtgctaacgggcatcttggcgacagttgggacggagtttgacctacggacgctgagggcagttcgagtgctgcggccgctcaagctggtgtctggaatcccaagtttacaagtcgtcctgaagtcgatcatgaaggcgatgatccctttgctgcagatcggcctcctcctattttttgcaatccttatttttgcaatcatagggttagaattttatatgggaaaatttcataccacctgctttgaagaggggacagatgacattcagggtgagtctccggctccatgtgggacagaagagcccgcccgcacctgccccaatgggaccaaatgtcagccctactgggaagggcccaacaacgggatcactcagttcgacaacatcctgtttgcagtgctgactgttttccagtgcataaccatggaagggtggactgatctcctctacaatagcaacgatgcctcagggaacacttggaactggttgtacttcatccccctcatcatcatcggctccttttttatgctgaaccttgtgctgggtgtgctgtcaggggagtttgccaaagaaagggaacgggtggagaaccggcgggcttttctgaagctgaggcggcaacaacagattgaacgtgagctcaatgggtacatggagtggatctcaaaagcagaagaggtgatcctcgccgaggatgaaactgacggggagcagaggcatccctttgatgctctgcggagaaccaccataaagaaaagcaagacagatttgctcaaccccgaagaggctgaggatcagctggctgatatagcctctgtgggttctcccttcgcccgagccagcattaaaagtgccaagctggagaactcgaccttttttcacaaaaaggagaggaggatgcgtttctacatccgccgcatggtcaaaactcaggccttctactggactgtactcagtttggtagctctcaacacgctgtgtgttgctattgttcactacaaccagcccgagtggctctccgacttcctttactatgcagaattcattttcttaggactctttatgtccgaaatgtttataaaaatgtacgggcttgggacgcggccttacttccactcttccttcaactgctttgactgtggggttatcattgggagcatcttcgaggtcatctgggctgtcataaaacctggcacatcctttggaatcagcgtgttacgagccctcaggttattgcgtattttcaaagtcacaaagtactgggcatctctcagaaacctggtcgtctctctcctcaactccatgaagtccatcatcagcctgttgtttctccttttcctgttcattgtcgtcttcgcccttttgggaatgcaactcttcggcggccagtttaatttcgatgaagggactcctcccaccaacttcgatacttttccagcagcaataatgacggtgtttcagatcctgacgggcgaagactggaacgaggtcatgtacgacgggatcaagtctcaggggggcgtgcagggcggcatggtgttctccatctatttcattgtactgacgctctttgggaactacaccctcctgaatgtgttcttggccatcgctgtggacaatctggccaacgcccaggagctcaccaaggacgagcaagaggaagaagaagcagcgaaccagaaacttgccctacagaaagccaaggaggtggcagaagtgagtcctctgtccgcggccaacatgtctatagctgtgaaagagcaacagaagaatcaaaagccagccaagtccgtgtgggagcagcggaccagtgagatgcgaaagcagaacttgctggccagccgggaggccctgtataacgaaatggacccggacgagcgctggaaggctgcctacacgcggcacctgcggccagacatgaagacgcacttggaccggccgctggtggtggacccgcaggagaaccgcaacaacaacaccaacaagagccgggcggccgagcccaccgtggaccagcgcctcggccagcagcgcgccgaggacttcctcaggaaacaggcccgctaccacgatcgggcccgggaccccagcggctcggcgggcctggacgcacggaggccctgggcgggaagccaggaggccgagctgagccgggagggaccctacggccgcgagtcggaccaccacgcccgggagggcagcctggagcaacccgggttctgggagggcgaggccgagcgaggcaaggccggggacccccaccggaggcacgtgcaccggcaggggggcagcagggagagccgcagcgggtccccgcgcacgggcgcggacggggagcatcgacgtcatcgcgcgcaccgcaggcccggggaggagggtccggaggacaaggcggagcggagggcgcggcaccgcgagggcagccggccggcccggggcggcgagggcgagggcgagggccccgacgggggcgagcgcaggagaaggcaccggcatggcgctccagccacgtacgagggggacgcgcggagggaggacaaggagcggaggcatcggaggaggaaagagaaccagggctccggggtccctgtgtcgggccccaacctgtcaaccacccggccaatccagcaggacctgggccgccaagacccacccctggcagaggatattgacaacatgaagaacaacaagctggccaccgcggagtcggccgctccccacggcagccttggccacgccggcctgccccagagcccagccaagatgggaaacagcaccgaccccggccccatgctggccatccctgccatggccaccaacccccagaacgccgccagccgccggacgcccaacaacccggggaacccatccaatcccggcccccccaagacccccgagaatagccttatcgtcaccaaccccagcggcacccagaccaattcagctaagactgccaggaaacccgaccacaccacagtggacatccccccagcctgcccaccccccctcaaccacaccgtcgtacaagtgaacaaaaacgccaacccagacccactgccaaaaaaagaggaagagaagaaggaggaggaggaagacgaccgtggggaagacggccctaagccaatgcctccctatagctccatgttcatcctgtccacgaccaacccccttcgccgcctgtgccattacatcctgaacctgcgctactttgagatgtgcatcctcatggtcattgccatgagcagcatcgccctggccgccgaggaccctgtgcagcccaacgcacctcggaacaacgtgctgcgatactttgactacgtttttacaggcgtctttacctttgagatggtgatcaagatgattgacctggggctcgtcctgcatcagggtgcctacttccgtgacctctggaatattctcgacttcatagtggtcagtggggccctggtagcctttgccttcactggcaatagcaaaggaaaagacatcaacacgattaaatccctccgagtcctccgggtgctacgacctcttaaaaccatcaagcggctgccaaagctcaaggctgtgtttgactgtgtggtgaactcacttaaaaacgtcttcaacatcctcatcgtctacatgctattcatgttcatcttcgccgtggtggctgtgcagctcttcaaggggaaattcttccactgcactgacgagtccaaagagtttgagaaagattgtcgaggcaaatacctcctctacgagaagaatgaggtgaaggcgcgagaccgggagtggaagaagtatgaattccattacgacaatgtgctgtgggctctgctgaccctcttcaccgtgtccacgggagaaggctggccacaggtcctcaagcattcggtggacgccacctttgagaaccagggccccagccccgggtaccgcatggagatgtccattttctacgtcgtctactttgtggtgttccccttcttctttgtcaatatctttgtggccttgatcatcatcaccttccaggagcaaggggacaagatgatggaggaatacagcctggagaaaaatgagagggcctgcattgatttcgccatcagcgccaagccgctgacccgacacatgccgcagaacaagcagagcttccagtaccgcatgtggcagttcgtggtgtctccgcctttcgagtacacgatcatggccatgatcgccctcaacaccatcgtgcttatgatgaagttctatggggcttctgttgcttatgaaaatgccctgcgggtgttcaacatcgtcttcacctccctcttctctctggaatgtgtgctgaaagtcatggcttttgggattctgaattatttccgcgatgcctggaacatcttcgactttgtgactgttctgggcagcatcaccgatatcctcgtgactgagtttgggaataacttcatcaacctgagctttctccgcctcttccgagctgcccggctcatcaaacttctccgtcagggttacaccatccgcattcttctctggacctttgtgcagtccttcaaggccctgccttatgtctgtctgctgatcgccatgctcttcttcatctatgccatcattgggatgcaggtgtttggtaacattggcatcgacgtggaggacgaggacagtgatgaagatgagttccaaatcactgagcacaataacttccggaccttcttccaggccctcatgcttctcttccggagtgccaccggggaagcttggcacaacatcatgctttcctgcctcagcgggaaaccgtgtgataagaactctggcatcctgactcgagagtgtggcaatgaatttgcttatttttactttgtttccttcatcttcctctgctcgtttctgatgctgaatctctttgtcgccgtcatcatggacaactttgagtacctcacccgagactcctccatcctgggcccccaccacctggatgagtacgtgcgtgtctgggccgagtatgaccccgcagcttgcggtcggattcattataaggatatgtacagtttattacgagtaatatctccccctctcggcttaggcaagaaatgtcctcatagggttgcttgcaagcggcttctgcggatggacctgcccgtcgcagatgacaacaccgtccacttcaattccaccctcatggctctgatccgcacagccctggacatcaagattgccaagggaggagccgacaaacagcagatggacgctgagctgcggaaggagatgatggcgatttggcccaatctgtcccagaagacgctagacctgctggtcacacctcacaagtccacggacctcaccgtggggaagatctacgcagccatgatgatcatggagtactaccggcagagcaaggccaagaagctgcaggccatgcgcgaggagcaggaccggacacccctcatgttccagcgcatggagcccccgtccccaacgcaggaagggggacctggccagaacgccctcccctccacccagctggacccaggaggagccctgatggctcacgaaagcggcctcaaggagagcccgtcctgggtgacccagcgtgcccaggagatgttccagaagacgggcacatggagtccggaacaaggcccccctaccgacatgcccaacagccagcctaactctcagtccgtggagatgcgagagatgggcagagatggctactccgacagcgagcactacctccccatggaaggccagggccgggctgcctccatgccccgcctccctgcagagaaccagaggagaaggggccggccacgtgggaataacctcagtaccatctcagacaccagccccatgaagcgttcagcctccgtgctgggccccaaggcccgacgcctggacgattactcgctggagcgggtcccgcccgaggagaaccagcggcaccaccagcggcgccgcgaccgcagccaccgcgcctctgagcgctccctgggccgctacaccgatgtggacacaggcttggggacagacctgagcatgaccacccaatccggggacctgccgtcgaaggagcgggaccaggagcggggccggcccaaggatcggaagcatcgacagcaccaccaccaccaccaccaccaccaccatcccccgccccccgacaaggaccgctatgcccaggaacggccggaccacggccgggcacgggctcgggaccagcgctggtcccgctcgcccagcgagggccgagagcacatggcgcaccggcagggcagtagttccgtaagtggaagcccagccccctcaacatctggtaccagcactccgcggcggggccgccgccagctcccccagaccccctccaccccccggccacacgtgtcctattcccctgtgatccgtaaggccggcggctcggggcccccgcagcagcagcagcagcagcagcagcagcagcagcagcaggcggtggccaggccgggccgggcggccaccagcggccctcggaggtacccaggccccacggccgagcctctggccggagatcggccgcccacggggggccacagcagcggccgctcgcccaggatggagaggcgggtcccaggcccggcccggagcgagtcccccagggcctgtcgacacggcggggcccggtggccggcatctggcccgcacgtgtccgaggggcccccgggtccccggcaccatggctactaccggggctccgactacgacgaggccgatggcccgggcagcgggggcggcgaggaggccatggccggggcctacgacgcgccaccccccgtacgacacgcgtcctcgggcgccaccgggcgctcgcccaggactccccgggcctcgggcccggcctgcgcctcgccttctcggcacggccggcgactccccaacggctactacccggcgcacggactggccaggccccgcgggccgggctccaggaagggcctgcacgaaccctacagcgagagtgacgatgattggtgctaagcccgggcgaggtggcgcccgcccggccccccacgcaccccacgcacacaccccacccgaggagccgcgcagaggccgcgggggcccagcacagagggcccgggagagggccagccgggagaccccagactctggagaggccagggctgggccacaagggtgtcccgcagagaccctcggccaaaagagaccctcctgggcagccacggcgccccccaaccagccccgatccccccacccacgacaggggctctcgggtgggaggcagggagcagacaaaccacacagccaagggatttgaattaactcagccatttttggagaactttggggaacatgaaaaaaaaaaaaaaaaaaaaaaaaaaaaacatttttaaaagaaaaaacgggga

SEQ ID NO: 27437 - protein, 2506 aa, Homo sapiens
MARFGDEMPARYGGGGSGAAAGVVVGSGGGRGAGGSRQGGQPGAQRMYKQSMAQRARTMALYNPIPVRQNCLTVNRSLFLFSEDNVVRKYAKKITEWPPFEYMILATIIANCIVLALEQHLPDDDKTPMSERLDDTEPYFIGIFCFEAGIKIIALGFAFHKGSYLRNGWNVMDFVVVLTGILATVGTEFDLRTLRAVRVLRPLKLVSGIPSLQVVLKSIMKAMIPLLQIGLLLFFAILIFAIIGLEFYMGKFHTTCFEEGTDDIQGESPAPCGTEEPARTCPNGTKCQPYWEGPNNGITQFDNILFAVLTVFQCITMEGWTDLLYNSNDASGNTWNWLYFIPLIIIGSFFMLNLVLGVLSGEFAKERERVENRRAFLKLRRQQQIERELNGYMEWISKAEEVILAEDETDGEQRHPFDALRRTTIKKSKTDLLNPEEAEDQLADIASVGSPFARASIKSAKLENSTFFHKKERRMRFYIRRMVKTQAFYWTVLSLVALNTLCVAIVHYNQPEWLSDFLYYAEFIFLGLFMSEMFIKMYGLGTRPYFHSSFNCFDCGVIIGSIFEVIWAVIKPGTSFGISVLRALRLLRIFKVTKYWASLRNLVVSLLNSMKSIISLLFLLFLFIVVFALLGMQLFGGQFNFDEGTPPTNFDTFPAAIMTVFQILTGEDWNEVMYDGIKSQGGVQGGMVFSIYFIVLTLFGNYTLLNVFLAIAVDNLANAQELTKDEQEEEEAANQKLALQKAKEVAEVSPLSAANMSIAVKEQQKNQKPAKSVWEQRTSEMRKQNLLASREALYNEMDPDERWKAAYTRHLRPDMKTHLDRPLVVDPQENRNNNTNKSRAAEPTVDQRLGQQRAEDFLRKQARYHDRARDPSGSAGLDARRPWAGSQEAELSREGPYGRESDHHAREGSLEQPGFWEGEAERGKAGDPHRRHVHRQGGSRESRSGSPRTGADGEHRRHRAHRRPGEEGPEDKAERRARHREGSRPARGGEGEGEGPDGGERRRRHRHGAPATYEGDARREDKERRHRRRKENQGSGVPVSGPNLSTTRPIQQDLGRQDPPLAEDIDNMKNNKLATAESAAPHGSLGHAGLPQSPAKMGNSTDPGPMLAIPAMATNPQNAASRRTPNNPGNPSNPGPPKTPENSLIVTNPSGTQTNSAKTARKPDHTTVDIPPACPPPLNHTVVQVNKNANPDPLPKKEEEKKEEEEDDRGEDGPKPMPPYSSMFILSTTNPLRRLCHYILNLRYFEMCILMVIAMSSIALAAEDPVQPNAPRNNVLRYFDYVFTGVFTFEMVIKMIDLGLVLHQGAYFRDLWNILDFIVVSGALVAFAFTGNSKGKDINTIKSLRVLRVLRPLKTIKRLPKLKAVFDCVVNSLKNVFNILIVYMLFMFIFAVVAVQLFKGKFFHCTDESKEFEKDCRGKYLLYEKNEVKARDREWKKYEFHYDNVLWALLTLFTVSTGEGWPQVLKHSVDATFENQGPSPGYRMEMSIFYVVYFVVFPFFFVNIFVALIIITFQEQGDKMMEEYSLEKNERACIDFAISAKPLTRHMPQNKQSFQYRMWQFVVSPPFEYTIMAMIALNTIVLMMKFYGASVAYENALRVFNIVFTSLFSLECVLKVMAFGILNYFRDAWNIFDFVTVLGSITDILVTEFGNNFINLSFLRLFRAARLIKLLRQGYTIRILLWTFVQSFKALPYVCLLIAMLFFIYAIIGMQVFGNIGIDVEDEDSDEDEFQITEHNNFRTFFQALMLLFRSATGEAWHNIMLSCLSGKPCDKNSGILTRECGNEFAYFYFVSFIFLCSFLMLNLFVAVIMDNFEYLTRDSSILGPHHLDEYVRVWAEYDPAACGRIHYKDMYSLLRVISPPLGLGKKCPHRVACKRLLRMDLPVADDNTVHFNSTLMALIRTALDIKIAKGGADKQQMDAELRKEMMAIWPNLSQKTLDLLVTPHKSTDLTVGKIYAAMMIMEYYRQSKAKKLQAMREEQDRTPLMFQRMEPPSPTQEGGPGQNALPSTQLDPGGALMAHESGLKESPSWVTQRAQEMFQKTGTWSPEQGPPTDMPNSQPNSQSVEMREMGRDGYSDSEHYLPMEGQGRAASMPRLPAENQRRRGRPRGNNLSTISDTSPMKRSASVLGPKARRLDDYSLERVPPEENQRHHQRRRDRSHRASERSLGRYTDVDTGLGTDLSMTTQSGDLPSKERDQERGRPKDRKHRQHHHHHHHHHHPPPPDKDRYAQERPDHGRARARDQRWSRSPSEGREHMAHRQGSSSVSGSPAPSTSGTSTPRRGRRQLPQTPSTPRPHVSYSPVIRKAGGSGPPQQQQQQQQQQQQQAVARPGRAATSGPRRYPGPTAEPLAGDRPPTGGHSSGRSPRMERRVPGPARSESPRACRHGGARWPASGPHVSEGPPGPRHHGYYRGSDYDEADGPGSGGGEEAMAGAYDAPPPVRHASSGATGRSPRTPRASGPACASPSRHGRRLPNGYYPAHGLARPRGPGSRKGLHEPYSESDDDWC

SEQ ID NO: 27438 - DNA, 2758 bp, Homo sapiens
ctcgacttcatagtggtcagtggggccctggtagcctttgccttcactggcaatagcaaaggaaaagacatcaacacgattaaatccctccgagtcctccgggtgctacgacctcttaaaaccatcaagcggctgccaaagctcaaggctgtgtttgactgtgtggtgaactcacttaaaaacgtcttcaacatcctcatcgtctacatgctattcatgttcatcttcgccgtggtggctgtgcagctcttcaaggggaaattcttccactgcactgacgagtccaaagagtttgagaaagattgtcgaggcaaatacctcctctacgagaagaatgaggtgaaggcgcgagaccgggagtggaagaagtatgaattccattacgacaatgtgctgtgggctctgctgaccctcttcaccgtgtccacgggagaaggctggccacaggtcctcaagcattcggtggacgccacctttgagaaccagggccccagccccgggtaccgcatggagatgtccattttctacgtcgtctactttgtggtgttccccttcttctttgtcaatatctttgtggccttgatcatcatcaccttccaggagcaaggggacaagatgatggaggaatacagcctggagaaaaatgagagggcctgcattgatttcgccatcagcgccaagccgctgacccgacacatgccgcagaacaagcagagcttccagtaccgcatgtggcagttcgtggtgtctccgcctttcgagtacacgatcatggccatgatcgccctcaacaccatcgtgcttatgatgaagttctatggggcttctgttgcttatgaaaatgccctgcgggtgttcaacatcgtcttcacctccctcttctctctggaatgtgtgctgaaagtcatggcttttgggattctgaattatttccgcgatgcctggaacatcttcgactttgtgactgttctgggcagcatcaccgatatcctcgtgactgagtttgggaataacttcatcaacctgagctttctccgcctcttccgagctgcccggctcatcaaacttctccgtcagggttacaccatccgcattcttctctggacctttgtgcagtccttcaaggccctgccttatgtctgtctgctgatcgccatgctcttcttcatctatgccatcattgggatgcaggtgtttggtaacattggcatcgacgtggaggacgaggacagtgatgaagatgagttccaaatcactgagcacaataacttccggaccttcttccaggccctcatgcttctcttccggagtgccaccggggaagcttggcacaacatcatgctttcctgcctcagcgggaaaccgtgtgataagaactctggcatcctgactcgagagtgtggcaatgaatttgcttatttttactttgtttccttcatcttcctctgctcgtttctgatgctgaatctctttgtcgccgtcatcatggacaactttgagtacctcacccgagactcctccatcctgggcccccaccacctggatgagtacgtgcgtgtctgggccgagtatgaccccgcagcttggggccgcatgccttacctggacatgtatcagatgctgagacacatgtctccgcccctgggtctggggaagaagtgtccggccagagtggcttacaagcggcttctgcggatggacctgcccgtcgcagatgacaacaccgtccacttcaattccaccctcatggctctgatccgcacagccctggacatcaagattgccaagggaggagccgacaaacagcagatggacgctgagctgcggaaggagatgatggcgatttggcccaatctgtcccagaagacgctagacctgctggtcacacctcacaagtccacggacctcaccgtggggaagatctacgcagccatgatgatcatggagtactaccggcagagcaaggccaagaagctgcaggccatgcgcgaggagcaggaccggacacccctcatgttccagcgcatggagcccccgtccccaacgcaggaagggggacctggccagaacgccctcccctccacccagctggacccaggaggagccctgatggctcacgaaagcggcctcaaggagagcccgtcctgggtgacccagcgtgcccaggagatgttccagaagacgggcacatggagtccggaacaaggcccccctaccgacatgcccaacagccagcctaactctcagtccgtggagatgcgagagatgggcagagatggctactccgacagcgagcactacctccccatggaaggccagggccgggctgcctccatgccccgcctccctgcagagaaccagaccatctcagacaccagccccatgaagcgttcagcctccgtgctgggccccaaggcccgacgcctggacgattactcgctggagcgggtcccgcccgaggagaaccagcggcaccaccagcggcgccgcgaccgcagccaccgcgcctctgagcgctccctgggccgctacaccgatgtggacacaggcttggggacagacctgagcatgaccacccaatccggggacctgccgtcgaaggagcgggaccaggagcggggccggcccaaggatcggaagcatcgacagcaccaccaccaccaccaccaccaccaccattcctttgcttcttttttccttttttcctaccttgtttgaaaaccgtgggcttgggactgtgaattattgcatgacattc

SEQ ID NO: 27439 - protein, 836 aa, Homo sapiens
MLFMFIFAVVAVQLFKGKFFHCTDESKEFEKDCRGKYLLYEKNEVKARDREWKKYEFHYDNVLWALLTLFTVSTGEGWPQVLKHSVDATFENQGPSPGYRMEMSIFYVVYFVVFPFFFVNIFVALIIITFQEQGDKMMEEYSLEKNERACIDFAISAKPLTRHMPQNKQSFQYRMWQFVVSPPFEYTIMAMIALNTIVLMMKFYGASVAYENALRVFNIVFTSLFSLECVLKVMAFGILNYFRDAWNIFDFVTVLGSITDILVTEFGNNFINLSFLRLFRAARLIKLLRQGYTIRILLWTFVQSFKALPYVCLLIAMLFFIYAIIGMQVFGNIGIDVEDEDSDEDEFQITEHNNFRTFFQALMLLFRSATGEAWHNIMLSCLSGKPCDKNSGILTRECGNEFAYFYFVSFIFLCSFLMLNLFVAVIMDNFEYLTRDSSILGPHHLDEYVRVWAEYDPAAWGRMPYLDMYQMLRHMSPPLGLGKKCPARVAYKRLLRMDLPVADDNTVHFNSTLMALIRTALDIKIAKGGADKQQMDAELRKEMMAIWPNLSQKTLDLLVTPHKSTDLTVGKIYAAMMIMEYYRQSKAKKLQAMREEQDRTPLMFQRMEPPSPTQEGGPGQNALPSTQLDPGGALMAHESGLKESPSWVTQRAQEMFQKTGTWSPEQGPPTDMPNSQPNSQSVEMREMGRDGYSDSEHYLPMEGQGRAASMPRLPAENQTISDTSPMKRSASVLGPKARRLDDYSLERVPPEENQRHHQRRRDRSHRASERSLGRYTDVDTGLGTDLSMTTQSGDLPSKERDQERGRPKDRKHRQHHHHHHHHHHSFASFFLFSYLV

SEQ ID NO: 27440 - DNA, 459 bp, Homo sapiens
tgccctccctgcgggccaccaagagaaactgagtactgggacaggtaacctaagtaagagacacctcagccgccacagctttcagagttcttcctgggactccctgggtaggggcgggcgcggctcacgggagacccaggagggatgcctgggaatgactgcgcttgccttgggttttctgtagcggcttctgcggatggacctgcccgtcgcagatgacaacaccgtccacttcaattccaccctcatggctctgatccgcacagccctggacatcaagattgccaagggaggagccgacaaacagcagatggacgctgagctgcggaaggagatgatggcgatttggcccaatctgtcccagaagacgctagacctgctggtcacacctcacaagtgtaagagctgagcccagccctgggatccaatccaccaggacagatggagggggagggaaag

SEQ ID NO: 27441 - protein, 70 aa, Homo sapiens
MDLPVADDNTVHFNSTLMALIRTALDIKIAKGGADKQQMDAELRKEMMAIWPNLSQKTLDLLVTPHKCKS

SEQ ID NO: 27442 - DNA, 552 bp, Homo sapiens
attgcattaatagtgctttctctctccctccttatttggggtctggcttgcttttttcctgttggttggcttcatgtaggggcctctgtgagtggtgacagctctgagccttttggggtgggtggatggtcacccctcttcctccatctccccagaataacttcatcaacctgagctttctccgcctcttccgagctgcccggctcatcaaacttctccgtcagggttacaccatccgcattcttctctggacctttgtgcagtccttcaaggccctgccttatgtctgtctgctgatcgccatgctcttcttcatctatgccatcattgggatgcaggtgtttggtaacattggcatcgacgtggaggacgaggacagtgatgaagatgagttccaaatcactgagcacaataacttccggaccttcttccaggccctcatgcttctcttccggtgagaaggggacctgctctgataattctgtttccgtggggtggggtgcctgccttcatccttctgttcccatagaggatgtaccctcctcttccaat

SEQ ID NO: 27443 - protein, 110 aa, Homo sapiens
MVTPLPPSPQNNFINLSFLRLFRAARLIKLLRQGYTIRILLWTFVQSFKALPYVCLLIAMLFFIYAIIGMQVFGNIGIDVEDEDSDEDEFQITEHNNFRTFFQALMLLFR

SEQ ID NO: 27444 - DNA, 315 bp, Homo sapiens
ctgccccctacccaacctgacctctgcttcctctcttcccttcttcccacctaaacattcctccacagtggcaatagcaaaggaaaagacatcaacacgattaaatccctccgagtcctccgggtgctacgacctcttaaaaccatcaagcggctgccaaagctcaaggctgtgtttgactgtgtggtgaactcacttaaaaacgtcttcaacatcctcatcgtctacatgctattcatgttcatcttcgccgtggtggctgtgcagctcttcaaggggaaattcttccactgcactgacgagtccaaagagttt

SEQ ID NO: 27445 - protein, 62 aa, Homo sapiens
CPLPNLTSASSLPFFPPKHSSTVAIAKEKTSTRLNPSESSGCYDLLKPSSGCQSSRLCLTVW

SEQ ID NO: 27446 - DNA, 733 bp, Homo sapiens
agatgacattcagggtgagtctccggctccatgtgggacagaagagcccgcccgcacctgccccaatgggaccaaatgtcagccctactgggaagggcccaacaacgggatcactcagttcgacaacatcctgtttgcagtgctgactgttttccagtgcataaccatggaagggtggactgatctcctctacaatagcaacgatgcctcagggaacacttggaactggttgtacttcatccccctcatcatcatcggctccttttttatgctgaaccttgtgctgggtgtgctgtcaggggagtttgccaaagaaagggaacgggtggagaaccggcgggcttttctgaagctgaggcggcaacaacagattgaacgtgagctcaatgggtacatggagtggatctcaaaagcaggtgaggccctttcatcctggggcccagggatggagatcccaggccacggagtacaaagagagtcatgcagtttggagaaggctaagctgggagggttatgatgggaggagaaagagaacctgaattggtagtcccaaattttatcaacaagaatccagagtctgatatgaagaagtctaagatgaagccaggatctgacatcacgtaacttgaattctgaaatcagacgctggtttacatcccggccctgccactttttacccatgcaccacacatccctgtacctccgtttcctcagctgttacatggaggcgatg

SEQ ID NO: 27447 - protein, 116 aa, Homo sapiens
MEGWTDLLYNSNDASGNTWNWLYFIPLIIIGSFFMLNLVLGVLSGEFAKERERVENRRAFLKLRRQQQIERELNGYMEWISKAGEALSSWGPGMEIPGHGVQRESCSLEKAKLGGL

SEQ ID NO: 27448 - DNA, 985 bp, Homo sapiens
ggcgcgaccgggccggcgctggggtaagaagcctgctgagggatgcccaagaagttccagggtgagaacaccaagtcggcagcggcccgggcacgtagggcagaggccaaggcggccgctgatgccaagaagcagaaggagctggaggatgcctactggaaggacgacgacaaacacgtcatgaggaaggagcagcgcaaggaggagaaggagaagcggcgcctcgaccagctggaacgtaagaaggagacgcagcgcctactggaggaggaggactccaagctcaagggcggcaaggcgccgcgggtggccacgtccagcaaggtcacccgggcccagatcgaggacacgctgcgccgagaccatcagctcagggaggccccggacacagccgagaaagccaagagccatctggaggtgccgctggaggagaacgtgaaccgccgcgtgctggaggagggcagcgtggaggcgcgcaccatcgaggacgccattgcagtgctcagcgtggcggaggaggcggccgaccggcacccagaaagacgcatgcgggcagccttcacagcctttgaggaagcccagctgccgcggctcaaacaagagaaccccaacatgcggctgtcgcagctgaaacagctgctcaagaaggagtggctccgctctcctgacaaccccatgaaccagcgggccgtgcccttcaatgcccccaagtgagcccagaacttggggagccagttcacccacgggtggtccaggtcacgactctgcacgcccttaggccaggtcagctgcgagggtcacagagcgttccgggggccaaggcgccgggccccggggccatgctcttatcaccagccacccgtcctcccgccagagggtccctgccccgagtgacaccccatcccctcccatcccccggcgcgtgtgtgtagagcctcagggctgagtgcccaataaaggtggcggcaaggctgcggtgaggcac

SEQ ID NO: 27449 - protein, 223 aa, Homo sapiens; identical to SEQ ID NO: 3727

SEQ ID NO: 27450 - DNA, 927 bp, Homo sapiens
tgggtggcttaaacagcagaaattgccaggcactgtggctcacacctgtaatccaggcactttgagaggctagtctcgaacttctgaccgcaagtgatccgcccgcctcggcctcccaaagtgctgggattacgggtgtgagccaccagacctggcctaaatgagctcatttggtgtcatgatgtgaattttgccttaataaacttttacaaggagagcgctaagtccaaagcccttgttttatacagagaaggccacagaggccccaagagggtcatggctgcccaagtgtgattctgggggtgctgagtgccgatgtcccctccggcccctgctcccccatccccatcctcttcccgcagcctgctgagggatgcccaagaagttccagggtgagaacaccaagtcggcagcggcccgggcacgtagggcagaggccaaggcggccgctgatgccaagaagcagaaggagctggaggatgcctactggaaggacgacgacaaacacgtcatgaggaaggagcagcgcaaggtgcgtgcactccgagtccccgcggcccgcatgccttgtggccaaggccagtggtcattatgtcaatgtgggtgaatagcgagagggccctctgagctttggtctgaaaggccaggagggaccaggcgctgtcgctcacgcctgtcatcccagtactttgggaggccgaggcaggcagatcacctggggtcaggagttcaagatcagcctggccaacatgatgaaaccctgtctctactaaaaatacaaaaattaactgcgtggtggcgcacacttacagtcccagctactctggaggctgaagcagaattgcttcaactgggaggcgcaggttgcagtgagccgaggtctccccgctgcactccagcatgggcaacagagcgagattccatctc

SEQ ID NO: 27451 - protein, 77 aa, Homo sapiens [sequence omitted]

SEQ ID NO: 27452 - DNA, 1051 bp, Homo sapiens
agagacggactcttgctatgttgcccaggctggtcttgaactcctggcctcaagcaatcctcctgcctcagcctcccaaagcacggggattacaaaccctgctgagggatgcccaagaagttccagggtgagaacaccaagtcggcagcggcccgggcacgtagggcagaggccaaggcggccgctgatgccaagaagcagaaggagctggaggatgcctactggaaggacgacgacaaacacgtcatgaggaaggagcagcgcaaggaggagaaggagaagcggcgcctcgaccagctggaacgtaagaaggagacgcagcgcctactggaggaggaggactccaagctcaagggcggcaaggcgccgcgggtggccacgtccagcaaggtcacccgggcccagatcgaggacacgctgcgccgagaccatcagctcagggaggccccggacacagccgagaaagccaagagccatctggaggtgccgctggaggagaacgtgaaccgccgcgtgctggaggagggcagcgtggaggcgcgcaccatcgaggacgccattgcagtgctcagcgtggcggaggaggcggccgaccggcacccagaaagacgcatgcgggcagccttcacagcctttgaggaagcccagctgccgcggctcaaacaagagaaccccaacatgcggctgtcgcagctgaaacagctgctcaagaaggagtggctccgctctcctgacaaccccatgaaccagcgggccgtgcccttcaatgcccccaagtgagcccagaacttggggagccagttcacccacgggtggtccaggtcacgactctgcacgcccttaggccaggtcagctgcgagggtcacagagcgttccgggggccaaggcgccgggccccggggccatgctcttatcaccagccacccgtcctcccgccagagggtccctgccccgagtgacaccccatcccctcccatcccccggcgcgtgtgtgtagagcctcagggctgagtgcccaataaaggtggcggcaaggctgcggtgaggcac

SEQ ID NO: 27453 - protein, 223 aa, Homo sapiens; identical to SEQ ID NO: 3727

SEQ ID NO: 27454 - DNA, 852 bp, Homo sapiens
cgggtgtgagccaccagacctggcctaaatgagctcatttggtgtcatgatgtgaattttgccttaataaacttttacaaggagagcgctaagtccaaagcccttgttttatacagagaaggccacagaggccccaagagggtcatggctgcccaagtgtgattctgggggtgctgagtgccgatgtcccctccggcccctgctcccccatccccatcctcttcccgcagcctgctgagggatgcccaagaagttccagggtgagaacaccaagtcggcagcggcccgggcacgtagggcagaggccaaggcggccgctgatgccaagaagcagaaggagctggaggatgcctactggaaggacgacgacaaacacgtcatgaggaaggagcagcgcaaggaggagaaggagaagcggcgcctcgaccagctggaacgtaagaaggagacgcagcgcctatcaaacaagagaaccccaacatgcggctgtcgcagctgaaacagctgctcaagaaggagtggctccgctctcctgacaaccccatgaaccagcgggccgtgcccttcaatgcccccaagtgagcccagaacttggggagccagttcacccacgggtggtccaggtcacgactctgcacgcccttaggccaggtcagctgcgagggtcacagagcgttccgggggccaaggcgccgggccccggggccatgctcttatcaccagccacccgtcctcccgccagagggtccctgccccgagtgacaccccatcccctcccatcccccggcgcgtgtgtgtagagcctcagggctgagtgcccaataaaggtggcggcaaggctgcggtgaggca

SEQ ID NO: 27455 - protein, 85 aa, Homo sapiens
MPKKFQGENTKSAAARARRAEAKAAADAKKQKELEDAYWKDDDKHVMRKEQRKEEKEKRRLDQLERKKETQRLSNKRTPTCGCRS

SEQ ID NO: 27456 - DNA, 2816 bp, Homo sapiens
ggtggtctgagctggagccacgctttctgttggagggggcagctgaaggagaacagcaagacatatccggcggccctacggactcggagagctggagggaccccggagatctcaaagggacaggaaaggcagcagcagccaccctctctcccagtcaagtggtcaccagcaggactgaaggggacagcccctttgcagtggctcggcgaggagacccctgcaccctagggtcagtgcaggagcccagccgctgagccatgccgggccccgggcggcctgcagcgagcccaacccctgcacccaggtagtcatgaacagccacagctacaatggcagcgtggggcggccgctgggcagcgggccgggcgccctgggacgagaccctccggaccctgaggccggccaccccccacaacccccgcacagcccgggcctccaggtggtagtggccaagagtgagccagcccggccctcacccggcagcccccgggggcagccccaggaccaggacgatgacgaggatgatgaggaagatgaggccggcaggcagagagcctcggggaaaccctcaaatgtgggccaccgcctgggccaccggcgggcgctcttcgagaagcggaagcgcctcagcgactatgccctcattttcggcatgtttggcatcgtcgtcatggtgacggagaccgagctgtcctggggggtgtacaccaaggagtctctgtactcattcgcactcaaatgcctcatcagcctctccacggccatcctgctgggtctcgttgtcctctaccatgcccgggagatccagctgttcatggtggacaacggggctgatgactggcgcatcgccatgacctgcgagcgcgtgttcctcatctcgctagagctggcagtgtgcgccattcacccggtgcccggccactaccgcttcacgtggacggcgcggctggccttcacgtacgcgccctcggtggccgaggccgacgtggacgtgctgctgtccatccccatgttcctgcgcctctacctgctgggccgggtgatgctactgcacagcaaaatcttcacggacgcctcgagccgcagcatcggggccctcaacaagatcaccttcaacacgcgcttcgtcatgaagacactcatgaccatctgccccggcaccgtgctgctggtcttcagcatctcctcctggatcatcgcagcctggaccgtgcgcgtctgcgagaggtaccacgacaagcaggaagtgaccagcaacttcctgggggccatgtggctgatttccatcaccttcctctccattggctacggcgacatggtgccccacacctactgcgggaagggtgtgtgcctgctcactggcatcatgggagctggctgtaccgcgctcgtggtggctgtggtggctcggaagctggagctcaccaaggctgagaagcacgtgcacaacttcatgatggacactcagctcaccaagcgggtaaaaaacgccgctgctaacgttctcagggagacgtggctcatctacaaacataccaggctggtgaagaagccagaccaagcccgggttcggaaacaccagcgtaagttcctccaagccatccatcaggctcagaagctccggagtgtgaagatcgagcaagggaagctgaacgaccaggctaacacgcttaccgacctagccaagacccagaccgtcatgtacgaccttgtatcggagctgcacgctcagcacgaggagctggaggcccgcctggccaccctggaaagccgcttggatgcgctgggtgcctctctacaggccctgcctggcctcatcgcccaagccatacgcccacccccgcctcccctgcctcccaggcccggccccggcccccaagaccaggcagcccggagctccccctgccggtggacgcccgtggccccctcggactgcgggtgacggccctgcccgccaccagacccctaaatcttggccatcgtgtggccgccacctccgggaagccttgtacagtggcgcctcttggagttcaagaagccaacgctgagtcaggctgagtggactgaggcctgccccgcccagactgcccaggcagagggcagggctggaccatgggtgagggcaggggagcccggagcttcctctggtcacctggtcccccgactctccccaggcccccggtgggcatggagcagcccggggaggggtccgtgctggttctgaataaagcaggacccgcctagtggctgcctgtgtgcatggctggaaggcactggtgatgtcccaggaggtagacctccagccctgggtaccaagatgaatgtgggaatcagaaaaacctgttcccatcaccggcctagcctagaatcctagcctagaagccctctctccctctgggctggagctcagtgagggacaactctctagggacacctgtaccagccccacctggcgctgagatccctcagacagcatggcccagccctggccagaagcatcgctccccttcaaccaaccgcgttgatggacacccactgtgtgccaggccccagcggggcccatgggggaggtgacctgggtgaggaaggtcatttgggtttttgtgagatttgtattgagcacctgctgtctacagagaatgtgatgatgtcaattaccacactgattcctcatcagaacttgaccatggtgggatgggggggaaactgaggcccagagaggtgaatctacctacctgggaccacactgcgaggaaggatggtgcattcaaactggaaatcccctaggccaaagtaaagaaccggactggctgggc

SEQ ID NO: 27457 - protein, 543 aa, Homo sapiens; identical to SEQ ID NO: 3729

SEQ ID NO: 27458 - DNA, 1225 bp, Homo sapiens
ccaagcccgggttcggaaacaccagcgctccggagtgtgaagatcgagcaagggaagctgaacgaccaggctaacacgcttaccgacctagccaagacccagaccgtcatgtacgaccttgtatcggagctgcacgctcagcacgaggagctggaggcccgcctggccaccctggaaagccgcttggatgcgctgggtgcctctctacaggccctgcctggcctcatcgcccaagccatacgcccacccccgcctcccctgcctcccaggcccggccccggcccccaagaccaggcagcccggagctccccctgccggtggacgcccgtggccccctcggactgcgggtgacggccctgcccgccaccagacccctaaatcttggccatcgtgtggccgccacctccgggaagccttgtacagtggcgcctcttggagttcaagaagccaacgctgagtcaggctgagtggactgaggcctgccccgcccagactgcccaggcagagggcagggctggaccatgggtgagggcaggggagcccggagcttcctctggtcacctggtcccccgactctccccaggcccccggtgggcatggagcagcccggggaggggtccgtgctggttctgaataaagcaggacccgcctagtggctgcctgtgtgcatggctggaaggcactggtgatgtcccaggaggtagacctccagccctgggtaccaagatgaatgtgggaatcagaaaaacctgttcccatcaccggcctagcctagaatcctagcctagaagccctctctccctctgggctggagctcagtgagggacaactctctagggacacctgtaccagccccacctggcgctgagatccctcagacagcatggcccagccctggccagaagcatcgctccccttcaaccaaccgcgttgatggacacccactgtgtgccaggccccagcggggcccatgggggaggtgacctgggtgaggaaggtcatttgggtttttgtgagatttgtattgagcacctgctgtctacagagaatgtgatgatgtcaattaccacactgattcctcatcagaacttgaccatggtgggatgggggggaaactgaggcccagagaggtgaatctacctacctgggaccacactgcgaggaaggatggtgcattcaaactggaaatcccctaggccaaagtaaagaaccggactggctgggc

SEQ ID NO: 27459 - protein, 89 aa, Homo sapiens
MRWVPLYRPCLASSPKPYAHPRLPCLPGPAPAPKTRQPGAPPAGGRPWPPRTAGDGPARHQTPKSWPSCGRHLREALYSGASWSSRSQR

SEQ ID NO: 27460 - DNA, 2528 bp, Homo sapiens
ccaggaagttcgccgacgacgcgcccgccctgggccaccggcgccggcccaagttcgccgggggggcccggaggaagcttgggggacgcgacgggggaacgcggaaaccccggggatctgcaggcgcgcccgggccgtgtgccttctctccgcgtgtccaaaccgtgtccccagccgcgcgccatgcgctctgggggcgtgcgcagcttcgcgctggagctggcgcggggcccgggcggcgcctaccgcggcggggagcggctgtgcggccgggtgctgctggaggcggcggcgccgctgcgggtgcgagcgctcgaggtgaaggcgcgcggcggggcggccacccactggttggagggtcgcagcgtgggcgtcaacgccgtatccagcgactacgcggccgcggagacctacctgcggcgtcggcagctgctgctccgagataccggggagaccacgacgctgcctcctgggcgccatgagttcctgttcagcttccagctgcccccgaccctggtgacatccttcgagggcaaacacggtagtgtccgctactgtatcaaggccaccctgcaccggccctgggtcccagcacgccgggcaaggaaggtgttcactgtcatcgagcctgtggacatcaacacgccagccctgctggcacctcaagcgggggctcgggaaaaggttgcccgatcctggtactgtaaccgtggcctagtctccctttcggccaagatcgaccgcaagggctacaccccaggagaggtcatccctgtctttgccgagatcgacaacggctccacacgtcctgtgctgcctcgggcagccgtggtgcagacacagacgttcatggcccgaggcgcccgaaagcagaaacgggcagtggtggccagcctcgcgggcgagccggtgggccccgggcagcgggcgctgtggcagggccgggcactgcggatccccccagtgggtccttccatcctgcactgccgcgttctacacgtggactacgcactcaaggtctgtgtggatatcccaggaacgtccaagctgctgctggagctgccactggtgatcggcaccattcccttgcacccttttggcagccgttcctccagcgtgggcagccacgccagcttcctgctggactggaggctgggggccttgccggagcggcctgaggctcctcctgagtactcggaggtggtagccgacactgaggaggcagccttggggcagagccccttcccgcttccgcaggaccccgacatgagccttgaaggcccgttcttcgcctacatccaagagttccgctaccgcccgccacccctgtactctgaggaggatccaaacccactcttgggggacatgaggccgcgctgcatgacttgctgaacggcacagggacccctcgaggaacaaggttgcacaccagctttcagccaccatgactgtggggagtggctggaccaagggctgacctccccgactgcatcaaagttggggaaccaagtctcagagtgaggcgggggcctttcggatatcacatgggacagaggaagagcccggctggaatctgacttacctggaccgctgtccttgtgaggcattgaatgcccagtgcagtatccgagagactgtttaataacctgtcttcccagccaattggtggtgctggaatcccctaggagccttcagtctgggagaaacagagccagacatagacagttccagcatcacagaaccagaagaagagacctgcaactgtgagagtccagacaggaagcagagaaggcgtccttgcggaaagggcattttagctgaggctttggagtacgaataggagctcagcaggcagacgaatgaggaataaaggtcagagaaggtcagagctgagtgacgtttggaatccaccccgtttattgtagaactgggggttcagagggcaggtgcctcagagttgaggccacacagtgaggtctggtgggtgaaaggacccaggaacgaggcgttcaggaaagcaggttgtcagagctatgtggagtctgtgggtggcaggggcagccgctccagcctttgaagactttgaaagccagagattcctggcgcaggcttggacttcctgggagctcctccaagtacccaggggcatcagagctgcctgggtgttacatggcccagggaacccaggttcagggtaggacaggcaagaccagatacccaatgtgcaaagtgaaaacactgggctccctgttaaacgatgaagaattcaagacagtgacagcattacgtcacccctggggacagaggtcagcctaaggtgacacacggggactactgtgcttccggaggctccctgtgtcctggaggagaaaagcattagagggggcagctggacaagctcccaactgcagagtcccagccctggctggggcagggccccggcctgggactcagcatttctgatatgccttaagaattcattctgttttgtacaattattttttaaaagtaaacgtgtggagaaagaa

SEQ ID NO: 27461 - protein, 402 aa, Homo sapiens; identical to SEQ ID NO: 3731

SEQ ID NO: 27462 - DNA, 895 bp, Homo sapiens
gcggccgcggagacctacctgcggcgtcggcagctgctgctccgagataccggggagaccacgacgctgcctcctgggcgccatgagttcctgttcagcttccagctgcccccgaccctggtgacatccttcgagagtccagacaggaagcagagaaggcgtccttgcggaaagggcattttagctgaggctttggagtacgaataggagctcagcaggcagacgaatgaggaataaaggtcagagaaggtcagagctgagtgacgtttggaatccaccccgtttattgtagaactgggggttcagagggcaggtgcctcagagttgaggccacacagtgaggtctggtgggtgaaaggacccaggaacgaggcgttcaggaaagcaggttgtcagagctatgtggagtctgtgggtggcaggggcagccgctccagcctttgaagactttgaaagccagagattcctggcgcaggcttggacttcctgggagctcctccaagtacccaggggcatcagagctgcctgggtgttacatggcccagggaacccaggttcagggtaggacaggcaagaccagatacccaatgtgcaaagtgaaaacactgggctccctgttaaacgatgaagaattcaagacagtgacagcattacgtcacccctggggacagaggtcagcctaaggtgacacacggggactactgtgcttccggaggctccctgtgtcctggaggagaaaagcattagagggggcagctggacaagctcccaactgcagagtcccagccctggctggggcagggccccggcctgggactcagcatttctgatatgccttaagaattcattctgttttgtacaattattttttaaaagtaaacgtgtggagaaagaa

SEQ ID NO: 27463 - protein, 54 aa, Homo sapiens
MWSLWVAGAAAPAFEDFESQRFLAQAWTSWELLQVPRGIRAAWVLHGPGNPGSG

SEQ ID NO: 27464 - DNA, 2503 bp, Homo sapiens
gggattttctgctccggttggtgagcgcgcctgcgcgttgacggcgattttgcgttctgaggctgcagcgtcggcatcttgagctgccggttcgcgagttcgaggccaggttccgcctgtcgtgggttcgcaccccggacgcgatgctattcgacaaggtgaaagcgttctcggtgcagttggacggcgcgaccgcgggcgtcgagcccgtgtttagcggcggccaggccgtggcgggccgggtgctgctggagctgtcaagcgccgcgcgtgtgggtgccctgaggctgcgcgcgcggggccgcgcccacgtgcactggaccgagtcgcgcagcgcgggctcgagcacggcttacacgcagagctacagtgaacgcgtggaggtcgtgagccaccgcgccacgctcctggcgccagataccggggagaccacgacgctgcctcctgggcgccatgagttcctgttcagcttccagctgcccccgaccctggtgacatccttcgagggcaaacacggtagtgtccgctactgtatcaaggccaccctgcaccggccctgggtcccagcacgccgggcaaggaaggtgttcactgtcatcgagcctgtggacatcaacacgccagccctgctggcacctcaagcgggggctcgggaaaaggttgcccgatcctggtactgtaaccgtggcctagtctccctttcggccaagatcgaccgcaagggctacaccccaggagaggtcatccctgtctttgccgagatcgacaacggctccacacgtcctgtgctgcctcgggcagccgtggtgcagacacagacgttcatggcccgaggcgcccgaaagcagaaacgggcagtggtggccagcctcgcgggcgagccggtgggccccgggcagcgggcgctgtggcagggccgggcactgcggatccccccagtgggtccttccatcctgcactgccgcgttctacacgtggactacgcactcaaggtctgtgtggatatcccaggaacgtccaagctgctgctggagctgccactggtgatcggcaccattcccttgcacccttttggcagccgttcctccagcgtgggcagccacgccagcttcctgctggactggaggctgggggccttgccggagcggcctgaggctcctcctgagtactcggaggtggtagccgacactgaggaggcagccttggggcagagccccttcccgcttccgcaggaccccgacatgagccttgaaggcccgttcttcgcctacatccaagagttccgctaccgcccgccacccctgtactctgaggaggatccaaacccactcttgggggacatgaggccgcgctgcatgacttgctgaacggcacagggacccctcgaggaacaaggttgcacaccagctttcagccaccatgactgtggggagtggctggaccaagggctgacctccccgactgcatcaaagttggggaaccaagtctcagagtgaggcgggggcctttcggatatcacatgggacagaggaagagcccggctggaatctgacttacctggaccgctgtccttgtgaggcattgaatgcccagtgcagtatccgagagactgtttaataacctgtcttcccagccaattggtggtgctggaatcccctaggagccttcagtctgggagaaacagagccagacatagacagttccagcatcacagaaccagaagaagagacctgcaactgtgagagtccagacaggaagcagagaaggcgtccttgcggaaagggcattttagctgaggctttggagtacgaataggagctcagcaggcagacgaatgaggaataaaggtcagagaaggtcagagctgagtgacgtttggaatccaccccgtttattgtagaactgggggttcagagggcaggtgcctcagagttgaggccacacagtgaggtctggtgggtgaaaggacccaggaacgaggcgttcaggaaagcaggttgtcagagctatgtggagtctgtgggtggcaggggcagccgctccagcctttgaagactttgaaagccagagattcctggcgcaggcttggacttcctgggagctcctccaagtacccaggggcatcagagctgcctgggtgttacatggcccagggaacccaggttcagggtaggacaggcaagaccagatacccaatgtgcaaagtgaaaacactgggctccctgttaaacgatgaagaattcaagacagtgacagcattacgtcacccctggggacagaggtcagcctaaggtgacacacggggactactgtgcttccggaggctccctgtgtcctggaggagaaaagcattagagggggcagctggacaagctcccaactgcagagtcccagccctggctggggcagggccccggcctgggactcagcatttctgatatgccttaagaattcattctgttttgtacaattattttttaaaagtaaacgtgtggagaaagaa

SEQ ID NO: 27465 - protein, 407 aa, Homo sapiens; identical to SEQ ID NO: 3733

SEQ ID NO: 27466 - DNA, 608 bp, Homo sapiens
gattttctgctccggttggtgagcgcgcctgcgcgttgacggcgattttgcgttctgaggctgcagcgtcggcatcttgagctgccggttcgcgagttcgaggccaggttccgcctgtcgtgggttcgcaccccggacgcgatgctattcgacaaggtgaaagcgttctcggtgcagttggacggcgcgaccgcgggcgtcgagcccgtgtttagcggcggccaggccgtggcgggccgggtgctgctggagctgtcaagcgccgcgcgtgtgggtgccctgaggctgcgcgcgcggggccgcgcccacgtgcactggaccgagtcgcgcagcgcgggctcgagcacggcttacacgcagagctacagtgaacgcgtggaggtcgtgagccaccgcgccacgctcctggcgccagataccggggagaccacgacgctgcctcctgggcgccatgagttcctgttcagagctggacaagctcccaactgcagagtcccagccctggctggggcagggccccggcctgggactcagcatttctgatatgccttaagaattcattctgttttgtacaattattttttaaaagtaaacgtgtggagaaagaa

SEQ ID NO: 27467 - protein, 133 aa, Homo sapiens
MLFDKVKAFSVQLDGATAGVEPVFSGGQAVAGRVLLELSSAARVGALRLRARGRAHVHWTESRSAGSSTAYTQSYSERVEVVSHRATLLAPDTGETTTLPPGRHEFLFRAGQAPNCRVPALAGAGPRPGTQHF
